United States Patent Application Publication US 2018/0126003 A1 - sequence listing, part 90

SEQ ID NO: 163342 - DNA, 2958 bp, Artificial Sequence
  derived and/or modified sequence
atgcacagaagaagactggccctgggcctgggcttctgcctgctggccggcaccagcctgagcgtgctgtgggtgtacctggagaactggctgcccgtgagctacgtgccctactacctgccctgccccgagatcctgcccatgatgatggccctgagctgcctgtgccaccagcagcacgaggccgccctgcaggagggcgaggccacccccgccagaggcatggtgaccgtgcccagcgcccaggccgccggcgcccaggcccacaccgccgccgacacccacaccctggtgggcgcccacagactgagaggcaacctgcagcccagagccagcgccgcccacctgcccgccaccgagcccgaccactggggccacggcgtgtgcagaggcgagagcagcacccaggagatcggcgaggagctgatcaacggcgtgatctacagcatcagcctgagaaaggtgcagctgcaccacggcggcaacaagggccagagatggctgggctacgagaacgagagcgccctgaacctgtacgagacctgcaaggtgagaaccgtgaaggccggcaccctggagaagctggtggagcacctggtgcccgccttccagggcagcgacctgagctacgtgaccatcttcctgtgcacctacagagccttcaccaccacccagcaggtgctggacctgctgttcaagagatacggcagatgcgacgccctgaccgccagcagcagatacggctgcatcctgccctacagcgacgaggacggcggcccccaggaccagctgaagaacgccatcagcagcatcctgggcacctggctggaccagtacagcgaggacttctgccagccccccgacttcccctgcctgaagcagctggtggcctacgtgcagctgaacatgcccggcagcgacctggagagaagagcccacctgctgctggcccagctggagcacagcgagcccatcgaggccgagcccgaggccctgagccccgtgcccgccctgaagcccacccccgagctggagctggccctgacccccgccagagcccccagccccgtgcccgcccccgcccccgagcccgagcccgcccccacccccgcccccggcagcgagctggaggtggcccccgcccccgcccccgagctgcagcaggcccccgagcccgccgtgggcctggagagcgcccccgcccccgccctggagctggagcccgcccccgagcaggaccccgcccccagccagaccctggagctggagcccgcccccgcccccgtgcccagcctgcagcccagctggcccagccccgtggtggccgagaacggcctgagcgaggagaagccccacctgctggtgttcccccccgacctggtggccgagcagttcaccctgatggacgccgagctgttcaagaaggtggtgccctaccactgcctgggcagcatctggagccagagagacaagaagggcaaggagcacctggcccccaccatcagagccaccgtgacccagttcaacagcgtggccaactgcgtgatcaccacctgcctgggcaacagaagcaccaaggcccccgacagagccagagtggtggagcactggatcgaggtggccagagagtgcagaatcctgaagaacttcagcagcctgtacgccatcctgagcgccctgcagagcaacagcatccacagactgaagaagacctgggaggacgtgagcagagacagcttcagaatcttccagaagctgagcgagatcttcagcgacgagaacaactacagcctgagcagagagctgctgatcaaggagggcaccagcaagttcgccaccctggagatgaaccccaagagagcccagaagagacccaaggagaccggcatcatccagggcaccgtgccctacctgggcaccttcctgaccgacctggtgatgctggacaccgccatgaaggactacctgtacggcagactgatcaacttcgagaagagaagaaaggagttcgaggtgatcgcccagatcaagctgctgcagagcgcctgcaacaactacagcatcgcccccgacgagcagttcggcgcctggttcagagccgtggagagactgagcgagaccgagagctacaacctgagctgcgagctggagccccccagcgagagcgccagcaacaccctgagaaccaagaagaacaccgccatcgtgaagagatggagcgacagacaggcccccagcaccgagctgagcaccagcggcagcagccacagcaagagctgcgaccagctgagatgcggcccctacctgagcagcggcgacatcgccgacgccctgagcgtgcacagcgccggcagcagcagcagcgacgtggaggagatcaacatcagcttcgtgcccgagagccccgacggccaggagaagaagttctgggagagcgccagccagagcagccccgagaccagcggcatcagcagcgccagcagcagcaccagcagcagcagcgccagcaccacccccgtggccgccaccagaacccacaagagaagcgtgagcggcctgtgcaacagcagcagcgccctgcccctgtacaaccagcaggtgggcgactgctgcatcatcagagtgagcctggacgtggacaacggcaacatgtacaagagcatcctggtgaccagccaggacaaggcccccgccgtgatcagaaaggccatggacaagcacaacctggaggaggaggagcccgaggactacgagctgctgcagatcctgagcgacgacagaaagctgaagatccccgagaacgccaacgtgttctacgccatgaacagcaccgccaactacgacttcgtgctgaagaagagaaccttcaccaagggcgtgaaggtgaagcacggcgccagcagcaccctgcccagaatgaagcagaagggcctgaagatcgccaagggcatcttctag

SEQ ID NO: 163343 - protein, 3224 aa, Artificial Sequence
  derived and/or modified sequence
MRRSKADVERYIASVQGSTPSPRQKSMKGFYFAKLYYEAKEYDLAKKYICTYINVQERDPKAHRFLGLLYELEENTDKAVECYRRSVELNPTQKDLVLKIAELLCKNDVTDGRAKYWLERAAKLFPGSPAIYKLKEQLLDCEGEDGWNKLFDLIQSELYVRPDDVHVNIRLVEVYRSTKRLKDAVAHCHEAERNIALRSSLEWNSCVVQTLKEYLESLQCLESDKSDWRATNTDLLLAYANLMLLTLSTRDVQESRELLQSFDSALQSVKSLGGNDELSATFLEMKGHFYMHAGSLLLKMGQHSSNVQWRALSELAALCYLIAFQVPRPKIKLIKGEAGQNLLEMMACDRLSQSGHMLLNLSRGKQDFLKEIVETFANKSGQSALYDALFSSQSPKDTSFLGSDDIGNIDVREPELEDLTRYDVGAIRAHNGSLQHLTWLGLQWNSLPALPGIRKWLKQLFHHLPHETSRLETNAPESICILDLEVFLLGVVYTSHLQLKEKCNSHHSSYQPLCLPLPVCKQLCTERQKSWWDAVCTLIHRKAVPGNVAKLRLLVQHEINTLRAQEKHGLQPALLVHWAECLQKTGSGLNSFYDQREYIGRSVHYWKKVLPLLKIIKKKNSIPEPIDPLFKHFHSVDIQASEIVEYEEDAHITFAILDAVNGNIEDAVTAFESIKSVVSYWNLALIFHRKAEDIENDALSPEEQEECKNYLRKTRDYLIKIIDDSDSNLSVVKKLPVPLESVKEMLNSVMQELEDYSEGGPLYKNGSLRNADSEIKHSTPSPTRYSLSPSKSYKYSPKTPPRWAEDQNSLLKMICQQVEAIKKEMQELKLNSSNSASPHRWPTENYGPDSVPDGYQGSQTFHGAPLTVATTGPSVYYSQSPAYNSQYLLRPAANVTPTKGPVYGMNRLPPQQHIYAYPQQMHTPPVQSSSACMFSQEMYGPPALRFESPATGILSPRGDDYFNYNVQQTSTNPPLPEPGYFTKPPIAAHASRSAESKTIEFGKTNFVQPMPGEGLRPSLPTQAHTTQPTPFKFNSNFKSNDGDFTFSSPQVVTQPPPAAYSNSESLLGLLTSDKPLQGDGYSGAKPIPGGQTIGPRNTFNFGSKNVSGISFTENMGSSQQKNSGFRRSDDMFTFHGPGKSVFGTPTLETANKNHETDGGSAHGDDDDDGPHFEPVVPLPDKIEVKTGEEDEEEFFCNRAKLFRFDVESKEWKERGIGNVKILRHKTSGKIRLLMRREQVLKICANHYISPDMKLTPNAGSDRSFVWHALDYADELPKPEQLAIRFKTPEEAALFKCKFEEAQSILKAPGTNVAMASNQAVRIVKEPTSHDNKDICKSDAGNLNFEFQVAKKEGSWWHCNSCSLKNASTAKKCVSCQNLNPSNKELVGPPLAETVFTPKTSPENVQDRFALVTPKKEGHWDCSICLVRNEPTVSRCIACQNTKSANKSGSSFVHQASFKFGQGDLPKPINSDFRSVFSTKEGQWDCSACLVQNEGSSTKCAACQNPRKQSLPATSIPTPASFKFGTSETSKTLKSGFEDMFAKKEGQWDCSSCLVRNEANATRCVACQNPDKPSPSTSVPAPASFKFGTSETSKAPKSGFEGMFTKKEGQWDCSVCLVRNEASATKCIACQNPGKQNQTTSAVSTPASSETSKAPKSGFEGMFTKKEGQWDCSVCLVRNEASATKCIACQNPGKQNQTTSAVSTPASSETSKAPKSGFEGMFTKKEGQWDCSVCLVRNEASATKCIACQCPSKQNQTTAISTPASSEISKAPKSGFEGMFIRKGQWDCSVCCVQNESSSLKCVACDASKPTHKPIAEAPSAFTLGSEMKLHDSSGSQVGTGFKSNFSEKASKFGNTEQGFKFGHVDQENSPSFMFQGSSNTEFKSTKEGFSIPVSADGFKFGISEPGNQEKKSEKPLENGTGFQAQDISGQKNGRGVIFGQTSSTFTFADLAKSTSGEGFQFGKKDPNFKGFSGAGEKLFSSQYGKMANKANTSGDFEKDDDAYKTEDSDDIHFEPVVQMPEKVELVTGEEDEKVLYSQRVKLFRFDAEVSQWKERGLGNLKILKNEVNGKLRMLMRREQVLKVCANHWITTTMNLKPLSGSDRAWMWLASDFSDGDAKLEQLAAKFKTPELAEEFKQKFEECQRLLLDIPLQTPHKLVDTGRAAKLIQRAEEMKSGLKDFKTFLTNDQTKVTEEENKGSGTGAAGASDTTIKPNPENTGPTLEWDNYDLREDALDDSVSSSSVHASPLASSPVRKNLFRFGESTTGFNFSFKSALSPSKSPAKLNQSGTSVGTDEESDVTQEEERDGQYFEPVVPLPDLVEVSSGEENEQVVFSHRAKLYRYDKDVGQWKERGIGDIKILQNYDNKQVRIVMRRDQVLKLCANHRITPDMTLQNMKGTERVWLWTACDFADGERKVEHLAVRFKLQDVADSFKKIFDEAKTAQEKDSLITPHVSRSSTPRESPCGKIAVAVLEETTRERTDVIQGDDVADATSEVEVSSTSETTPKAVVSPPKFVFGSESVKSIFSSEKSKPFAFGNSSATGSLFGFSFNAPLKSNNSETSSVAQSGSESKVEPKKCELSKNSDIEQSSDSKVKNLFASFPTEESSINYTFKTPEKAKEKKKPEDSPSDDDVLIVYELTPTAEQKALATKLKLPPTFFCYKNRPDYVSEEEEDDEDFETAVKKLNGKLYLDGSEKCRPLEENTADNEKECIIVWEKKPTVEEKAKADTLKLPPTFFCGVCSDTDEDNGNGEDFQSELQKVQEAQKSQTEEITSTTDSVYTGGTEVMVPSFCKSEEPDSITKSISSPSVSSETMDKPVDLSTRKEIDTDSTSQGESKIVSFGFGSSTGLSFADLASSNSGDFAFGSKDKNFQWANTGAAVFGTQSVGTQSAGKVGEDEDGSDEEVVHNEDIHFEPIVSLPEVEVKSGEEDEEILFKERAKLYRWDRDVSQWKERGVGDIKILWHTMKNYYRILMRRDQVFKVCANHVITKTMELKPLNVSNNALVWTASDYADGEAKVEQLAVRFKTKEVADCFKKTFEECQQNLMKLQKGHVSLAAELSKETNPVVFFDVCADGEPLGRITMELFSNIVPRTAENFRALCTGEKGFGFKNSIFHRVIPDFVCQGGDITKHDGTGGQSIYGDKFEDENFDVKHTGPGLLSMANQGQNTNNSQFVITLKKAEHLDFKHVVFGFVKDGMDTVKKIESFGSPKGSVCRRITITECGQI

SEQ ID NO: 163344 - DNA, 9675 bp, Artificial Sequence
  derived and/or modified sequence
atgcgcaggagcaaagcagatgtggagagatatatcgcctcagtgcagggatccacaccatcccctagacaaaagagcatgaagggattctactttgcaaagttatattacgaggcaaaggagtacgacctggctaaaaagtatatttgcacgtacatcaacgtacaagagcgcgatcctaaagcccaccggttcctcggcttactgtacgaattggaggagaacaccgataaggctgtggagtgctacagaagaagtgtggagttgaatccgactcagaaggatctcgtactgaagattgcagagctgctttgcaaaaacgacgtcactgatgggagagcaaaatactggttagaaagggctgctaagctgttcccggggtcccccgcgatctacaagctgaaagaacagctcctggattgcgaaggcgaagacggatggaataaactgtttgacctgatccagtccgagttgtatgtgagacctgacgacgtgcacgtgaatatacgtcttgttgaagtttatcgatcaacaaaaagacttaaggatgccgtggcacactgccacgaagcggagcgcaatatcgccctgaggtcctccttggaatggaattcttgcgtggttcagaccttgaaggagtacctcgagtctctccagtgtctggagtctgataagtctgattggcgcgccaccaataccgatctgctgctggcctacgctaacctgatgctgttaactctctccacacgcgacgtgcaggagtcaagggagctcttgcagtctttcgactctgcccttcagtcggtgaagagtcttggcgggaacgatgagctcagcgcaaccttcctagagatgaaaggccatttctatatgcacgcgggctccctgctgcttaagatgggtcagcacagttccaacgtacagtggagggcactgagcgaactggctgccctctgctacctaatcgcctttcaggttcctcggcctaaaatcaaactcatcaaaggggaagctggtcaaaacctgctcgagatgatggcttgcgaccgtctgagtcagtcagggcacatgttgctcaacctgagcaggggcaagcaagactttttaaaagaaatagttgagacatttgcgaacaagtccggccagagcgccctgtatgacgccttgttctcgtcacaatcaccaaaagacactagcttcctcggttccgatgacatcgggaatatcgacgtgcgcgagcctgagctggaggacctgacaagatacgacgtgggggcgatccgagcacataatggctctctccagcatctgacttggctaggcctccagtggaattccttgcccgcgctgccaggcatcaggaaatggctcaagcagctgtttcatcacctgccccacgaaacctcacgcttagagaccaatgctcctgagagtatctgtatcctagatctggaggtctttttgctgggggttgtatacacctcacatctgcagctaaaggagaagtgcaatagccatcactcttcttatcaacctctatgtctgcctcttcctgtctgcaagcagctatgcacggaacggcagaagagttggtgggatgctgtatgcacactgatacatcgcaaggcagtcccagggaatgttgctaaattgcgcctattggtgcaacacgagattaacactctcagagctcaagaaaaacacggattgcagccggcgctcttagtgcattgggcagaatgcctacagaaaacaggaagtggcctgaattctttttacgaccaaagggaatacattggtcggtctgtgcattactggaagaaagtgctgcctttgttaaaaatcatcaaaaaaaagaactccatccccgagcccatcgatccactgtttaagcatttccatagtgtcgacatccaggcctccgaaattgtggaatatgaagaagacgcacatatcactttcgcaattctggacgccgtgaacgggaacatagaagatgcagtgactgcttttgaatccatcaaatctgtcgtaagctactggaacctcgctcttattttccataggaaggccgaggatattgagaacgatgcactctcaccagaggagcaagaagagtgcaagaattatctgagaaagacaagggactacctgatcaagattatcgacgactccgatagcaatctgagcgttgtgaaaaagttgccagtccctctggaatcagttaaggagatgttaaattccgttatgcaagaactggaagattacagcgaaggcggaccattgtacaagaacggatcactccggaacgcagattctgagatcaagcactcgaccccgtcccccacacgttattctctttccccatccaaatcctataagtactcccccaagacccctccaaggtgggctgaggatcagaacagcctattgaaaatgatctgtcagcaggtcgaagcaatcaagaaggagatgcaggagcttaagctcaatagcagcaacagtgcatcgccacacagatggccgactgagaattacggtcccgacagcgtccctgatgggtatcaaggttcccagacgtttcacggagctccactgacagtggccactaccgggcccagcgtatattattctcagagccccgcctacaactcacagtacctcctgcgacctgctgccaacgtaactcccactaaggggcctgtgtacggcatgaaccggttacccccgcagcagcatatttatgcttacccacaacagatgcacaccccaccagtgcaatcctctagcgcatgcatgttcagccaagagatgtacggaccacctgctctgaggtttgaatcacccgccaccgggattttaagtccccggggtgatgattacttcaactataacgtccaacagacaagtactaacccccctctacccgaaccggggtactttactaaaccccctattgccgcgcatgctagccggagtgcggagtctaaaactattgaatttggtaagacaaactttgttcagccaatgccgggggagggacttcgcccaagtctgccaacacaggctcacaccacacagcccacccctttcaaattcaacagtaacttcaaatctaatgacggcgattttactttctcctcccctcaggtggtgacacagccacccccagccgcctactcaaactctgaaagccttctgggactgctgacgtctgacaaacctctccagggtgacggctattctggcgcgaagcccatacccggagggcagactatcggcccccgcaacactttcaactttgggtcgaagaacgtatcaggaatctcgtttactgagaacatgggttcttctcagcagaaaaacagtgggtttagacgttctgacgacatgtttacctttcatggcccgggtaagagcgtcttcggaacccctactctagagacggccaacaagaatcacgaaacggacggagggtcagctcacggagacgacgatgacgacggaccacactttgagcccgtggtgcccctccctgataagattgaggtcaaaacaggtgaagaagacgaagaggagttcttctgtaacagggcaaaactcttcaggtttgatgttgaaagcaaagaatggaaggaaagaggcatcgggaacgtaaaaatcctacggcacaagaccagcgggaaaattcgtctgctgatgagacgagaacaggttcttaaaatctgtgctaaccattatatcagcccagacatgaaattaaccccaaacgccgggagtgatcgttccttcgtttggcacgccctcgattacgccgacgagttgcctaagcccgagcagcttgccatcaggttcaaaaccccggaggaggctgcgctgtttaagtgtaaattcgaggaagcacagtctattctgaaggcacccgggaccaacgtcgccatggcgtccaatcaagccgtccgcatagtaaaggagcccacgtcccacgacaataaagatatttgcaagtcggacgctgggaatctgaactttgaattccaggtggcaaagaaggagggttcctggtggcactgtaattcatgtagtttaaagaacgcaagtactgcaaaaaaatgtgtgtcctgtcagaacttgaatcctagcaacaaagagctcgttggaccgccgcttgctgagactgtctttacccccaaaaccagcccagagaacgtgcaagaccgcttcgcactggtcacaccgaaaaaggaggggcattgggactgttccatttgccttgtccggaatgaaccaacagtctccagatgcatcgcatgccagaacacaaagtccgctaataagtccggcagctctttcgtgcaccaggcgagtttcaaatttggacaaggcgatttgccgaagccaataaattcagatttcagatcagtattctctacaaaagagggacagtgggattgcagtgcctgtttggtgcaaaacgaaggatcaagcacaaaatgcgccgcatgtcagaacccgagaaagcagtccctaccagctacctccatacctaccccggcttccttcaaattcgggacttccgaaacaagtaagacccttaaaagtgggttcgaggacatgtttgctaagaaggaaggtcagtgggattgttcgagttgtctggtgcgcaacgaggccaatgcaactcggtgtgttgcctgtcagaatccggacaaaccaagtccatccacgtctgtgccagccccagcctcattcaagttcggaactagcgaaacctccaaggctcccaaaagcggctttgaggggatgttcactaagaaggaaggacagtgggactgctcagtgtgcctcgttcgtaatgaggcttcggccaccaagtgtatcgcatgccagaaccccggaaaacagaaccagacaacttccgcagtctctacacccgcctcttccgaaacttcaaaggcacccaagtctggtttcgagggtatgttcacaaaaaaggaaggtcagtgggactgctcggtgtgtctcgtgagaaacgaggcctctgccaccaagtgcatagcgtgtcaaaatcccggcaagcagaatcagactacctctgctgtctctactcctgcctcatctgaaaccagcaaagcgccaaaatccggcttcgaaggtatgttcactaaaaaggagggacaatgggattgctcagtctgcctagttcgaaatgaagcttctgcaactaaatgcatcgcatgccagtgccccagtaagcaaaatcaaactaccgcaatttctacccctgcatctagcgagatctcaaaggcccccaaatcggggttcgaggggatgtttattcggaaagggcagtgggattgttccgtttgttgtgttcagaatgaatcatccagtctcaaatgtgtcgcgtgcgacgcttctaaaccaacacacaagcctatcgctgaggccccgagcgcattcacactaggatccgagatgaaattgcatgatagctcaggcagccaagtcggaacaggattcaagtctaacttctccgaaaaagcctcgaaattcggtaatacggagcagggttttaagttcggccacgtcgaccaggagaattccccttccttcatgttccaaggttcctccaatactgaattcaaaagcacgaaggagggtttttccattcctgtgagcgccgatggatttaaatttgggatttcagagccaggaaatcaagagaagaagagtgagaaacccttggagaacggcacaggctttcaggcgcaggatatcagtggccagaaaaacggccgcggggtaatattcgggcagacctccagcacttttaccttcgctgatcttgccaaatcgacgtcaggtgaggggttccagttcgggaagaaagatccaaatttcaagggtttcagtggggccggcgagaaactcttcagtagccagtacggcaagatggctaataaagcaaatacgtccggggacttcgagaaggacgatgacgcatacaaaactgaagattccgatgacatccatttcgagccagtcgtgcagatgccagagaaagttgagcttgtgactggagaggaggatgagaaggtgctgtattctcagcgggtcaagctgttccgcttcgacgcagaggtatctcaatggaaagagcgcgggctaggaaatctaaagattttgaagaatgaggtcaatggaaaattaaggatgttaatgcgaagagagcaggttctaaaggtctgtgctaatcactggattaccacgactatgaacttgaaacccttgtccggcagcgacagagcctggatgtggctggccagtgacttctcagatggcgacgccaaactggagcaattggcagccaaattcaagacccccgagctcgccgaggaattcaagcagaagttcgaagagtgccaacgtctcctcctagatattccgctgcagacgccgcataagctagttgacactgggagggccgcaaagttaatccagagggccgaggaaatgaagagtggccttaaagacttcaagacatttttgacaaacgaccagaccaaagtaactgaggaggaaaataagggatccggcactggggcggccggagcctctgacactacaataaagccgaatcccgagaatactggccccactctagaatgggataactacgatctgcgagaagatgccctagatgacagcgtttcctcctcatcagtgcatgccagtcccctcgcttccagccctgtccggaagaacctgttccggttcggagagtccacgaccggctttaatttctctttcaaaagtgccctgtctccaagtaaatcccccgccaagttgaaccagagtggcacaagcgtcggcactgacgaagagagcgacgtaactcaggaggaagagcgagatggtcagtattttgagccagtcgtccccctacctgacctggtggaggttagctctggagaggaaaacgagcaggtcgtgtttagtcatagggccaaactgtacagatacgacaaagacgtcggacagtggaaagaacggggtatcggcgacattaagatcctgcagaactatgacaacaagcaggtcaggatagttatgaggagggatcaagtgttgaaactgtgcgcgaaccaccggatcacacctgatatgaccctgcaaaatatgaagggaacagagcgagtttggctctggaccgcctgtgacttcgccgatggagaacggaaggtcgagcatcttgccgtacgcttcaaactgcaggatgtagctgattcctttaagaagatcttcgatgaggcgaagaccgcgcaagagaaggatagtctcatcacacctcatgtgagccgatcttcgactccccgggagtcgccatgcggaaagattgccgtagcggtcctagaggagacaacccgggagcgtaccgacgttattcaaggcgacgacgtcgccgacgccaccagtgaggtggaggtgagttccacatcagagaccaccccaaaagcagtggtttctccacctaagttcgtgttcggtagcgagtctgtgaaatccatctttagctctgagaagtctaagccttttgcctttggaaatagctctgctacgggttcactgttcggcttctcttttaacgcgcccttgaagtcaaataactcggagacttccagcgtagcccagagcggtagtgaaagcaaagtggagcccaagaagtgcgagttgtctaaaaatagtgatatcgaacagtcaagcgactctaaagtgaaaaacctattcgcatcttttcccacagaggagtcatcaatcaattataccttcaaaacccccgaaaaggccaaagaaaagaaaaagcccgaagattcgcccagcgatgacgacgttctgatcgtgtacgaactcacacctacagccgaacagaaagctctcgccaccaagctgaagttgccccctaccttcttctgctacaaaaaccggcccgactacgtctccgaggaagaggaggatgatgaggactttgaaacagccgtgaaaaagcttaatgggaagctctatctggacgggtcagagaaatgcagaccactggaggaaaatactgcggacaacgagaaagaatgtatcatcgtttgggagaagaaacctacagtcgaggaaaaagcgaaagccgatacactgaagctaccccccacgtttttttgtggcgtgtgctccgacacggacgaggacaacggcaacggggaagatttccagagcgagctgcagaaggtgcaggaagctcagaagagtcaaactgaagaaattactagtaccaccgactctgtttatacaggtgggaccgaggtgatggtgccctccttttgcaaatcggaagagccagactccatcactaaatccatctcaagcccgtctgtctcatccgagaccatggacaaacctgtcgacttatctactcgaaaggagattgacaccgatagtacttcacagggggagagcaagattgttagcttcggctttggaagttctaccgggctatcctttgccgatctggcttcgtcaaatagcggggatttcgccttcgggtcaaaggataagaattttcagtgggctaacacaggagccgccgtttttggcactcagtcagtcgggacacagtccgctgggaaagtgggtgaggatgaagacggatccgacgaagaagtcgtgcacaacgaagacatccactttgaaccgattgtatccctgcctgaggtcgaggtcaaatccggcgaagaagatgaagaaatcctcttcaaggagcgggccaagctttataggtgggatcgcgacgtttctcaatggaaagaacggggtgtgggagacatcaagattctttggcacactatgaaaaattactaccggatcctgatgcgtcgcgaccaagtgttcaaagtctgtgcaaaccacgtgatcactaagaccatggagctgaaacctctgaacgtctctaataacgcccttgtgtggacagcctcagactatgcagacggggaggccaaggtggagcagctcgctgtgcggttcaagactaaagaggtggcggactgtttcaaaaagaccttcgaggaatgccagcagaacttgatgaagttgcaaaaaggtcatgtgtctcttgcagctgaactgagcaaggagacaaacccggtggtttttttcgatgtttgtgctgatggagagcctctgggacgcataaccatggagctgttcagtaacattgtgccacgaaccgcagagaatttccgggctctatgtacaggagaaaaaggtttcggttttaaaaattccatctttcaccgcgtcattccagactttgtttgccagggtggtgatatcacaaagcacgacgggaccggaggccaatcgatctacggagacaaattcgaggacgagaattttgacgtcaagcatacgggacctgggcttctatctatggctaaccaggggcagaacacaaataatagccagtttgtcattaccctgaaaaaggccgaacatctggacttcaagcacgtcgtgtttggattcgtgaaggacgggatggatacagtcaaaaagatcgaaagtttcgggagtccaaagggttcggtgtgtagaaggatcactatcactgaatgcggacagatctag

SEQ ID NO: 163345 - DNA, 9675 bp, Artificial Sequence
  derived and/or modified sequence
atgaggaggagcaaggcagatgtggagcgctacatcgcctctgtgcagggcagcacccccagcccccggcagaagtccatgaagggcttctactttgccaagctgtactatgaggccaaggagtatgacctggccaagaagtacatctgcacctacatcaacgtgcaggagcgggaccccaaggcccaccgcttcctgggcctgctgtatgagctggaggagaacacagacaaggctgtggagtgctaccgccgctctgtggagctgaaccccacccagaaggacctggtgctgaagattgctgagctgctgtgcaagaatgatgtgacagatggccgggccaagtactggctggagagagctgccaagctgtttcctggcagccctgccatctacaagctgaaggagcagctgctggactgtgagggggaggatggctggaacaagctgtttgacctgatccagagcgagctgtatgtgcggccagatgatgtgcacgtgaacatccggctggtggaggtgtaccgcagcaccaagaggctgaaggatgctgtggcccactgccatgaagctgagagaaatattgccctgcggagcagcctggagtggaacagctgtgtggtgcagaccctgaaggagtacctggagagcctgcagtgcctggagagtgacaagagtgactggagggccaccaacacagacctgctgctggcctatgccaacctgatgctgctgaccctgagcaccagagatgtgcaggagagccgggagctgctgcagagctttgacagcgccctgcagagcgtgaagagcctgggcggcaatgatgagctgagcgccaccttcctggagatgaagggccacttctacatgcatgctggcagcctgctgctgaagatgggccagcacagcagcaatgtgcagtggagggccctgtctgagctggccgccctgtgctacctgattgccttccaggtgccccggcccaagatcaagctgatcaagggggaggccggccagaacctgctggagatgatggcctgtgaccggctgagccagagcggccacatgctgctgaacctgagccggggcaagcaggacttcctgaaggagatcgtggagacctttgccaacaagagcggccagagcgccctgtatgatgccctcttcagcagccagagccccaaggacaccagcttcctgggcagtgatgacatcggcaacattgatgtgcgggagcctgagctggaggacctgaccaggtatgatgtgggcgccatccgggcccacaacggcagcctgcagcacctgacctggctgggcctgcagtggaacagcctgcctgccctgcccggcatcaggaagtggctgaagcagctgttccaccacctgccccatgagaccagccggctggagaccaatgcccctgagagcatctgcatcctggacctggaggtgttcctgctgggcgtggtgtacaccagccacctgcagctgaaggagaagtgcaacagccaccacagcagctaccagcccctgtgcctgcccctgcctgtgtgcaagcagctgtgcacagagcggcagaagtcctggtgggatgctgtgtgcaccctcatccacaggaaggctgtgcctggaaatgtggccaagctgcggctgctggtgcagcacgagatcaacaccctgcgggcccaggagaagcacggcctgcagcctgccctgctggtgcactgggccgagtgcctgcagaagacaggcagcggcctgaacagcttctatgaccagcgggagtacatcggccgctctgtgcactactggaagaaggtgctgcccctgctgaagatcatcaagaagaagaacagcatccctgagcccatcgaccccctcttcaagcacttccacagcgtggacatccaggccagcgagatcgtggagtatgaggaggatgcccacatcacctttgccatcctggatgctgtgaatggaaatattgaagatgctgtgacagcctttgagagcatcaagtctgtggtgtcctactggaacctggccctgatcttccacaggaaggccgaggacattgaaaatgatgccctgagccctgaggagcaggaggagtgcaagaactacctgaggaagacccgggactacctgatcaagatcattgatgacagcgacagcaacctgtctgtggtgaagaagctgcctgtgcccctggagagcgtgaaggagatgctgaacagcgtgatgcaggagctggaggactacagcgagggcggccccctgtacaagaatggcagcctgagaaatgctgacagcgagatcaagcacagcacccccagccccacccgctacagcctgagccccagcaagagctacaagtacagccccaagaccccaccccgctgggccgaggaccagaacagcctgctgaagatgatctgccagcaggtggaggccatcaagaaggagatgcaggagctgaagctgaacagcagcaacagcgccagcccccaccgctggcccacagagaactacggccctgacagcgtgcctgatggctaccagggcagccagaccttccacggggcccccctgactgtggccaccaccggccccagcgtgtactacagccagagccctgcctacaacagccagtacctgctgcggcctgctgccaacgtgacccccaccaagggccctgtgtatggcatgaaccggctgcccccccagcagcacatctatgcctacccccagcagatgcacaccccacctgtgcagagcagcagcgcctgcatgttcagccaggagatgtatggccccccagccctgcgctttgagagccctgccaccggcatcctgagccccagaggagatgactacttcaactacaacgtgcagcagaccagcaccaacccccccctgcctgagcccggctacttcaccaagccacccatcgccgcccacgccagccgctctgctgagagcaagaccattgaatttgggaagaccaactttgtgcagcccatgcctggagagggcctgcggcccagcctgcccacccaggcccacaccacccagcccacccccttcaagttcaacagcaacttcaagagcaatgatggagacttcaccttcagcagcccccaggtggtgacccagcccccacctgctgcctacagcaacagcgagagcctgctgggcctgctgaccagtgacaagcccctgcagggagatggctacagcggggccaagcccatccctgggggccagaccatcggccccaggaacaccttcaactttggcagcaagaatgtgtctggcatctccttcacagagaacatgggcagcagccagcagaagaacagcggcttccgccgcagtgatgacatgttcaccttccacggccctgggaagtctgtgtttggcacccccaccctggagacagccaacaagaaccacgagacagatggcggcagcgcccatggagatgatgatgatgatggcccccactttgagcctgtggtgcccctgcctgacaagattgaggtgaagacaggagaagaagatgaggaggagttcttctgcaacagagccaagctgttccgctttgatgtggagagcaaggagtggaaggagcggggcattggaaatgtgaagatcctgcggcacaagaccagcggcaagatccggctgctgatgagaagagagcaggtgctgaagatctgtgccaaccactacatcagcccagacatgaagctgaccccaaatgccggcagtgacaggagctttgtgtggcacgccctggactatgcagatgagctgcccaagccagagcagctggccatccgcttcaagaccccagaggaggccgccctcttcaagtgcaagtttgaggaggcccagagcatcctgaaggcccctggcaccaacgtggccatggccagcaaccaggccgtgcgcatcgtgaaggagcccaccagccatgacaacaaggacatctgcaagagtgatgctggcaacctgaactttgagttccaggtggccaagaaggagggctcctggtggcactgcaacagctgcagcctgaagaatgccagcacagccaagaagtgtgtgtcctgccagaacctgaaccccagcaacaaggagctggtgggcccccccctggccgagaccgtcttcacccccaagaccagcccagaaaatgtgcaggacagatttgccctggtgacccccaagaaggagggccactgggactgcagcatctgcctggtgagaaatgagcccaccgtgagccgctgcatcgcctgccagaacaccaagagcgccaacaagagcggcagcagctttgtgcaccaggccagcttcaagtttggccagggcgacctgcccaagcccatcaacagcgacttccgcagcgtcttcagcaccaaggagggccagtgggactgcagcgcctgcctggtgcagaatgaaggcagcagcaccaagtgtgccgcctgccagaaccccaggaagcagagcctgcctgccaccagcatccccaccccagccagcttcaagtttggcaccagcgagaccagcaagaccctgaagagcggctttgaggacatgtttgccaagaaggagggccagtgggactgcagcagctgcctggtgagaaatgaggccaatgccacccgctgtgtggcctgccagaacccagacaagcccagccccagcacctctgtgcctgccccagccagcttcaagtttggcaccagcgagaccagcaaggcccccaagagcggctttgagggcatgttcaccaagaaggagggccagtgggactgcagcgtgtgcctggtgagaaatgaggccagcgccaccaagtgcatcgcctgccagaaccctgggaagcagaaccagaccaccagcgctgtgtccaccccagccagcagcgagaccagcaaggcccccaagagcggctttgagggcatgttcaccaagaaggagggccagtgggactgcagcgtgtgcctggtgagaaatgaggccagcgccaccaagtgcatcgcctgccagaaccctgggaagcagaaccagaccaccagcgctgtgtccaccccagccagcagcgagaccagcaaggcccccaagagcggctttgagggcatgttcaccaagaaggagggccagtgggactgcagcgtgtgcctggtgagaaatgaggccagcgccaccaagtgcatcgcctgccagtgccccagcaagcagaaccagaccacagccatcagcaccccagccagcagcgagatcagcaaggcccccaagagcggctttgagggcatgttcatcaggaagggccagtgggactgcagcgtgtgctgcgtgcagaatgaaagcagcagcctgaagtgtgtggcctgtgatgccagcaagcccacccacaagcccatcgccgaggcccccagcgccttcaccctgggcagcgagatgaagctgcatgacagcagcggcagccaggtgggcaccggcttcaagagcaacttcagcgagaaggccagcaagtttggaaacacagagcagggcttcaagtttggacatgtggaccaggagaacagccccagcttcatgttccagggcagcagcaacacagagttcaagagcaccaaggagggcttcagcatccctgtgtctgcagatggcttcaagtttggcatcagcgagcccggcaaccaggagaagaagtctgagaagcccctggagaatggcaccggcttccaggcccaggacatcagcggccagaagaatggccggggcgtcatcttcggccagaccagcagcaccttcacctttgctgacctggccaagagcaccagcggggagggcttccagtttgggaagaaggaccccaacttcaagggcttcagcggggccggggagaagctgttcagcagccagtatggcaagatggccaacaaggccaacaccagcggggactttgagaaggatgatgatgcctacaagacagaggacagtgatgacatccactttgagcctgtggtgcagatgcctgagaaggtggagctggtgactggagaggaggatgagaaggtgctgtacagccagagggtgaagctgttccgctttgatgctgaggtgtcccagtggaaggagcggggcctgggcaacctgaagatcctgaagaatgaggtgaatggcaagctgaggatgctgatgaggcgggagcaggtgctgaaggtgtgtgccaaccactggatcaccaccaccatgaacctgaagcccctgagcggcagtgaccgggcctggatgtggctggccagtgacttcagtgatggagatgccaagctggagcagctggccgccaagttcaagaccccagagctggccgaggagttcaagcagaagtttgaggagtgccagaggctgctgctggacatccccctgcagaccccccacaagctggtggacaccggccgggccgccaagctgatccagagagctgaggagatgaagagcggcctgaaggacttcaagaccttcctgaccaatgaccagaccaaggtgacagaggaggagaacaagggcagcggcactggagctgctggggccagtgacaccaccatcaagcccaaccctgagaacacaggccccaccctggagtgggacaactatgacctgagagaagatgccctggatgattctgtgagcagcagctctgtgcacgccagccccctggccagcagccctgtgaggaagaacctcttccgctttggagagagcaccaccggcttcaacttctccttcaagagcgccctgagccccagcaagagccctgccaagctgaaccagagcggcacctctgtgggcacagatgaggagagtgatgtgacccaggaggaggagagagatggccagtactttgagcctgtggtgcccctgcctgacctggtggaggtgagcagcggggaggagaatgagcaggtggtgttcagccaccgggccaagctgtaccgctatgacaaggatgtgggccagtggaaggagcggggcatcggggacatcaagatcctgcagaactatgacaacaagcaggtgcgcatcgtgatgagaagagaccaggtgctgaagctgtgtgccaaccaccgcatcaccccagacatgaccctgcagaacatgaagggcacagagcgggtgtggctgtggacagcctgtgactttgctgatggagagaggaaggtggagcacctggccgtgcgcttcaagctgcaggatgtggccgacagcttcaagaagatctttgatgaggccaagacagcccaggagaaggacagcctcatcaccccccacgtgagccgcagcagcaccccccgggagagcccctgtgggaagattgctgtggccgtgctggaggagaccacccgggagaggacagatgtgatccagggagatgatgtggctgatgccaccagcgaggtggaggtgagcagcaccagcgagaccacccccaaggctgtggtgtccccacccaagtttgtgtttggcagcgagagcgtgaagagcatcttcagcagcgagaagagcaagccctttgcctttggaaacagcagcgccaccggcagcctgtttggcttctccttcaatgcccccctgaagagcaacaacagcgagaccagctctgtggcccagagcggcagcgagagcaaggtggagcccaagaagtgtgagctgagcaagaacagcgacatcgagcagagcagtgacagcaaggtgaagaacctgtttgccagcttccccacagaggagagcagcatcaactacaccttcaagaccccagagaaggccaaggagaagaagaagccagaggacagccccagtgatgatgatgtgctgattgtgtatgagctgacccccacagctgagcagaaggccctggccaccaagctgaagctgccccccaccttcttctgctacaagaacagaccagactatgtgtctgaggaggaggaggatgatgaagattttgaaacagctgtgaagaagctgaatggcaagctgtacctggatggcagcgagaagtgccggcccctggaggagaacacagctgacaatgagaaggagtgcatcatcgtgtgggagaagaagcccaccgtggaggagaaggccaaggctgacaccctgaagctgccccccaccttcttctgtggggtgtgcagcgacacagatgaagataatggaaatggagaggacttccagagcgagctgcagaaggtgcaggaggcccagaagagccagacagaggagatcaccagcaccacagattctgtgtacacaggaggaacagaggtgatggtgcccagcttctgcaagtctgaggagccagacagcatcaccaagagcatcagcagccccagcgtgagcagcgagaccatggacaagcctgtggacctgagcaccaggaaggagattgacacagacagcaccagccagggcgagagcaagatcgtgtcctttggcttcggcagcagcacaggcctgagctttgctgacctggccagcagcaacagcggggactttgccttcggcagcaaggacaagaacttccagtgggccaacacaggagctgctgtgtttggcacccagagcgtgggcacccagagcgctgggaaggtgggagaagatgaagatggcagtgatgaggaggtggtgcacaatgaagacatccactttgagcccatcgtgtccctgcctgaggtggaggtgaagtctggagaggaggatgaggagatcctcttcaaggagcgggccaagctgtaccgctgggacagagatgtgtcccagtggaaggagcggggcgtgggggacatcaagatcctgtggcacaccatgaagaactactaccgcatcctgatgaggcgggaccaggtgttcaaggtgtgtgccaaccacgtgatcaccaagaccatggagctgaagcccctgaatgtgagcaacaatgccctggtgtggacagccagtgactatgcagatggagaggccaaggtggagcagctggccgtgcgcttcaagaccaaggaggtggccgactgcttcaagaagacctttgaggagtgccagcagaacctgatgaagctgcagaagggccacgtgtccctggccgctgagctgagcaaggagaccaaccctgtggtgttctttgatgtgtgtgctgatggagagcccctgggccgcatcaccatggagctgttcagcaacatcgtgcccaggacagctgagaacttccgggccctgtgcacaggagagaagggcttcggcttcaagaacagcatcttccacagggtcatcccagactttgtgtgccagggcggggacatcaccaagcatgatggcactggaggccagagcatctatggagacaagtttgaagatgagaactttgatgtgaagcacactggacctggcctgctgtccatggccaaccagggccagaacaccaacaacagccagtttgtgatcaccctgaagaaggccgagcacctggacttcaagcacgtggtgtttggatttgtgaaggatggcatggacacagtgaagaagattgagagctttggcagccccaagggctctgtgtgccgccgcatcaccatcacagaatgtggccagatctag

SEQ ID NO: 163346 - DNA, 9675 bp, Artificial Sequence
  derived and/or modified sequence
atgcggcggagcaaggccgacgtggagcggtacatcgccagcgtgcagggcagtactccttcacctcgccaaaagtccatgaaggggttctattttgcaaagctatattacgaagccaaagaatatgacctggccaagaagtacatctgtacttatataaatgtacaagaaagggatccaaaagcacaccggtttcttggccttctctatgagctcgaggagaacactgacaaagccgttgagtgctataggcgtagtgtggagctgaatcctacgcagaaagatttggttctaaagatcgccgaactcctgtgtaagaatgatgtgactgatggaagggcgaagtattggctggagcgagctgctaagttatttcccggctcacctgctatctacaaactgaaagaacagctgttagactgtgagggcgaggatggatggaataagctgtttgatctcatacagtccgaactgtacgtaagacccgacgacgtccacgtgaacattaggcttgtcgaagtgtatcgatctaccaaacgcctgaaggacgccgtggctcactgtcatgaggccgaacggaatatcgccttaaggtcctccctggagtggaattcttgcgtagtgcagacgcttaaagagtacctcgagtccctgcaatgtctggagagtgataaatcggactggagggcaactaacaccgatttgctcctggcctacgctaatcttatgctgctgacactgtccacgagagatgtgcaggagagcagggaattattacagtcttttgattcagcattgcagtcagtcaagagcctggggggtaacgatgagcttagtgccacatttctggagatgaaaggtcatttctacatgcacgctggatcattgctgctcaagatgggccagcactcgtccaatgttcagtggagagctcttagcgagctcgcggccttatgttatctcattgcctttcaggtacctagacccaaaataaaactgattaagggtgaagcaggacagaatctgctggagatgatggcatgcgaccggttgagtcagtcaggccacatgctgctgaatctgtcaaggggtaaacaggactttctgaaggagatagtagagacctttgctaataagtccggccagtcggcattgtatgacgctcttttctcatcacagtccccgaaagacacatcgttcctcggctctgatgatattggtaacattgacgtaagggaaccagagttggaagaccttactcggtacgatgttggagcaatcagggcccacaacggttcattgcagcatctgacctggctcgggctgcaatggaatagcttgcccgccttgcccggtatcagaaaatggctcaagcagttgttccaccatctgccccatgagacaagccgcctcgaaacaaacgcacccgaatccatatgcatattagatttggaagtgtttctgctcggcgtcgtgtacacatctcacttgcagcttaaggagaagtgtaactcccatcactcatcctaccagccactctgcctgcccctgcctgtttgcaaacagctgtgtacggagaggcaaaaatcatggtgggatgctgtgtgcaccctgattcatagaaaggctgttcctggaaatgtggctaaactgcgtctgttggtgcagcacgaaattaacactctgagagcacaggagaagcatggattgcagcctgctctgttggtccactgggccgagtgtctccagaagacaggttctggacttaacagtttctacgaccaacgcgaatatataggccgatccgttcactattggaaaaaagtgcttcctctgctcaaaatcataaagaagaagaactcaatccccgaacctattgatcctctcttcaagcactttcactccgttgatatacaggcatccgaaatagtcgagtatgaggaagatgcccatatcacattcgcgatcctcgacgctgtgaatggcaacatagaagatgcagtgaccgccttcgagagtataaagtctgttgtctcctactggaatttagctctgatcttccaccgcaaggcggaggatattgagaacgacgccttgtcgcctgaggagcaggaagaatgcaaaaattacctgagaaagacacgcgattatttgatcaaaatcatcgatgacagcgactcgaatttgtcagtggtgaagaaactgccagtgcccctcgagagtgtgaaggagatgctgaacagcgtgatgcaggagctggaagactattctgaaggtggaccgctgtataagaatggatctctgagaaacgctgatagcgagattaaacatagcaccccttcccctactagatactcactgtctccttcaaagagttacaagtatagcccgaagactcctccgagatgggccgaggatcagaatagtctgcttaaaatgatttgtcagcaggtagaggcaatcaaaaaagagatgcaggaactgaagctcaactcttctaatagcgcctccccacatcggtggcctaccgagaactatgggcctgacagcgtgccagatggataccagggctcccaaacctttcatggcgctcctctcacagttgcaacaaccgggccttccgtgtattattcccagtcccccgcgtacaactcacaatatctactgcggcctgcagcaaatgtgacgccaacaaaggggccagtctatgggatgaatcgccttccccctcagcagcatatttacgcatatccacagcaaatgcatacgccccctgttcaatccagcagcgcctgcatgttctcccaggaaatgtacgggcctcccgctctgcgctttgagagccctgccacaggaattctgtccccccgaggagatgattacttcaactacaacgtacaacaaacttccaccaatccaccgctgccagagcctggctactttaccaaaccaccaattgcggcacacgcctccagatccgccgaaagtaaaacaattgagtttggcaaaacaaacttcgtgcagcctatgccaggtgaaggacttcgtccatcgctgcctacccaagctcatactacacagcctactccgttcaaatttaacagtaattttaagagcaacgatggcgactttacgttcagctcaccccaagtggtaacacagcctccaccggccgcatacagcaactccgagagcttgctgggtctgttgacttccgataaacctttgcaaggtgatgggtacagcggggcgaaaccaatccccggcggtcagaccattggacctaggaatacctttaacttcggatccaagaatgtgagcggtatttccttcacggaaaacatggggtctagccagcagaagaatagtgggtttcggagatcagacgatatgtttacatttcatggacccggcaagtctgtcttcggaacgcccacgttagagacagctaataagaaccacgagaccgacggcggttctgcccatggagacgacgacgatgatggcccccacttcgagcctgtagtgccacttcctgacaaaatcgaggtcaaaacaggcgaagaggatgaggaggagtttttttgtaaccgggcaaaactcttcaggttcgatgtggaaagtaaagagtggaaggagcgtgggatcggcaatgtgaaaatcctgcggcataaaaccagcggtaaaataaggctgctgatgaggcgcgagcaggtgctgaagatttgtgccaaccactatatctcccctgacatgaagcttacacccaacgctggcagtgatcgcagctttgtgtggcacgccctggattatgcagatgaactgccaaaaccagagcagctggccatcaggtttaagactcccgaggaagcagccctttttaagtgtaagttcgaggaggcacaatccatattaaaagcaccaggcacgaacgtggccatggccagcaatcaagccgttcggattgtcaaagagcccacgagccacgacaacaaggacatatgtaaatctgacgccggtaatctcaatttcgagttccaggttgcaaagaaggaaggaagttggtggcactgtaatagctgtagtctgaaaaacgcctccacagccaagaaatgcgtctcctgtcagaaccttaaccccagtaacaaagaactggtgggcccaccactggcggaaaccgtgtttactcctaagacatctcccgaaaatgtccaggacaggtttgccctggtcacacccaagaaggaaggtcactgggattgttcaatttgtcttgtaagaaacgagccaaccgtgagtcgatgtattgcctgccagaacaccaaatcagccaataagtccggttcaagtttcgtgcaccaggcctcctttaagtttggacaaggggacctcccaaagcctattaactccgactttcgttcagtgttcagcaccaaagagggtcagtgggactgcagcgcctgcctggttcagaacgagggatcaagtaccaaatgcgcggcctgtcaaaacccacggaaacagtcgctgccagcaacaagcattcccacccccgctagtttcaaattcggcacctccgaaacgagtaaaactctgaagtctgggttcgaggacatgtttgctaagaaggaggggcagtgggactgtagctcctgcctcgttaggaacgaagctaatgccactcggtgcgtcgcttgccagaatccagataagccgtccccgagcacctccgtgcctgcaccagcgagtttcaaattcgggacctccgaaacttccaaggctcctaaatcgggattcgaaggtatgtttacaaagaaagaaggccaatgggattgctccgtttgtttggtgagaaatgaggcctctgctaccaaatgcattgcctgccaaaacccggggaagcaaaaccaaactaccagcgccgtaagtacgcccgcctcaagcgaaactagcaaagcacccaagtctggttttgagggaatgttcacgaagaaggaagggcaatgggactgctccgtttgcttggtccgaaacgaggcctcagcaacaaagtgcatagcctgccagaacccaggaaagcagaatcagaccaccagcgccgtgtccactccggcttcatcagagacctctaaagctcccaaatcaggttttgagggcatgtttactaaaaaggagggccagtgggactgttccgtctgtctcgtgcgcaatgaagcatccgctacaaagtgtattgcttgtcagtgtccgtctaaacaaaaccaaacaactgcaatctctactccagcctcctcagagatctctaaggctccaaagtccgggtttgaggggatgttcatacgtaaaggccagtgggactgctctgtctgctgcgtacaaaatgaaagctctagcctgaaatgcgtcgcctgcgacgcttctaaacccacacataaaccgatcgcagaggccccctccgcctttaccctaggtagtgagatgaagctccatgactcatcaggatcccaggtagggacgggcttcaagagtaatttttctgagaaggctagcaagttcggcaataccgagcaaggctttaaatttggccacgttgatcaagaaaatagcccaagttttatgtttcaaggatcctctaataccgagttcaaaagtacaaaagaaggatttagcatccctgtgagcgcagatggcttcaagtttggtatcagcgagcccgggaaccaggaaaagaagtccgagaagcccttggaaaacgggactggatttcaggcccaggacataagtggtcagaaaaacggtcgcggcgtaatcttcggccagacatctagtacctttactttcgccgacctcgcgaagtctacaagcggcgagggcttccaatttgggaaaaaagatcctaacttcaagggtttctcaggagccggagagaagcttttcagttcgcaatatggtaaaatggccaacaaagcaaatacctctggagacttcgaaaaggatgatgacgcctataagaccgaagactccgacgacatccattttgaaccggtcgtgcaaatgcccgaaaaagtcgaactggtcaccggagaagaagatgagaaagtgctgtattcgcagcgcgttaaactgtttcgattcgacgccgaggtgtcccagtggaaagagcgcggcctgggaaatcttaaaatattaaagaacgaggtgaatggcaagcttagaatgctgatgcggagagagcaggtgctcaaagtctgcgcaaaccactggattaccaccacgatgaacctgaaaccgctgagcggctctgatcgggcttggatgtggttggcctctgatttctctgatggagatgccaagcttgagcaacttgcagcgaaatttaaaacaccagaacttgcagaggagtttaagcaaaagttcgaagagtgtcagcgacttctgctggacatccctctgcaaactccccataagctcgtcgacactggtcgggcagccaagctcatccagagggccgaagaaatgaagtccggtctcaaggatttcaagaccttcctgacgaacgaccagacgaaggttactgaggaagaaaataaagggtctggcaccggcgcagccggcgctagcgacactaccattaagccaaatccagagaacacaggcccaaccctcgagtgggacaactacgacctgcgggaggacgccctggacgattcggtcagttcaagcagtgttcacgcttcaccgctggcctcttccccagttcgtaagaatcttttccgcttcggtgagtcgactactggtttcaacttttcctttaagtcagccctctcgccctctaagagtcctgcgaagctgaaccagagcggcacaagtgtgggcacagacgaggagtcagacgtgacccaggaagaggaaagagacgggcagtactttgagcctgttgttccgttaccggatctggtcgaagtaagttctggagaggagaacgaacaggttgtcttctcacaccgggcaaagctttataggtacgataaagatgtggggcaatggaaagaaaggggtattggagacatcaaaatcttacagaattacgataacaaacaggtgaggatagtcatgaggcgggatcaggtccttaaactctgtgcaaaccaccggattactcctgacatgactctgcaaaatatgaagggcaccgagagagtgtggctctggacagcttgtgatttcgctgacggagagaggaaagtggagcacctggcggttaggtttaaactgcaggacgtcgccgacagctttaaaaaaatttttgatgaggcaaagactgctcaggaaaaagatagtttaattacaccccatgtgagccgctctagcacaccccgggagagtccatgtggcaaaatcgccgtggccgttcttgaggagacaacaagagagcgtacagacgtgatccagggcgacgacgtagcagacgccaccagcgaggttgaagtgtctagtacttcagaaaccacgcctaaggccgtggtctccccgccaaaatttgtgtttggttctgagtccgtgaagtctatcttctcaagtgaaaagtccaagcccttcgccttcggcaactcttcagctactggctcactcttcggatttagttttaacgctcctttaaagagtaacaatagcgaaacctccagcgtcgctcagtcaggctccgaatcgaaagtcgagcccaaaaagtgcgaacttagtaaaaatagcgacatcgagcagagcagtgattctaaggtgaaaaacctcttcgctagtttcccgacggaggaaagctctatcaactacacctttaagacccctgagaaggcaaaagagaaaaagaaacccgaggactctccaagcgatgatgacgtgctcatcgtgtacgagttaacccccacggcagagcagaaagccctagccacaaaattgaagctgcctccgacctttttctgctataaaaaccgccctgactatgtttctgaggaggaggaggacgacgaagatttcgagacagctgtcaaaaaacttaatggcaaattgtatcttgacggtagtgaaaaatgtcgcccgttagaagagaatacagctgacaacgagaaagaatgcattattgtttgggagaaaaagcccacggtggaggaaaaggcaaaagccgatacactgaagctgccacccacgttcttctgcggggtgtgcagtgacacagacgaggataacgggaacggggaggatttccagagcgagcttcaaaaggtgcaagaagcccaaaaaagccagaccgaagaaatcacctccacgaccgatagtgtgtacactggcgggactgaagtgatggtgccatccttctgcaagtcagaagaaccagattctatcaccaagtcaataagtagtcctagtgtgtcttccgagaccatggacaagcctgtagatctgagtaccagaaaggagatagacaccgatagcacctcacagggcgaatccaagattgtcagctttggttttggatccagcactggcctgagttttgcggacctggctagctccaactctggtgactttgcatttggctctaaagacaagaactttcagtgggccaatacaggcgctgccgtatttgggacccagtctgtagggacccaaagtgcagggaaagtgggagaggatgaggacggatccgatgaggaagtggtccacaacgaagatatacacttcgaaccgatcgtgtcccttccagaagtagaggtcaaaagcggcgaggaagacgaggagatcctctttaaggaaagagccaaattgtacagatgggaccgtgatgtctcgcaatggaaggaacgcggggtgggagatatcaaaatcttatggcataccatgaagaactattaccggatcctgatgcgccgcgatcaggtgttcaaggtgtgcgccaatcacgtgattaccaaaaccatggaactcaaaccactgaacgtctccaataatgccctggtgtggacagcctcagactacgccgacggcgaggccaaagtggagcagcttgcggtccgatttaaaaccaaggaagtggctgattgctttaagaagaccttcgaagagtgtcaacagaatttgatgaagctgcagaaaggtcacgtcagcctcgctgctgaactgtccaaagagacaaatcctgtggtctttttcgacgtgtgtgcagacggggaacccttggggcgcattacaatggaactgttttctaatatcgttccccggacagcagagaattttcgggccctgtgcacaggggaaaagggtttcgggttcaagaatagcatatttcatagagtcatcccagacttcgtgtgtcaggggggcgatatcacgaaacatgacggtacaggcggccagtcgatttacggtgataagttcgaggatgaaaactttgacgtcaagcataccggcccaggcctactgtcaatggccaatcaagggcagaacactaacaactcccagttcgtaatcaccctgaaaaaggcagagcaccttgactttaaacatgtagtttttggctttgtgaaagatggaatggatacagtgaagaagatagaaagttttggttcacccaaaggctccgtttgccgtcggattacgatcacggaatgtggacaaatttag

SEQ ID NO: 163347 - DNA, 9675 bp, Artificial Sequence
  derived and/or modified sequence
atgcgcagatctaaagccgatgtagaaaggtatattgccagtgtgcagggctcaactccatcaccacggcagaagtcgatgaaggggttttactttgctaaactgtattacgaggccaaagaatatgacttagctaaaaagtacatatgcacctacatcaatgtgcaagaacgagatcctaaagcccatagatttttgggtctcctttacgagttagaggaaaacacggacaaagctgtcgagtgctatcggagatccgtcgagctcaatcccactcaaaaggacctggtgctgaaaatcgcggaactgctgtgtaagaatgatgtgaccgatggcagggccaagtactggctcgaaagggcagccaagctgtttccaggctctccggcaatttataagcttaaggagcagctcctcgactgcgagggcgaagacggctggaacaaacttttcgacttaatccagtctgaactctacgtaaggcccgatgacgtgcacgtgaatatcaggctggttgaagtttacaggtctacaaaaaggcttaaagacgccgtcgctcactgtcacgaggccgagcgtaatatcgccctgagatccagcctcgaatggaactcttgcgttgtccagacactgaaggagtacctcgaatctcttcagtgtctggagtctgataagagcgactggagagccacaaatacagacctgctgctggcctacgcaaatctgatgctgctcactttgtcaactagggacgttcaggaaagtcgagagctgctgcagagcttcgattcagcactgcaaagcgtcaagtcccttggaggcaatgacgagttgtcagccacttttctggaaatgaagggtcatttctacatgcacgcgggtagcctcttactgaagatgggtcagcacagctctaacgtgcaatggagagcactgtccgaactcgcagcactttgctatcttatcgcatttcaggttcccaggccaaaaatcaagctaatcaaaggggaagctggccagaatctcttagagatgatggcttgtgacaggctgtctcaatcgggtcacatgcttctgaacctgtcccgtgggaaacaggacttcctgaaggagatcgtggagacttttgcaaacaaaagcgggcaaagtgctctgtatgatgcactcttcagttcacagagtccaaaagatacaagctttctagggagtgatgacatcgggaacatcgacgtccgagaacctgagcttgaagacctgacgcggtatgacgtgggagccatccgcgcacataacggatcactccagcatctcacctggttgggactgcagtggaacagtcttcccgctcttcccggaatacgcaaatggttgaaacagctgtttcatcatctcccccacgagacttcgagacttgaaactaacgcaccagagtcaatctgcatactagacctcgaggtgtttctcttaggtgttgtgtatacatcccatctgcagctcaaggagaagtgtaatagccaccacagctcatatcagccactgtgcctgcctctgcctgtttgtaagcagctttgtaccgaaaggcagaagagctggtgggacgctgtctgcactctgatccatcgaaaggccgtgcccggtaacgtagccaaattacgcctcttggtgcagcacgagatcaacacgctccgtgcacaggagaagcatggcctgcaacccgcactgctcgtgcattgggctgagtgtctgcagaagacaggtagtgggctgaattccttttatgatcaaagggagtatatcggccgatctgttcactattggaagaaggttttacccctgctgaagattattaaaaaaaagaactccataccagagccaattgacccgctttttaagcacttccacagcgtggatatacaggcctccgagattgtcgagtacgaggaagatgcacacataacctttgctattctggatgccgtgaacggcaacattgaagacgctgtgactgcatttgaatctataaagtccgtggttagctattggaatttggccttaatttttcatcgtaaggccgaggatatcgagaatgacgccctgagcccggaggagcaggaggaatgcaaaaattacctgcggaaaaccagagactatctgattaagatcatcgatgactccgactcaaatctctctgtggtgaagaaactgcccgtgcctctagagtctgtgaaagaaatgttaaattctgtgatgcaggagctagaagactactccgagggaggccctctatacaagaacggcagtctcagaaatgctgattcagagatcaagcactctactccaagcccaacccggtactctctgagccccagtaagtcctacaaatatagccccaaaacgcctccccgttgggcagaggaccagaatagtctgctcaaaatgatctgtcaacaggttgaggcgataaaaaaggaaatgcaggaactcaaactgaactctagcaattctgcgtcacctcacagatggccaactgagaactatggcccagattcagtacctgatgggtaccagggcagccaaacttttcacggagcccctttgacagtcgccactacaggtcctagtgtttactactcccaatctcctgcctacaattctcaatatcttctgcgcccagccgctaacgtgacccccacaaaaggccctgtgtacggcatgaaccggttacctccgcagcaacacatctatgcttatccacagcaaatgcatacaccccctgtccagtcctcatctgcttgtatgttttcacaggaaatgtacgggccacccgcactgagattcgagtccccagccacgggcatcctcagcccacggggtgacgactacttcaactataacgtccagcaaacttctactaatcctcctcttcccgagcccggttactttactaagccgcctatcgcagctcacgctagccgctctgcagaatctaagacgatagagttcggcaaaaccaatttcgttcaacctatgccaggcgagggattaagaccctccttacctacacaagcccataccacacaacctaccccattcaagttcaactccaattttaagtccaacgatggggattttactttcagcagtcctcaggtggtgactcaacctccacccgctgcatatagcaattctgaatcccttttgggactcttgacaagcgataagcccctgcagggcgatggctactccggagcaaaaccgatcccgggtggccagaccatcggacccagaaataccttcaatttcggtagcaagaatgttagtggcattagcttcacggaaaacatgggatcttcacagcagaaaaattccgggttcaggcggtctgacgacatgtttaccttccatggtccgggaaagagcgtctttgggacgccaactctcgaaactgcgaataaaaatcatgagactgacgggggatctgcccacggggacgacgacgatgacggaccacacttcgaacctgtggttcctcttcctgacaagattgaagtgaaaaccggcgaggaggacgaggaagagttcttctgcaaccgagccaagctgtttcggtttgacgtggagtcaaaggaatggaaagagaggggtatcggtaacgtcaaaatccttcggcacaagacgagcggcaaaatccgactcttaatgcggcgtgagcaggtgctcaagatttgcgctaatcactatatcagccccgacatgaagttgacacctaatgctggaagcgacaggagttttgtctggcacgccttagactatgccgatgagctgcctaagccagagcagctggcaatacgtttcaagaccccagaggaggccgcactgttcaagtgtaaatttgaggaagcccagtccatcttaaaggcccctggaaccaatgtagccatggcttcaaatcaggcggttcgcattgtgaaagaacccacgtcgcacgataataaggacatttgtaagtccgacgccggaaatctaaattttgaatttcaggtggccaaaaaagagggctcctggtggcactgcaattcttgcagccttaagaacgcttctaccgcgaagaaatgtgtgtcttgccaaaacctcaatccttccaataaggagctggtgggcccacccctggccgaaaccgtgtttaccccgaaaaccagccctgagaatgtccaggatcgttttgcactggtgactcccaagaaggagggccactgggactgttcaatttgtctggtgaggaacgaaccaacagtgtctcgctgcatcgcctgtcagaatacaaagagcgctaataagagtggctcttcttttgtgcaccaagcgtccttcaaattcggacaaggcgatctgcccaaacccatcaatagcgacttccgttctgtattttctacaaaggaggggcagtgggactgtagcgcctgccttgtgcagaatgagggttccagcaccaagtgcgcagcctgtcagaatccccgaaagcaaagtctgccagctacaagtattcccacccctgcctcattcaagttcggaacaagtgaaaccagcaagacgctgaaatccggctttgaggacatgtttgccaaaaaagaagggcagtgggactgctccagctgtcttgtgagaaacgaagcaaacgccacccggtgcgtggcctgccagaatcccgacaaacctagcccatccacgtcagtgcccgctcccgctagtttcaagttcggcacgtccgagacctcaaaagcccctaagtctggcttcgaaggcatgttcacaaaaaaggagggccagtgggattgcagcgtgtgcctggtacgcaacgaggcttccgcgacaaaatgcatcgcctgccagaatcccggtaagcaaaatcagaccacctctgcagtaagcaccccggcatcaagcgagacttccaaagccccaaagtcagggtttgagggcatgtttacaaaaaaagaaggccaatgggactgttctgtttgtttggtgcgcaacgaagctagcgcaaccaaatgtatcgcctgtcagaaccccggaaagcagaatcagacaaccagcgccgtcagtacacccgcatcctcagaaaccagtaaggctccgaagtcaggcttcgaggggatgttcactaaaaaggaaggacagtgggattgctccgtttgtctggttaggaacgaagcaagtgctacaaagtgtatcgcttgtcagtgccccagtaagcagaatcagacgacggcgattagcacacccgcatcatcagagatatccaaggcccctaagagcggttttgaaggcatgttcattaggaagggtcagtgggattgcagtgtctgttgcgtgcaaaatgagagttcgtccctgaaatgtgtggcctgtgatgctagtaaacctacacataagccaatcgctgaagccccaagcgcttttactctggggagcgagatgaagctccatgattctagtgggagccaagtgggtaccggattcaaaagcaatttctcagagaaggcctctaagttcggtaacacagaacagggattcaagttcggacatgtcgaccaggagaatagcccatcctttatgtttcaggggtcctctaacactgagtttaaaagcactaaggagggcttcagcatacctgtgagcgctgatggttttaagtttggtatcagcgagccgggaaaccaggaaaaaaagagcgagaaacctctggaaaacggcacaggtttccaggcacaggacatcagtggacagaaaaacgggaggggcgtgatctttggacagacctctagcacatttacctttgccgacctggccaagagcacaagcggcgagggttttcagttcgggaaaaaggatcccaattttaaaggattcagcggcgctggggagaaattattcagttctcaatatggtaaaatggccaacaaggctaacacctcgggggattttgaaaaagatgacgacgcgtataagacagaggacagcgacgacattcactttgagccagtggtacaaatgcccgagaaggtggaacttgtcactggggaggaggacgagaaagtgctgtatagccaacgtgttaaactgttcaggttcgacgccgaggttagccagtggaaagagaggggtctgggaaacctcaagatccttaagaacgaggtcaatggtaaacttcggatgctgatgagaagggagcaggtgcttaaggtgtgtgcaaatcactggataacgaccaccatgaatcttaaacccctttctggaagtgacagggcctggatgtggttagcttctgatttttctgatggggatgctaagctcgagcagctggccgcaaagttcaagacccccgagctggccgaggaattcaaacaaaagtttgaagagtgccagcgacttctgttagacatacccctacagactccgcataagctggttgatacaggcagagccgctaaactgatccagagagctgaagagatgaagagcggcctcaaggactttaagactttcctcacaaatgaccaaaccaaagtcaccgaggaagagaacaagggtagtggaaccggcgctgcaggcgcatctgatacgacgatcaaaccaaatcctgagaacaccggtccaaccctcgagtgggacaattatgacctgcgggaagacgccctggacgacagcgtgtctagtagcagcgtgcacgcgtcccccctggcgtcctcacccgtccgaaagaacctcttccggtttggagaatccaccactgggtttaatttttcttttaaatccgccctgagtccaagtaagtctcccgctaaactcaatcaatcaggaacatccgtgggaaccgatgaggaaagtgatgtgacgcaggaggaagagagggatggacaatattttgaaccggtcgtgccactgcctgacctggtcgaagtgagttcaggagaagagaatgaacaggtagtgttcagtcacagagctaaactgtaccggtatgacaaagacgtggggcagtggaaagaacgaggcatcggagacatcaagatcctccagaattacgacaacaagcaggtcagaatcgtaatgcgcagagatcaggttctcaagctgtgcgccaatcaccgcatcaccccagacatgacgctccagaatatgaagggaacggaacgcgtttggctatggactgcctgcgacttcgccgatggtgagcgcaaagtcgagcatcttgcggtcagatttaagctacaggacgtagccgactcttttaaaaagatttttgatgaagccaagacagcccaggaaaaggatagtttgattacgccccacgtatcaaggtcctcaactcccagagaatcaccttgcgggaagattgcagtggcagtcttagaggaaacaactagagagagaacagatgttatacagggggatgatgtggccgacgcaacaagcgaggttgaggtgagttcaacaagcgagacgacgcccaaggctgtggtgtccccgccaaaatttgtgttcggtagtgaatctgtaaaatctatctttagttccgagaagtcgaagccattcgcattcggtaatagcagcgccaccgggagcctctttgggtttagtttcaatgcgccattaaaatccaataacagcgagactagcagtgttgctcagtccgggtccgagtcaaaagtagaacccaagaagtgtgagttgagcaaaaattcggatatcgaacagtcatccgatagcaaagtcaagaacctttttgcgtctttccccaccgaagagtcttctatcaattataccttcaagaccccagagaaggccaaggagaagaaaaagcctgaggattcaccatcggatgatgatgtgctgatcgtctatgagctgacaccaacagctgagcagaaggccctggccacgaaactcaagctaccgccaacgttcttctgttacaagaaccgcccagactatgtgagtgaagaagaggaggatgatgaagactttgaaactgcagtgaaaaaactaaacggcaagctttatctggacggatccgaaaaatgccgccctctagaggagaacactgccgataacgagaaggaatgtatcatcgtgtgggagaagaaacccaccgtcgaagaaaaggcgaaagctgatactcttaagttgcctcccacatttttctgcggagtgtgcagtgacacagatgaagataacgggaatggagaggattttcagagcgaactgcagaaggtacaggaggcccagaaatcccagacggaggagatcacatccaccaccgattctgtgtacacaggcggtaccgaggtcatggttccctctttttgcaaaagcgaggaacctgattctatcacaaagtctatcagctctcctagtgtttcaagcgagaccatggacaagcccgtagatctctcgactagaaaggagatagacacagactccactagtcaaggagagtcaaagatagtctcattcggcttcggtagcagcacagggctctccttcgccgaccttgcttctagtaacagcggggatttcgccttcggcagcaaagacaagaactttcagtgggctaacaccggggcagctgtcttcggaacccagtctgttggaacccagagcgctggtaaggtgggggaagacgaagatgggtccgacgaggaggtggtccataacgaagacatccacttcgagcccatcgtctcactccctgaggttgaagtgaaaagcggggaggaagacgaggaaattctcttcaaagaacgggctaagctgtataggtgggatcgggacgtgagtcaatggaaagagaggggtgtgggggacattaagattctgtggcataccatgaaaaactattacagaattcttatgcgtcgtgaccaggtttttaaagtgtgcgccaatcacgtaattaccaaaacgatggagctaaagcccctcaacgtgagtaacaatgccttagtgtggacagcctctgactatgcagatggagaagccaaggtggagcagcttgccgtcaggtttaagacgaaggaagttgctgattgcttcaaaaaaacctttgaggagtgtcaacagaatctcatgaagttacagaaaggccacgtgtctctggccgcagaattatctaaggaaaccaatccagtggtctttttcgacgtgtgtgccgacggcgagcccctgggcaggatcactatggagttgttttcaaacatcgtccctcgaaccgctgagaattttcgcgctttgtgcacgggggagaagggcttcgggttcaaaaattcaatcttccacagagtgatcccagattttgtttgccaaggtggtgacatcaccaagcacgacggaaccgggggacagagcatctatggagacaagttcgaggatgagaatttcgatgtgaagcatactggccctgggctgctgtcaatggccaatcaagggcagaacaccaataatagccagtttgtgatcaccctcaaaaaggctgagcacctggactttaaacacgttgtcttcggatttgtgaaggatggcatggataccgtgaaaaaaatcgaatctttcgggagccctaaagggagtgtgtgccggagaatcaccattacagagtgcggccaaatatat

SEQ ID NO: 163348 - DNA, 11711 bp, Artificial Sequence
  derived and/or modified sequence
cacagtggtcctccgccggctacggcgctgcgtcactggtttgcaggcgctttcctcttggaagtggcgactgctgcgggcctgagcgctggtctcacgcgcctcgggagccaggttggcggcgcgatgaggcgcagcaaggctgacgtggagcggtacatcgcctcggtgcagggctccaccccgtcgcctcgacagaagtcaatgaaaggattctattttgcaaagctgtattatgaagctaaagaatatgatcttgctaaaaaatacatatgtacttacattaatgtgcaagagagggatcccaaagctcacagatttctgggtcttctttatgaattggaagaaaacacagacaaagccgttgaatgttacaggcgttcagtggaattaaacccaacacaaaaagatcttgtgttgaagattgcagaattgctttgtaaaaatgatgttactgatggaagagcaaaatactggcttgaaagagcagccaaacttttcccaggaagtcctgcaatttataaactaaaggaacagcttctagattgtgaaggtgaagatggatggaataaactttttgacttgattcagtcagaactttatgtaagacctgatgacgtccatgtgaacatccggctagtggaggtgtatcgctcaactaaaagattgaaggatgctgtggcccactgccatgaggcagagaggaacatagctttgcgttcaagtttagaatggaattcgtgtgttgtacagacccttaaggaatatctggagtctttacagtgtttggagtctgataaaagtgactggcgagcaaccaatacagacttactgctggcctatgctaatcttatgcttcttacgctttccactagagatgtgcaggaaagtagagaattactgcaaagttttgatagtgctcttcagtctgtgaaatctttgggtggaaatgatgaactgtcagctactttcttagaaatgaaaggacatttctacatgcatgctggttctctgcttttgaagatgggtcagcatagtagtaatgttcaatggcgagctctttctgagctggctgcattgtgctatctcatagcatttcaggttccaagaccaaagattaaattaataaaaggtgaagctggacaaaatctgctggaaatgatggcctgtgaccgactgagccaatcagggcacatgttgctaaacttaagtcgtggcaagcaagattttttaaaagagattgttgaaacttttgccaacaaaagcgggcagtctgcattatatgatgctctgttttctagtcagtcacctaaggatacatcttttcttggtagcgatgatattggaaacattgatgtacgagaaccagagcttgaagatttgactagatacgatgttggtgctattcgagcacataatggtagtcttcagcaccttacttggcttggcttacagtggaattcattgcctgctttacctggaatccgaaaatggctaaaacagcttttccatcatttgccccatgaaacctcaaggcttgaaacaaatgcacctgaatcaatatgtattttagatcttgaagtatttctccttggagtagtatataccagccacttacaattaaaggagaaatgtaattctcaccacagctcctatcagccgttatgcctgccccttcctgtgtgtaaacagctttgtacagaaagacaaaaatcttggtgggatgcggtttgtactctgattcacagaaaagcagtacctggaaacgtagcaaaattgagacttctagttcagcatgaaataaacactctaagagcccaggaaaaacatggccttcaacctgctctgcttgtacattgggcagaatgccttcagaaaacgggcagcggtcttaattctttttatgatcaacgagaatacatagggagaagtgttcattattggaagaaagttttgccattgttgaagataataaaaaagaagaacagtattcctgaacctattgatcctctgtttaaacattttcatagtgtagacattcaggcatcagaaattgttgaatatgaagaagacgcacacataacttttgctatattggatgcagtaaatggaaatatagaagatgctgtgactgcttttgaatctataaaaagtgttgtttcttattggaatcttgcactgatttttcacaggaaggcagaagacattgaaaatgatgccctttctcctgaagaacaagaagaatgcaaaaattatctgagaaagaccagggactacctaataaagattatagatgacagtgattcaaatctttcagtggtcaagaaattgcctgtgcccctggagtctgtaaaagagatgcttaattcagtcatgcaggaactcgaagactatagtgaaggaggtcctctctataaaaatggttctttgcgaaatgcagattcagaaataaaacattctacaccgtctcctaccagatattcactatcaccaagtaaaagttacaagtattctcccaaaacaccacctcgatgggcagaagatcagaattctttactgaaaatgatttgccaacaagtagaggccattaagaaagaaatgcaggagttgaaactaaatagcagtaactcagcatcccctcatcgttggcccacagagaattatggaccagactcagtgcctgatggatatcaggggtcacagacatttcatggggctccactaacagttgcaactactggcccttcagtatattatagtcagtcaccagcatataattcccagtatcttctcagaccagcagctaatgttactcccacaaagggcccagtctatggcatgaataggcttccaccccaacagcatatttatgcctatccgcaacagatgcacacaccgccagtgcaaagctcatctgcttgtatgttctctcaggagatgtatggtcctcctgcattgcgttttgagtctcctgcaacgggaattctatcgcccaggggtgatgattactttaattacaatgttcaacagacaagcacaaatccacctttgccagaaccaggatatttcacaaaacctccgattgcagctcatgcttcaagatctgcagaatctaagactatagaatttgggaaaactaattttgttcagcccatgccgggtgaaggattaaggccatctttgccaacacaagcacacacaacacagccaactccttttaaatttaactcaaatttcaaatcaaatgatggtgacttcacgttttcctcaccacaggttgtgacacagccccctcctgcagcttacagtaacagtgaaagccttttaggtctcctgacttcagataaacccttgcaaggagatggctatagtggagccaaaccaattcctggtggtcaaaccattgggcctcgaaatacattcaattttggaagcaaaaatgtgtctggaatttcatttacagaaaacatggggtcgagtcagcaaaagaattctggttttcggcgaagtgatgatatgtttactttccatggtccagggaaatcagtatttggaacacccactttagagacagcaaacaagaatcatgagacagatggaggaagtgcccatggggatgatgatgatgacggtcctcactttgagcctgtagtacctcttcctgataagattgaagtaaaaactggtgaggaagatgaagaagaattcttttgcaaccgcgcgaaattgtttcgtttcgatgtagaatccaaagaatggaaagaacgtgggattggcaatgtaaaaatactgaggcataaaacatctggtaaaattcgccttctaatgagacgagagcaagtattgaaaatctgtgcaaatcattacatcagtccagatatgaaattgacaccaaatgctggatcagacagatcttttgtatggcatgcccttgattatgcagatgagttgccaaaaccagaacaacttgctattaggttcaaaactcctgaggaagcagcactttttaaatgcaagtttgaagaagcccagagcattttaaaagccccaggaacaaatgtagccatggcgtcaaatcaggctgtcagaattgtaaaagaacccacaagtcatgataacaaggatatttgcaaatctgatgctggaaacctgaattttgaatttcaggttgcaaagaaagaagggtcttggtggcattgtaacagctgctcattaaagaatgcttcaactgctaagaaatgtgtatcatgccaaaatctaaacccaagcaataaagagctcgttggcccaccattagctgaaactgtttttactcctaaaaccagcccagagaatgttcaagatcgatttgcattggtgactccaaagaaagaaggtcactgggattgtagtatttgtttagtaagaaatgaacctactgtatctaggtgcattgcgtgtcagaatacaaaatctgctaacaaaagtggatcttcatttgttcatcaagcttcatttaaatttggccagggagatcttcctaaacctattaacagtgatttcagatctgttttttctacaaaggaaggacagtgggattgcagtgcatgtttggtacaaaatgaggggagctctacaaaatgtgctgcttgtcagaatccgagaaaacagagtctacctgctacttctattccaacacctgcctcttttaagtttggtacttcagagacaagtaaaactctaaaaagtggatttgaagacatgtttgctaagaaggaaggacagtgggattgcagttcatgcttagtgcgaaatgaagcaaatgctacaagatgtgttgcttgtcagaatccggataaaccaagtccatctacttctgttccagctcctgcctcttttaagtttggtacttcagagacaagcaaggctccaaagagcggatttgagggaatgttcactaagaaggagggacagtgggattgcagtgtgtgcttagtaagaaatgaagccagtgctaccaaatgtattgcttgtcagaatccaggtaaacaaaatcaaactacttctgcagtttcaacacctgcctcttcagagacaagcaaggctccaaagagcggatttgagggaatgttcactaagaaggagggacagtgggattgcagtgtgtgcttagtaagaaatgaagccagtgctaccaaatgtattgcttgtcagaatccaggtaaacaaaatcaaactacttctgcagtttcaacacctgcctcttcagagacaagcaaggctccaaagagcggatttgagggaatgttcactaagaaggaaggacagtgggattgcagtgtgtgcttagtaagaaatgaagccagtgctaccaaatgtattgcttgtcagtgtccaagtaaacaaaatcaaacaactgcaatttcaacacctgcctcttcggagataagcaaggctccaaagagtggatttgaaggaatgttcatcaggaaaggacagtgggattgtagtgtttgctgtgtacaaaatgagagttcttccttaaaatgtgtggcttgtgatgcctctaaaccaactcataaacctattgcagaagctccttcagctttcacactgggctcagaaatgaagttgcatgactcttctggaagtcaggtgggaacaggatttaaaagtaatttctcagaaaaagcttctaagtttggcaatacagagcaaggattcaaatttgggcatgtggatcaagaaaattcaccttcatttatgtttcagggttcttctaatacagaatttaagtcaaccaaagaaggattttccatccctgtgtctgctgatggatttaaatttggcatttcggaaccaggaaatcaagaaaagaaaagtgaaaagcctcttgaaaatggtactggcttccaggctcaggatattagtggccagaagaatggccgtggtgtgatttttggccaaacaagtagcacttttacatttgcagatcttgcaaaatcaacttcaggagaaggatttcagtttggcaaaaaagaccccaatttcaagggattttcaggtgctggagaaaaattattctcatcacaatacggtaaaatggccaataaagcaaacacttccggtgactttgagaaagatgatgatgcctataagactgaggacagcgatgacatccattttgaaccagtagttcaaatgcccgaaaaagtagaacttgtaacaggagaagaagatgaaaaagttctgtattcacagcgggtaaaactatttagatttgatgctgaggtaagtcagtggaaagaaaggggcttggggaacttaaaaattctcaaaaacgaggtcaatggcaaactaagaatgctgatgcgaagagaacaagtactaaaagtgtgtgctaatcattggataacgactacgatgaacctgaagcctctctctggatcagatagagcatggatgtggttagccagtgatttctctgatggtgatgccaaactagagcagttggcagcaaaatttaaaacaccagagctggctgaagaattcaagcagaaatttgaggaatgccagcggcttctgttagacataccacttcaaactccccataaacttgtagatactggcagagctgccaagttaatacagagagctgaagaaatgaagagtggactgaaagatttcaaaacatttttgacaaatgatcaaacaaaagtcactgaggaagaaaataagggttcaggtacaggtgcggccggtgcctcagacacaacaataaaacccaatcctgaaaacactgggcccacattagaatgggataactatgatttaagggaagatgctttggatgatagtgtcagtagtagctcagtacatgcttctccattggcaagtagccctgtgagaaaaaatcttttccgttttggtgagtcaacaacaggatttaacttcagttttaaatctgctttgagtccatctaagtctcctgccaagttgaatcagagtgggacttcagttggcactgatgaagaatctgatgttactcaagaagaagagagagatggacagtactttgaacctgttgttcctttacctgatctagttgaagtatccagtggtgaggaaaatgaacaagttgtttttagtcacagggcaaaactctacagatatgataaagatgttggtcaatggaaagaaaggggcattggtgatataaagattttacagaattatgataataagcaagttcgtatagtgatgagaagggaccaagtattaaaactttgtgccaatcacagaataactccagacatgactttgcaaaatatgaaagggacagaaagagtatggttgtggactgcatgtgattttgcagatggagaaagaaaagtagagcatttagctgttcgttttaaactacaggatgttgcagactcgtttaagaaaatttttgatgaagcaaaaacagcccaggaaaaagattctttgataacacctcatgtttctcggtcaagcactcccagagagtcaccatgtggcaaaattgctgtagctgtattagaagaaaccacaagagagaggacagatgttattcagggtgatgatgtagcagatgcaacttcagaagttgaagtgtctagcacatctgaaacaacaccaaaagcagtggtttctcctccaaagtttgtatttggttcagagtctgttaaaagcatttttagtagtgaaaaatcaaaaccatttgcattcggcaacagttcagccactgggtctttgtttggatttagttttaatgcacctttgaaaagtaacaatagtgaaactagttcagtagcccagagtggatctgaaagcaaagtggaacctaaaaaatgtgaactgtcaaagaactctgatatcgaacagtcttcagatagcaaagtcaaaaatctctttgcttcctttccaacggaagaatcttcaatcaactacacatttaaaacaccagaaaaggcaaaagagaagaaaaaacctgaagattctccctcagatgatgatgttctcattgtatatgaactaactccaaccgctgagcagaaagcccttgcaaccaaacttaaacttcctccaactttcttctgctacaagaatagaccagattatgttagtgaagaagaggaggatgatgaagatttcgaaacagctgtcaagaaacttaatggaaaactatatttggatggctcagaaaaatgtagacccttggaagaaaatacagcagataatgagaaagaatgtattattgtttgggaaaagaaaccaacagttgaagagaaggcaaaagcagatacgttaaaacttccacctacatttttttgtggagtctgtagtgatactgatgaagacaatggaaatggggaggactttcaatcagagcttcaaaaagttcaggaagctcaaaaatctcagacagaagaaataactagcacaactgacagtgtatatacaggtgggactgaagtgatggtaccttctttctgtaaatctgaagaacctgattctattaccaaatccattagttcaccatctgtttcctctgaaactatggacaaacctgtagatttgtcaactagaaaggaaattgatacagattctacaagccaaggggaaagcaagatagtttcatttggatttggaagtagcacagggctctcatttgcagacttggcttccagtaattctggagattttgcttttggttctaaagataaaaatttccaatgggcaaatactggagcagctgtgtttggaacacagtcagtcggaacccagtcagccggtaaagttggtgaagatgaagatggtagtgatgaagaagtagttcataatgaagatatccattttgaaccaatagtgtcactaccagaggtagaagtaaaatctggagaagaagatgaagaaattttgtttaaagagagagccaaactttatagatgggatcgggatgtcagtcagtggaaggagcgcggtgttggagatataaagattctttggcatacaatgaagaattattaccggatcctaatgagaagagaccaggtttttaaagtgtgtgcaaaccacgttattactaaaacaatggaattaaagcccttaaatgtttcaaataatgctttagtttggactgcctcagattatgctgatggagaagcaaaagtagaacagcttgcagtgagatttaaaactaaagaagtagctgattgtttcaagaaaacatttgaagaatgtcagcagaatttaatgaaactccagaaaggacatgtatcactggcagcagaattatcaaaggagaccaatcctgtggtgttttttgatgtttgtgcggacggtgaacctctagggcggataactatggaattattttcaaacattgttcctcggactgctgagaacttcagagcactatgcactggagagaaaggctttggtttcaagaattccatttttcacagagtaattccagattttgtttgccaaggaggagatatcaccaaacatgatggaacaggcggacagtccatttatggagacaaatttgaagatgaaaattttgatgtgaaacatactggtcctggtttactatccatggccaatcaaggccagaataccaataattctcaatttgttataacactgaagaaagcagaacatttggactttaagcatgtagtatttgggtttgttaaggatggcatggatactgtgaaaaagattgaatcatttggttctcccaaagggtctgtttgtcgaagaataactatcacagaatgtggacagatataaaatcattgttgttcatagaaaatttcatctgtataagcagttggattgaagcttagctattacaatttgatagttatgttcagcttttgaaaatggacgtttccgatttacaaatgtaaaattgcagcttatagctgttgtcactttttaatgtgttataattgaccttgcatggtgtgaaataaaagtttaaacactggtgtatttcaggtgtacttgtgtttatgtactcctgacgtattaaaatggaataatactaatcttgttaaaagcaatagacctcaaactattgaaggaatatgatatatgcaatttaattttaattccttttaagatatttggacttcctgcatggatatacttaccatttgaataaagggaccacaacttggataatttaattttaggtttgaaatatatttggtaatcttaactattggtgtactcatttatgcatagagactcgtttatgaatgggtagagccacagaacgtatagagttaaccaaagtgctcttctctagaatctttacacctcctgtgtggttacaagttaactttgtaagtagcgtaccttccttccttaaaatatctagcttcctgtgccctttcatagatattcgattaatttttacattttaaacaagttgactatttcctttaggggttttgtttcaaacttttctgtcatctgtctctactacctcagaaactgcagcttggttctgatgatagaaattgaatttttccttgtagttattgtgataaagtatgaatatttttagaaagtctataccatgttctttcgttaaagatttgctttatacaagattgttgcagtacctttttctggtaaattttgtagcagaaataaaatgacaattcctaagagccactgacatccaaaaaattcattacttacgcttcgggttcattctaaagtaaggaagacaatttaaaggcagtaaattcaaactgctgcataatttccagagctcctagtttctcaagtttgatacacaccaaaaacgtatttggaaatggcttgtatcaaatgttaggcaaattgctaaagaaaagaggatgttcttattggcctactcaatatggaactacaaagaatccaggtagaacacaaaattttgtatattgcaattatgaatattgactgtcttccacccatctgtgttctttcgggtgaaattacctcattttatttagtgaggaaagacaggtttattccctgttacatggggatttggaaattgggtatcctaaagcaagtaactgttcaaccaccagtcaaaagaggggagggatgttgtgcgagtaatgagtgatggtataccatcaccattccactcggccacaaagccagatacttgaaataaacctactccaaatgtatcagttcagtcttgaaccatggattacatatgtttacactaaatatttcaaattggcttatttggaaatctatgtaatataaactgatgtaaagtgtgttgtaacttttcagctgagacagttgatgccttcgtcatgattttagaataaattcttaagttaatgcaagtgctttttaagagactttttacagatttgtatgctttcctaaagcactaaagttacaaattaaaaagctttaaaaactttgaccaaaaatttgacaaaatgacatgtaaactgacttttcccgtattagtattccaaagatgcttaaaagtggcttgtggcatttatgagaaagtctttgtgtcacatttcaggaaaggactttgatttctctttgttatttaatcactgatgtggtctaaacccacgataatatgtatctttccttttaaactggattttatgttgtctcattaaaatctgcttaaagatagaataaaattcattatttgtaca

SEQ ID NO: 163349 - DNA, 9675 bp, Artificial Sequence
  derived and/or modified sequence
atgagaagaagcaaggccgacgtggagagatacatcgccagcgtgcagggcagcacccccagccccagacagaagagcatgaagggcttctacttcgccaagctgtactacgaggccaaggagtacgacctggccaagaagtacatctgcacctacatcaacgtgcaggagagagaccccaaggcccacagattcctgggcctgctgtacgagctggaggagaacaccgacaaggccgtggagtgctacagaagaagcgtggagctgaaccccacccagaaggacctggtgctgaagatcgccgagctgctgtgcaagaacgacgtgaccgacggcagagccaagtactggctggagagagccgccaagctgttccccggcagccccgccatctacaagctgaaggagcagctgctggactgcgagggcgaggacggctggaacaagctgttcgacctgatccagagcgagctgtacgtgagacccgacgacgtgcacgtgaacatcagactggtggaggtgtacagaagcaccaagagactgaaggacgccgtggcccactgccacgaggccgagagaaacatcgccctgagaagcagcctggagtggaacagctgcgtggtgcagaccctgaaggagtacctggagagcctgcagtgcctggagagcgacaagagcgactggagagccaccaacaccgacctgctgctggcctacgccaacctgatgctgctgaccctgagcaccagagacgtgcaggagagcagagagctgctgcagagcttcgacagcgccctgcagagcgtgaagagcctgggcggcaacgacgagctgagcgccaccttcctggagatgaagggccacttctacatgcacgccggcagcctgctgctgaagatgggccagcacagcagcaacgtgcagtggagagccctgagcgagctggccgccctgtgctacctgatcgccttccaggtgcccagacccaagatcaagctgatcaagggcgaggccggccagaacctgctggagatgatggcctgcgacagactgagccagagcggccacatgctgctgaacctgagcagaggcaagcaggacttcctgaaggagatcgtggagaccttcgccaacaagagcggccagagcgccctgtacgacgccctgttcagcagccagagccccaaggacaccagcttcctgggcagcgacgacatcggcaacatcgacgtgagagagcccgagctggaggacctgaccagatacgacgtgggcgccatcagagcccacaacggcagcctgcagcacctgacctggctgggcctgcagtggaacagcctgcccgccctgcccggcatcagaaagtggctgaagcagctgttccaccacctgccccacgagaccagcagactggagaccaacgcccccgagagcatctgcatcctggacctggaggtgttcctgctgggcgtggtgtacaccagccacctgcagctgaaggagaagtgcaacagccaccacagcagctaccagcccctgtgcctgcccctgcccgtgtgcaagcagctgtgcaccgagagacagaagagctggtgggacgccgtgtgcaccctgatccacagaaaggccgtgcccggcaacgtggccaagctgagactgctggtgcagcacgagatcaacaccctgagagcccaggagaagcacggcctgcagcccgccctgctggtgcactgggccgagtgcctgcagaagaccggcagcggcctgaacagcttctacgaccagagagagtacatcggcagaagcgtgcactactggaagaaggtgctgcccctgctgaagatcatcaagaagaagaacagcatccccgagcccatcgaccccctgttcaagcacttccacagcgtggacatccaggccagcgagatcgtggagtacgaggaggacgcccacatcaccttcgccatcctggacgccgtgaacggcaacatcgaggacgccgtgaccgccttcgagagcatcaagagcgtggtgagctactggaacctggccctgatcttccacagaaaggccgaggacatcgagaacgacgccctgagccccgaggagcaggaggagtgcaagaactacctgagaaagaccagagactacctgatcaagatcatcgacgacagcgacagcaacctgagcgtggtgaagaagctgcccgtgcccctggagagcgtgaaggagatgctgaacagcgtgatgcaggagctggaggactacagcgagggcggccccctgtacaagaacggcagcctgagaaacgccgacagcgagatcaagcacagcacccccagccccaccagatacagcctgagccccagcaagagctacaagtacagccccaagaccccccccagatgggccgaggaccagaacagcctgctgaagatgatctgccagcaggtggaggccatcaagaaggagatgcaggagctgaagctgaacagcagcaacagcgccagcccccacagatggcccaccgagaactacggccccgacagcgtgcccgacggctaccagggcagccagaccttccacggcgcccccctgaccgtggccaccaccggccccagcgtgtactacagccagagccccgcctacaacagccagtacctgctgagacccgccgccaacgtgacccccaccaagggccccgtgtacggcatgaacagactgcccccccagcagcacatctacgcctacccccagcagatgcacaccccccccgtgcagagcagcagcgcctgcatgttcagccaggagatgtacggcccccccgccctgagattcgagagccccgccaccggcatcctgagccccagaggcgacgactacttcaactacaacgtgcagcagaccagcaccaacccccccctgcccgagcccggctacttcaccaagccccccatcgccgcccacgccagcagaagcgccgagagcaagaccatcgagttcggcaagaccaacttcgtgcagcccatgcccggcgagggcctgagacccagcctgcccacccaggcccacaccacccagcccacccccttcaagttcaacagcaacttcaagagcaacgacggcgacttcaccttcagcagcccccaggtggtgacccagcccccccccgccgcctacagcaacagcgagagcctgctgggcctgctgaccagcgacaagcccctgcagggcgacggctacagcggcgccaagcccatccccggcggccagaccatcggccccagaaacaccttcaacttcggcagcaagaacgtgagcggcatcagcttcaccgagaacatgggcagcagccagcagaagaacagcggcttcagaagaagcgacgacatgttcaccttccacggccccggcaagagcgtgttcggcacccccaccctggagaccgccaacaagaaccacgagaccgacggcggcagcgcccacggcgacgacgacgacgacggcccccacttcgagcccgtggtgcccctgcccgacaagatcgaggtgaagaccggcgaggaggacgaggaggagttcttctgcaacagagccaagctgttcagattcgacgtggagagcaaggagtggaaggagagaggcatcggcaacgtgaagatcctgagacacaagaccagcggcaagatcagactgctgatgagaagagagcaggtgctgaagatctgcgccaaccactacatcagccccgacatgaagctgacccccaacgccggcagcgacagaagcttcgtgtggcacgccctggactacgccgacgagctgcccaagcccgagcagctggccatcagattcaagacccccgaggaggccgccctgttcaagtgcaagttcgaggaggcccagagcatcctgaaggcccccggcaccaacgtggccatggccagcaaccaggccgtgagaatcgtgaaggagcccaccagccacgacaacaaggacatctgcaagagcgacgccggcaacctgaacttcgagttccaggtggccaagaaggagggcagctggtggcactgcaacagctgcagcctgaagaacgccagcaccgccaagaagtgcgtgagctgccagaacctgaaccccagcaacaaggagctggtgggcccccccctggccgagaccgtgttcacccccaagaccagccccgagaacgtgcaggacagattcgccctggtgacccccaagaaggagggccactgggactgcagcatctgcctggtgagaaacgagcccaccgtgagcagatgcatcgcctgccagaacaccaagagcgccaacaagagcggcagcagcttcgtgcaccaggccagcttcaagttcggccagggcgacctgcccaagcccatcaacagcgacttcagaagcgtgttcagcaccaaggagggccagtgggactgcagcgcctgcctggtgcagaacgagggcagcagcaccaagtgcgccgcctgccagaaccccagaaagcagagcctgcccgccaccagcatccccacccccgccagcttcaagttcggcaccagcgagaccagcaagaccctgaagagcggcttcgaggacatgttcgccaagaaggagggccagtgggactgcagcagctgcctggtgagaaacgaggccaacgccaccagatgcgtggcctgccagaaccccgacaagcccagccccagcaccagcgtgcccgcccccgccagcttcaagttcggcaccagcgagaccagcaaggcccccaagagcggcttcgagggcatgttcaccaagaaggagggccagtgggactgcagcgtgtgcctggtgagaaacgaggccagcgccaccaagtgcatcgcctgccagaaccccggcaagcagaaccagaccaccagcgccgtgagcacccccgccagcagcgagaccagcaaggcccccaagagcggcttcgagggcatgttcaccaagaaggagggccagtgggactgcagcgtgtgcctggtgagaaacgaggccagcgccaccaagtgcatcgcctgccagaaccccggcaagcagaaccagaccaccagcgccgtgagcacccccgccagcagcgagaccagcaaggcccccaagagcggcttcgagggcatgttcaccaagaaggagggccagtgggactgcagcgtgtgcctggtgagaaacgaggccagcgccaccaagtgcatcgcctgccagtgccccagcaagcagaaccagaccaccgccatcagcacccccgccagcagcgagatcagcaaggcccccaagagcggcttcgagggcatgttcatcagaaagggccagtgggactgcagcgtgtgctgcgtgcagaacgagagcagcagcctgaagtgcgtggcctgcgacgccagcaagcccacccacaagcccatcgccgaggcccccagcgccttcaccctgggcagcgagatgaagctgcacgacagcagcggcagccaggtgggcaccggcttcaagagcaacttcagcgagaaggccagcaagttcggcaacaccgagcagggcttcaagttcggccacgtggaccaggagaacagccccagcttcatgttccagggcagcagcaacaccgagttcaagagcaccaaggagggcttcagcatccccgtgagcgccgacggcttcaagttcggcatcagcgagcccggcaaccaggagaagaagagcgagaagcccctggagaacggcaccggcttccaggcccaggacatcagcggccagaagaacggcagaggcgtgatcttcggccagaccagcagcaccttcaccttcgccgacctggccaagagcaccagcggcgagggcttccagttcggcaagaaggaccccaacttcaagggcttcagcggcgccggcgagaagctgttcagcagccagtacggcaagatggccaacaaggccaacaccagcggcgacttcgagaaggacgacgacgcctacaagaccgaggacagcgacgacatccacttcgagcccgtggtgcagatgcccgagaaggtggagctggtgaccggcgaggaggacgagaaggtgctgtacagccagagagtgaagctgttcagattcgacgccgaggtgagccagtggaaggagagaggcctgggcaacctgaagatcctgaagaacgaggtgaacggcaagctgagaatgctgatgagaagagagcaggtgctgaaggtgtgcgccaaccactggatcaccaccaccatgaacctgaagcccctgagcggcagcgacagagcctggatgtggctggccagcgacttcagcgacggcgacgccaagctggagcagctggccgccaagttcaagacccccgagctggccgaggagttcaagcagaagttcgaggagtgccagagactgctgctggacatccccctgcagaccccccacaagctggtggacaccggcagagccgccaagctgatccagagagccgaggagatgaagagcggcctgaaggacttcaagaccttcctgaccaacgaccagaccaaggtgaccgaggaggagaacaagggcagcggcaccggcgccgccggcgccagcgacaccaccatcaagcccaaccccgagaacaccggccccaccctggagtgggacaactacgacctgagagaggacgccctggacgacagcgtgagcagcagcagcgtgcacgccagccccctggccagcagccccgtgagaaagaacctgttcagattcggcgagagcaccaccggcttcaacttcagcttcaagagcgccctgagccccagcaagagccccgccaagctgaaccagagcggcaccagcgtgggcaccgacgaggagagcgacgtgacccaggaggaggagagagacggccagtacttcgagcccgtggtgcccctgcccgacctggtggaggtgagcagcggcgaggagaacgagcaggtggtgttcagccacagagccaagctgtacagatacgacaaggacgtgggccagtggaaggagagaggcatcggcgacatcaagatcctgcagaactacgacaacaagcaggtgagaatcgtgatgagaagagaccaggtgctgaagctgtgcgccaaccacagaatcacccccgacatgaccctgcagaacatgaagggcaccgagagagtgtggctgtggaccgcctgcgacttcgccgacggcgagagaaaggtggagcacctggccgtgagattcaagctgcaggacgtggccgacagcttcaagaagatcttcgacgaggccaagaccgcccaggagaaggacagcctgatcaccccccacgtgagcagaagcagcacccccagagagagcccctgcggcaagatcgccgtggccgtgctggaggagaccaccagagagagaaccgacgtgatccagggcgacgacgtggccgacgccaccagcgaggtggaggtgagcagcaccagcgagaccacccccaaggccgtggtgagcccccccaagttcgtgttcggcagcgagagcgtgaagagcatcttcagcagcgagaagagcaagcccttcgccttcggcaacagcagcgccaccggcagcctgttcggcttcagcttcaacgcccccctgaagagcaacaacagcgagaccagcagcgtggcccagagcggcagcgagagcaaggtggagcccaagaagtgcgagctgagcaagaacagcgacatcgagcagagcagcgacagcaaggtgaagaacctgttcgccagcttccccaccgaggagagcagcatcaactacaccttcaagacccccgagaaggccaaggagaagaagaagcccgaggacagccccagcgacgacgacgtgctgatcgtgtacgagctgacccccaccgccgagcagaaggccctggccaccaagctgaagctgccccccaccttcttctgctacaagaacagacccgactacgtgagcgaggaggaggaggacgacgaggacttcgagaccgccgtgaagaagctgaacggcaagctgtacctggacggcagcgagaagtgcagacccctggaggagaacaccgccgacaacgagaaggagtgcatcatcgtgtgggagaagaagcccaccgtggaggagaaggccaaggccgacaccctgaagctgccccccaccttcttctgcggcgtgtgcagcgacaccgacgaggacaacggcaacggcgaggacttccagagcgagctgcagaaggtgcaggaggcccagaagagccagaccgaggagatcaccagcaccaccgacagcgtgtacaccggcggcaccgaggtgatggtgcccagcttctgcaagagcgaggagcccgacagcatcaccaagagcatcagcagccccagcgtgagcagcgagaccatggacaagcccgtggacctgagcaccagaaaggagatcgacaccgacagcaccagccagggcgagagcaagatcgtgagcttcggcttcggcagcagcaccggcctgagcttcgccgacctggccagcagcaacagcggcgacttcgccttcggcagcaaggacaagaacttccagtgggccaacaccggcgccgccgtgttcggcacccagagcgtgggcacccagagcgccggcaaggtgggcgaggacgaggacggcagcgacgaggaggtggtgcacaacgaggacatccacttcgagcccatcgtgagcctgcccgaggtggaggtgaagagcggcgaggaggacgaggagatcctgttcaaggagagagccaagctgtacagatgggacagagacgtgagccagtggaaggagagaggcgtgggcgacatcaagatcctgtggcacaccatgaagaactactacagaatcctgatgagaagagaccaggtgttcaaggtgtgcgccaaccacgtgatcaccaagaccatggagctgaagcccctgaacgtgagcaacaacgccctggtgtggaccgccagcgactacgccgacggcgaggccaaggtggagcagctggccgtgagattcaagaccaaggaggtggccgactgcttcaagaagaccttcgaggagtgccagcagaacctgatgaagctgcagaagggccacgtgagcctggccgccgagctgagcaaggagaccaaccccgtggtgttcttcgacgtgtgcgccgacggcgagcccctgggcagaatcaccatggagctgttcagcaacatcgtgcccagaaccgccgagaacttcagagccctgtgcaccggcgagaagggcttcggcttcaagaacagcatcttccacagagtgatccccgacttcgtgtgccagggcggcgacatcaccaagcacgacggcaccggcggccagagcatctacggcgacaagttcgaggacgagaacttcgacgtgaagcacaccggccccggcctgctgagcatggccaaccagggccagaacaccaacaacagccagttcgtgatcaccctgaagaaggccgagcacctggacttcaagcacgtggtgttcggcttcgtgaaggacggcatggacaccgtgaagaagatcgagagcttcggcagccccaagggcagcgtgtgcagaagaatcaccatcaccgagtgcggccagatctag

SEQ ID NO: 163350 - protein, 2156 aa, Artificial Sequence
  derived and/or modified sequence
MSDTPSTGFSIIHPTSSEGQVPPPRHLSLTHPVVAKRISFYKSGDPQFGGVRVVVNPRSFKSFDALLDNLSRKVPLPFGVRNISTPRGRHSITRLEELEDGESYLCSHGRKVQPVDLDKARRRPRPWLSSRAISAHSPPHPVAVAAPGMPRPPRSLVVFRNGDPKTRRAVLLSRRVTQSFEAFLQHLTEVMQRPVVKLYATDGRRVPSLQAVILSSGAVVAAGREPFKPGNYDIQKYLLPARLPGISQRVYPKGNAKSESRKISTHMSSSSRSQIYSVSSEKTHNNDCYLDYSFVPEKYLALEKNDSQNLPIYPSEDDIEKSIIFNQDGTMTVEMKVRFRIKEEETIKWTTTVSKTGPSNNDEKSEMSFPGRTESRSSGLKLAACSFSADVSPMERSSNQEGSLAEEINIQMTDQVAETCSSASWENATVDTDIIQGTQDQAKHRFYRPPTPGLRRVRQKKSVIGSVTLVSETEVQEKMIGQFSYSEERESGENKSEYHMFTHSCSKMSSVSNKPVLVQINNNDQMEESSLERKKENSLLKSSAISAGVIEITSQKMLEMSHNNGLPSTISNNSIVEEDVVDCVVLDNKTGIKNFKTYGNTNDRFSPISADATHFSSNNSGTDKNISEAPASEASSTVTARIDRLINEFAQCGLTKLPKNEKKILSSVASKKKKKSRQQAINSRYQDGQLATKGILNKNERINTKGRITKEMIVQDSDSPLKGGILCEEDLQKSDTVIESNTFCSKSNLNSTISKNFHRNKLNTTQNSKVQGLLTKRKSRSLNKISLGAPKKREIGQRDKVFPHNESKYCKSTFENKSLFHVFNILEQKPKDFYAPQSQAEVASGYLRGMAKKSLVSKVTDSHITLKSQKKRKGDKVKASAILSKQHATTRANSLASLKKPDFPEAIAHHSIQNYIQSWLQNINPYPTLKPIKSAPVCRNETSVVNCSNNSFSGNDPHTNSGKISNFVMESNKHITKIAGLTGDNLCKEGDKSFIANDTGEEDLHETQVGSLNDAYLVPLHEHCTLSQSAINDHNTKSHIAAEKSGPEKKLVYQEINLARKRQSVEAAIQVDPIEEETPKDLLPVLMLHQLQASVPGIHKTQNGVVQMPGSLAGVPFHSAICNSSTNLLLAWLLVLNLKGSMNSFCQVDAHKATNKSSETLALLEILKHIAITEEADDLKAAVANLVESTTSHFGLSEKEQDMVPIDLSANCSTVNIQSVPKCSENERTQGISSLDGGCSASEACAPEVCVLEVTCSPCEMCTVNKAYSPKETCNPSDTFFPSDGYGVDQTSMNKACFLGEVCSLTDTVFSDKACAQKENHTYEGACPIDETYVPVNVCNTIDFLNSKENTYTDNLDSTEELERGDDIQKDLNILTDPEYKNGFNTLVSHQNVSNLSSCGLCLSEKEAELDKKHSSLDDFENCSLRKFQDENAYTSFDMEEPRTSEEPGSITNSMTSSERNISELESFEELENHDTDIFNTVVNGGEQATEELIQEEVEASKTLELIDISSKNIMEEKRMNGIIYEIISKRLATPPSLDFCYDSKQNSEKETNEGETKMVKMMVKTMETGSYSESSPDLKKCIKSPVTSDWSDYRPDSDSEQPYKTSSDDPNDSGELTQEKEYNIGFVKRAIEKLYGKADIIKPSFFPGSTRKSQVCPYNSVEFQCSRKASLYDSEGQSFGSSEQVSSSSSMLQEFQEERQDKCDVSAVRDNYCRGDIVEPGTKQNDDSRILTDIEEGVLIDKGKWLLKENHLLRMSSENPGMCGNADTTSVDTLLDNNSSEVPYSHFGNLAPGPTMDELSSSELEELTQPLELKCNYFNMPHGSDSEPFHEDLLDVRNETCAKERIANHHTEEKGSHQSERVCTSVTHSFISAGNKVYPVSDDAIKNQPLPGSNMIHGTLQEADSLDKLYALCGQHCPILTVIIQPMNEEDRGFAYRKESDIENFLGFYLWMKIHPYLLQTDKNVFREENNKASMRQNLIDNAIGDIFDQFYFSNTFDLMGKRRKQKRINFLGLEEEGNLKKFQPDLKERFCMNFLHTSLLVVGNVDSNTQDLSGQTNEIFKAVDENNNLLNNRFQGSRTNLNQVVRENINCHYFFEMLGQACLLDICQVETSLNISNRNILELCMFEGENLFIWEEEDILNLTDLESSREQEDL

SEQ ID NO: 163351 - DNA, 6471 bp, Artificial Sequence
  derived and/or modified sequence
atgagcgacacccccagcaccggcttcagcatcatccaccccaccagcagcgagggccaggtgcccccccccagacacctgagcctgacccaccccgtggtggccaagagaatcagcttctacaagagcggcgacccccagttcggcggcgtgagagtggtggtgaaccccagaagcttcaagagcttcgacgccctgctggacaacctgagcagaaaggtgcccctgcccttcggcgtgagaaacatcagcacccccagaggcagacacagcatcaccagactggaggagctggaggacggcgagagctacctgtgcagccacggcagaaaggtgcagcccgtggacctggacaaggccagaagaagacccagaccctggctgagcagcagagccatcagcgcccacagccccccccaccccgtggccgtggccgcccccggcatgcccagaccccccagaagcctggtggtgttcagaaacggcgaccccaagaccagaagagccgtgctgctgagcagaagagtgacccagagcttcgaggccttcctgcagcacctgaccgaggtgatgcagagacccgtggtgaagctgtacgccaccgacggcagaagagtgcccagcctgcaggccgtgatcctgagcagcggcgccgtggtggccgccggcagagagcccttcaagcccggcaactacgacatccagaagtacctgctgcccgccagactgcccggcatcagccagagagtgtaccccaagggcaacgccaagagcgagagcagaaagatcagcacccacatgagcagcagcagcagaagccagatctacagcgtgagcagcgagaagacccacaacaacgactgctacctggactacagcttcgtgcccgagaagtacctggccctggagaagaacgacagccagaacctgcccatctaccccagcgaggacgacatcgagaagagcatcatcttcaaccaggacggcaccatgaccgtggagatgaaggtgagattcagaatcaaggaggaggagaccatcaagtggaccaccaccgtgagcaagaccggccccagcaacaacgacgagaagagcgagatgagcttccccggcagaaccgagagcagaagcagcggcctgaagctggccgcctgcagcttcagcgccgacgtgagccccatggagagaagcagcaaccaggagggcagcctggccgaggagatcaacatccagatgaccgaccaggtggccgagacctgcagcagcgccagctgggagaacgccaccgtggacaccgacatcatccagggcacccaggaccaggccaagcacagattctacagaccccccacccccggcctgagaagagtgagacagaagaagagcgtgatcggcagcgtgaccctggtgagcgagaccgaggtgcaggagaagatgatcggccagttcagctacagcgaggagagagagagcggcgagaacaagagcgagtaccacatgttcacccacagctgcagcaagatgagcagcgtgagcaacaagcccgtgctggtgcagatcaacaacaacgaccagatggaggagagcagcctggagagaaagaaggagaacagcctgctgaagagcagcgccatcagcgccggcgtgatcgagatcaccagccagaagatgctggagatgagccacaacaacggcctgcccagcaccatcagcaacaacagcatcgtggaggaggacgtggtggactgcgtggtgctggacaacaagaccggcatcaagaacttcaagacctacggcaacaccaacgacagattcagccccatcagcgccgacgccacccacttcagcagcaacaacagcggcaccgacaagaacatcagcgaggcccccgccagcgaggccagcagcaccgtgaccgccagaatcgacagactgatcaacgagttcgcccagtgcggcctgaccaagctgcccaagaacgagaagaagatcctgagcagcgtggccagcaagaagaagaagaagagcagacagcaggccatcaacagcagataccaggacggccagctggccaccaagggcatcctgaacaagaacgagagaatcaacaccaagggcagaatcaccaaggagatgatcgtgcaggacagcgacagccccctgaagggcggcatcctgtgcgaggaggacctgcagaagagcgacaccgtgatcgagagcaacaccttctgcagcaagagcaacctgaacagcaccatcagcaagaacttccacagaaacaagctgaacaccacccagaacagcaaggtgcagggcctgctgaccaagagaaagagcagaagcctgaacaagatcagcctgggcgcccccaagaagagagagatcggccagagagacaaggtgttcccccacaacgagagcaagtactgcaagagcaccttcgagaacaagagcctgttccacgtgttcaacatcctggagcagaagcccaaggacttctacgccccccagagccaggccgaggtggccagcggctacctgagaggcatggccaagaagagcctggtgagcaaggtgaccgacagccacatcaccctgaagagccagaagaagagaaagggcgacaaggtgaaggccagcgccatcctgagcaagcagcacgccaccaccagagccaacagcctggccagcctgaagaagcccgacttccccgaggccatcgcccaccacagcatccagaactacatccagagctggctgcagaacatcaacccctaccccaccctgaagcccatcaagagcgcccccgtgtgcagaaacgagaccagcgtggtgaactgcagcaacaacagcttcagcggcaacgacccccacaccaacagcggcaagatcagcaacttcgtgatggagagcaacaagcacatcaccaagatcgccggcctgaccggcgacaacctgtgcaaggagggcgacaagagcttcatcgccaacgacaccggcgaggaggacctgcacgagacccaggtgggcagcctgaacgacgcctacctggtgcccctgcacgagcactgcaccctgagccagagcgccatcaacgaccacaacaccaagagccacatcgccgccgagaagagcggccccgagaagaagctggtgtaccaggagatcaacctggccagaaagagacagagcgtggaggccgccatccaggtggaccccatcgaggaggagacccccaaggacctgctgcccgtgctgatgctgcaccagctgcaggccagcgtgcccggcatccacaagacccagaacggcgtggtgcagatgcccggcagcctggccggcgtgcccttccacagcgccatctgcaacagcagcaccaacctgctgctggcctggctgctggtgctgaacctgaagggcagcatgaacagcttctgccaggtggacgcccacaaggccaccaacaagagcagcgagaccctggccctgctggagatcctgaagcacatcgccatcaccgaggaggccgacgacctgaaggccgccgtggccaacctggtggagagcaccaccagccacttcggcctgagcgagaaggagcaggacatggtgcccatcgacctgagcgccaactgcagcaccgtgaacatccagagcgtgcccaagtgcagcgagaacgagagaacccagggcatcagcagcctggacggcggctgcagcgccagcgaggcctgcgcccccgaggtgtgcgtgctggaggtgacctgcagcccctgcgagatgtgcaccgtgaacaaggcctacagccccaaggagacctgcaaccccagcgacaccttcttccccagcgacggctacggcgtggaccagaccagcatgaacaaggcctgcttcctgggcgaggtgtgcagcctgaccgacaccgtgttcagcgacaaggcctgcgcccagaaggagaaccacacctacgagggcgcctgccccatcgacgagacctacgtgcccgtgaacgtgtgcaacaccatcgacttcctgaacagcaaggagaacacctacaccgacaacctggacagcaccgaggagctggagagaggcgacgacatccagaaggacctgaacatcctgaccgaccccgagtacaagaacggcttcaacaccctggtgagccaccagaacgtgagcaacctgagcagctgcggcctgtgcctgagcgagaaggaggccgagctggacaagaagcacagcagcctggacgacttcgagaactgcagcctgagaaagttccaggacgagaacgcctacaccagcttcgacatggaggagcccagaaccagcgaggagcccggcagcatcaccaacagcatgaccagcagcgagagaaacatcagcgagctggagagcttcgaggagctggagaaccacgacaccgacatcttcaacaccgtggtgaacggcggcgagcaggccaccgaggagctgatccaggaggaggtggaggccagcaagaccctggagctgatcgacatcagcagcaagaacatcatggaggagaagagaatgaacggcatcatctacgagatcatcagcaagagactggccaccccccccagcctggacttctgctacgacagcaagcagaacagcgagaaggagaccaacgagggcgagaccaagatggtgaagatgatggtgaagaccatggagaccggcagctacagcgagagcagccccgacctgaagaagtgcatcaagagccccgtgaccagcgactggagcgactacagacccgacagcgacagcgagcagccctacaagaccagcagcgacgaccccaacgacagcggcgagctgacccaggagaaggagtacaacatcggcttcgtgaagagagccatcgagaagctgtacggcaaggccgacatcatcaagcccagcttcttccccggcagcaccagaaagagccaggtgtgcccctacaacagcgtggagttccagtgcagcagaaaggccagcctgtacgacagcgagggccagagcttcggcagcagcgagcaggtgagcagcagcagcagcatgctgcaggagttccaggaggagagacaggacaagtgcgacgtgagcgccgtgagagacaactactgcagaggcgacatcgtggagcccggcaccaagcagaacgacgacagcagaatcctgaccgacatcgaggagggcgtgctgatcgacaagggcaagtggctgctgaaggagaaccacctgctgagaatgagcagcgagaaccccggcatgtgcggcaacgccgacaccaccagcgtggacaccctgctggacaacaacagcagcgaggtgccctacagccacttcggcaacctggcccccggccccaccatggacgagctgagcagcagcgagctggaggagctgacccagcccctggagctgaagtgcaactacttcaacatgccccacggcagcgacagcgagcccttccacgaggacctgctggacgtgagaaacgagacctgcgccaaggagagaatcgccaaccaccacaccgaggagaagggcagccaccagagcgagagagtgtgcaccagcgtgacccacagcttcatcagcgccggcaacaaggtgtaccccgtgagcgacgacgccatcaagaaccagcccctgcccggcagcaacatgatccacggcaccctgcaggaggccgacagcctggacaagctgtacgccctgtgcggccagcactgccccatcctgaccgtgatcatccagcccatgaacgaggaggacagaggcttcgcctacagaaaggagagcgacatcgagaacttcctgggcttctacctgtggatgaagatccacccctacctgctgcagaccgacaagaacgtgttcagagaggagaacaacaaggccagcatgagacagaacctgatcgacaacgccatcggcgacatcttcgaccagttctacttcagcaacaccttcgacctgatgggcaagagaagaaagcagaagagaatcaacttcctgggcctggaggaggagggcaacctgaagaagttccagcccgacctgaaggagagattctgcatgaacttcctgcacaccagcctgctggtggtgggcaacgtggacagcaacacccaggacctgagcggccagaccaacgagatcttcaaggccgtggacgagaacaacaacctgctgaacaacagattccagggcagcagaaccaacctgaaccaggtggtgagagagaacatcaactgccactacttcttcgagatgctgggccaggcctgcctgctggacatctgccaggtggagaccagcctgaacatcagcaacagaaacatcctggagctgtgcatgttcgagggcgagaacctgttcatctgggaggaggaggacatcctgaacctgaccgacctggagagcagcagagagcaggaggacctgtag

SEQ ID NO: 163352 - DNA, 6471 bp, Artificial Sequence
  derived and/or modified sequence
atgagcgacacacccagcactgggttctctattatacaccctacctcatcagagggccaggtgcctccaccgcgccatctctcccttacccaccctgttgtggcgaagaggatctctttttacaagtcaggcgacccccagttcggcggcgtccgagttgtggtgaacccccggtctttcaaaagtttcgacgccctgctggacaacctgagcagaaaagtcccactgccctttggagttagaaacatctctactcctagagggcgtcactccattacgagactggaagaactcgaggatggtgagagttacctgtgttcccacggacgcaaagttcagcctgtcgatctcgacaaagctcgcagacgcccaagaccctggctgtcaagtagggccatatctgcgcactccccaccccaccccgtggccgtcgccgccccaggcatgcctaggccgccaaggtccctcgtagtgtttcggaacggcgaccccaagacaaggagagccgtcctgttgtctagacgggtcacccaatcatttgaagcattccttcaacatcttaccgaagtgatgcagcgcccggttgtcaaactctatgcgactgatggtaggcgagtgccttccttgcaggccgtgatcctgtccagtggagcggtcgtcgcggcaggtcgcgaaccatttaagccaggcaactacgacatccagaagtacctcttgcccgcaaggctgcccggcatctcccagagggtttaccctaaggggaacgccaaaagtgaatccagaaagatcagtacccacatgtcctcgagctccaggagtcagatatattctgtgtccagtgagaaaacgcacaataatgactgctatctcgactactccttcgtgccagaaaaatatttggccttggaaaaaaacgattctcagaacctgcctatatatcctagcgaagacgacatcgaaaaatccatcattttcaaccaggacggaactatgactgtggagatgaaagtcagatttaggattaaagaggaggagacgattaagtggaccacgactgtgtcaaagacagggccctctaacaacgatgagaaaagcgagatgtcattccccggcaggaccgagagcaggtcaagtggacttaaacttgcagcctgttcatttagcgcggatgtgtcaccaatggagcggtcttcgaatcaggaaggatcgttggcagaggagattaacattcagatgactgaccaggtggctgagacatgttccagcgcttcctgggaaaatgcaacagtcgacactgatatcatccaaggcacccaggaccaagccaaacaccgattttatcggccccccaccccaggccttcgtagggtccgccaaaagaaatcggttatcggttctgtcaccctggtgtcagaaacagaggtgcaggagaaaatgattggccagttttcctacagcgaagagagggaatcaggtgagaataaatcagagtaccatatgtttacccacagctgttctaagatgagctccgtgagcaacaagccagtgctggtgcagattaataataacgaccaaatggaagaatcctccctcgaacggaagaaggagaacagtttgctcaaatcttcggcgatatccgccggggtcattgagattacttcacagaaaatgctggagatgtcacataataacggattgccaagcacaataagtaacaacagtatcgtggaagaggatgtcgtggactgtgtcgttctcgacaacaagaccggcatcaagaatttcaagacatatggcaacactaacgacagattcagccctattagtgcagacgctacccacttctcatccaataatagcggtaccgacaaaaatatcagcgaggccccagcctccgaagcctcttcaacagtgacagctcggattgataggttaatcaatgaattcgcccaatgtgggttaactaaactacccaagaacgagaagaagatactaagcagcgtcgcaagtaagaaaaagaagaagtcccgccagcaggcgatcaacagccgctatcaggacggtcagctcgcgacaaaggggatcctgaataagaacgagcggatcaatactaagggtcgcatcaccaaggagatgatagtccaggactcagactcccctctgaaaggaggcattctgtgcgaagaagacctgcagaagtccgacacggtcatcgagtcaaatacgttttgctctaagagtaatctgaatagcacaatctccaaaaacttccatcgtaataagttgaacacgacccaaaattcaaaggtgcagggtcttctaactaagcgtaagagtaggagtcttaacaaaatcagtctgggggcccccaagaagcgagagatcggtcaacgcgacaaggtttttcctcacaatgaatctaaatattgcaaatcaaccttcgagaataaatcactgtttcacgtcttcaatatactggagcagaagcccaaggatttttacgcccctcagtcgcaagccgaggtggcttctggctatctaagaggaatggctaagaagtctctggttagcaaagtgacagacagccatatcacactcaagagccaaaagaaaagaaagggtgacaaagttaaggcctctgcaatcttgtcgaaacagcatgccacgactagggccaattccctcgcctctctcaagaagccggactttcctgaggccatcgcccatcattctattcaaaattacatccagagctggctacagaatattaacccataccccacgcttaagccgataaagagtgccccagtatgtaggaacgaaacctctgttgtgaattgctccaacaattctttctcaggaaacgacccacatacaaacagcgggaagattagcaatttcgttatggagtctaacaagcacattactaaaattgcgggcctgacgggtgacaatttgtgcaaagaaggcgacaagtctttcatcgctaatgacactggtgaggaggatttacacgagactcaagtgggctcattgaacgacgcctacctggtgccactgcacgagcattgcaccctgagccagagcgctatcaatgaccacaacaccaagagtcacatagcagctgaaaaatctggtcctgaaaagaaactcgtgtatcaggagatcaacctagcgcggaagaggcaaagtgtggaagctgctattcaggtggaccctatcgaggaagaaacacctaaggacctgctcccagtacttatgctgcaccaacttcaggccagtgttcccggcatccataaaactcagaacggagttgtgcagatgcccggctcactggccggggttccctttcactccgccatttgcaattcctcgaccaatctgctgctggcctggttactagtgctgaatctgaaaggatctatgaattcattttgtcaggtggatgcgcacaaggccacgaacaagagttctgagacccttgcactcctagaaattctgaagcatatcgccatcactgaggaagcagacgatctgaaggcggccgtggcaaacctagttgagtctaccacgtcccacttcgggctgtcagaaaaggaacaagacatggtccccattgatctttctgccaactgtagcaccgttaacatccagtccgtccctaagtgctctgaaaacgagagaactcagggaatctcttcacttgacggtggatgttcggcatccgaggcctgtgctccagaggtctgcgtcctggaagtgacatgttcaccttgtgagatgtgcactgtaaacaaagcctattctccgaaggagacatgcaacccttctgacactttttttccctccgatggttacggcgtagatcaaaccagcatgaataaagcttgcttcctgggcgaggtttgctctctcaccgacactgtcttttccgacaaagcttgtgcccagaaagaaaaccacacatatgagggtgcgtgtcccattgatgagacttacgtgcctgtcaacgtctgcaacactattgactttctcaactcgaaggaaaacacctacacagataacttggacagcacggaggagttagagcgcggcgatgacattcaaaaggacctgaatatactgactgaccctgaatataaaaatggattcaatacgcttgtctctcaccagaatgtctccaacctaagcagctgcggcctctgtctgtcagaaaaggaagccgagctcgataaaaaacattcatccctggatgactttgagaactgttcgctccgcaagttccaggacgagaacgcctacacgagttttgatatggaagagccgcgcacttctgaagaacctggcagcatcactaacagcatgacctcctccgagaggaacatcagtgagctggagtccttcgaagaattggaaaatcacgatacagacatattcaacacagtagtcaacggcggggaacaggccacagaggagttgattcaggaggaagtcgaagcttccaagaccctggaactgatagatatcagctcgaagaacatcatggaagagaagcgaatgaacggcatcatatacgagatcatttcaaagcgattagctactcccccctccttagacttctgttacgatagtaaacagaattctgagaaagaaactaacgagggcgaaaccaagatggtgaagatgatggtcaaaacaatggaaactgggtcctacagcgaatcgtcgccagatctgaagaagtgtattaagtcaccggttacttctgactggtctgactaccggcccgactcagattccgaacagccatacaagacttcctctgatgatccaaatgactcaggagaactgacacaggaaaaagagtataacatcggcttcgtgaaacgggcaatagaaaagctgtacgggaaggcggatattattaaaccatctttttttccaggttcgacccgaaagtcccaggtgtgcccttacaattcagtcgaattccagtgcagtagaaaagcgtcgctatatgacagcgagggccagtcattcggatcttccgaacaggtgtccagttcctcaagtatgctacaggagtttcaggaagagaggcaggacaaatgtgacgtgtccgctgtccgagacaactactgccgcggcgatatcgtggagcccggaactaaacagaacgacgattctcgaattctgaccgatatcgaggaaggtgtcctgatcgataaagggaagtggcttctcaaggagaatcatttactgagaatgtcgtccgagaaccccggcatgtgtggaaatgccgatactacatcagtggacactttgctggataacaattcatcggaggtgccctactcacactttggtaatcttgcaccaggccccacgatggacgagctaagcagctccgaacttgaggagctcacccagcccctggaactgaagtgtaactattttaatatgccacatggctcggacagcgaacctttccatgaggacctgcttgatgtgcgcaacgagacatgcgcgaaggaaaggattgcaaaccaccacactgaggagaaaggctctcatcagagtgaacgcgtctgcacctcggtgacacattctttcatctcggctgggaataaggtctatcctgtgtcagacgatgccattaaaaatcagccgctgccaggctccaacatgattcatggtaccctgcaggaggcggacagtcttgacaaactctatgcactctgcgggcagcactgccctatcctgaccgtcatcatccagccaatgaatgaggaggatcgaggattcgcctaccggaaggagtccgatatcgagaactttttaggcttttatttatggatgaaaatccatccatacctcctacagacggataagaacgtgtttagagaggagaacaacaaggcttcaatgaggcagaaccttatcgacaacgctattggggatatctttgatcagttctatttctcgaacactttcgatctgatgggaaaaaggcggaagcagaaacgaatcaacttcctaggcttggaagaggaagggaatttaaagaaattccagcctgacctgaaggagcgcttctgtatgaacttccttcacaccagcctactcgtcgtaggaaatgtggacagcaatacacaagacctgtcggggcagaccaacgaaattttcaaggccgtggacgaaaataacaatctattaaacaaccgattccagggcagccgtaccaaccttaaccaggtggtgcgggaaaatattaactgccactactttttcgagatgttaggccaagcctgtctcttggatatctgtcaagtagagacgagtctgaacatttccaaccgcaatatcctagaactctgtatgttcgagggcgaaaacttgtttatttgggaggaagaggatatcctgaaccttacggatctcgaaagcagcagggaacaggaagacttgtag

SEQ ID NO: 163353 - DNA, 6471 bp, Artificial Sequence
  derived and/or modified sequence
atgtctgacacccccagcacaggcttcagcatcatccaccccaccagcagcgagggccaggtgcccccacccaggcacctgagcctgacccaccctgtggtggccaagaggatctccttctacaagagcggggacccccagtttggaggagtgcgggtggtggtgaaccccaggagcttcaagagctttgatgccctgctggacaacctgagcaggaaggtgcccctgcccttcggcgtgaggaacatcagcaccccccggggccgccacagcatcacccggctggaggagctggaggatggagagagctacctgtgcagccacggcaggaaggtgcagcctgtggacctggacaaggcccggcggcggccccggccctggctgagcagccgggccatcagcgcccacagccccccccaccctgtggccgtggccgcccctggcatgccccggccccccaggagcctggtggtgttcagaaatggagaccccaagaccaggagagctgtgctgctgagccggcgggtgacccagagctttgaggccttcctgcagcacctgacagaggtgatgcagaggcctgtggtgaagctgtatgccacagatggccggcgggtgcccagcctgcaggccgtcatcctgagcagcggggctgtggtggccgccggccgggagcccttcaagccaggcaactatgacatccagaagtacctgctgcctgcccggctgcccggcatcagccagagggtgtaccccaagggaaatgccaagtctgagagcaggaagatcagcacccacatgagcagcagcagccgcagccagatctacagcgtgagcagcgagaagacccacaacaatgactgctacctggactacagctttgtgcctgagaagtacctggccctggagaagaatgacagccagaacctgcccatctaccccagtgaagatgacatcgagaagagcatcatcttcaaccaggacggcaccatgacagtggagatgaaggtgcgcttccgcatcaaggaggaggagaccatcaagtggaccaccaccgtgtccaagacaggccccagcaacaatgatgagaagtctgagatgtccttccctggccgcacagagagccgcagcagcggcctgaagctggccgcctgcagcttcagcgcagatgtgagccccatggagaggagcagcaaccaggagggcagcctggccgaggagatcaacatccagatgacagaccaggtggccgagacctgcagcagcgcctcctgggagaatgccaccgtggacacagacatcatccagggcacccaggaccaggccaagcaccgcttctacagaccacccaccccaggcctgcggcgggtgcggcagaagaagagcgtcatcggctctgtgaccctggtgtctgaaacagaggtgcaggagaagatgattggccagttctcctacagcgaggagcgggagagcggggagaacaagtctgagtaccacatgttcacccacagctgcagcaagatgagctctgtgagcaacaagcctgtgctggtgcagatcaacaacaatgaccagatggaggagagcagcctggagaggaagaaggagaacagcctgctgaagagcagcgccatctctgctggggtcatcgagatcaccagccagaagatgctggagatgagccacaacaacggcctgcccagcaccatcagcaacaacagcatcgtggaggaggatgtggtggactgtgtggtgctggacaacaagacaggcatcaagaacttcaagacctacggcaacaccaatgaccgcttcagccccatctctgcagatgccacccacttcagcagcaacaacagcggcacagacaagaacatcagcgaggccccagccagcgaggccagcagcacagtgacagccagaattgacaggctcatcaatgaatttgcccagtgtggcctgaccaagctgcccaagaatgagaagaagatcctgagctctgtggccagcaagaagaagaagaagagccggcagcaggccatcaacagccgctaccaggacggccagctggccaccaagggcatcctgaacaagaatgaaagaatcaacaccaagggccgcatcaccaaggagatgattgtgcaggacagcgacagccccctgaagggcggcatcctgtgtgaggaggacctgcagaagagtgacaccgtcatcgagagcaacaccttctgcagcaagagcaacctgaacagcaccatcagcaagaacttccacaggaacaagctgaacaccacccagaacagcaaggtgcagggcctgctgaccaagaggaagagccgcagcctgaacaagatcagcctgggcgcccccaagaagcgggagatcggccagagggacaaggtgttcccccacaatgaaagcaagtactgcaagagcacctttgagaacaagagcctcttccacgtgttcaacatcctggagcagaagcccaaggacttctacgccccccagagccaggccgaggtggccagcggctacctgcggggcatggccaagaagagcctggtgtccaaggtgacagacagccacatcaccctgaagagccagaagaagaggaaaggagacaaggtgaaggccagcgccatcctgagcaagcagcacgccaccacccgggccaacagcctggccagcctgaagaagccagacttccctgaggccatcgcccaccacagcatccagaactacatccagagctggctgcagaacatcaacccctaccccaccctgaagcccatcaagagcgcccctgtgtgcagaaatgagacctctgtggtgaactgcagcaacaacagcttctctggaaatgacccccacaccaacagcggcaagatcagcaactttgtgatggagagcaacaagcacatcaccaagattgctggcctgaccggggacaacctgtgcaaggagggggacaagagcttcatcgccaatgacacaggagaggaggacctgcacgagacccaggtgggcagcctgaatgatgcctacctggtgcccctgcacgagcactgcaccctgagccagagcgccatcaatgaccacaacaccaagagccacatcgctgctgagaagagcggccctgagaagaagctggtgtaccaggagatcaacctggccaggaagaggcagagcgtggaggccgccatccaggtggaccccatcgaggaggagacccccaaggacctgctgcctgtgctgatgctgcaccagctgcaggcctctgtgcccggcatccacaagacccagaatggagtggtgcagatgcctggcagcctggccggcgtgcccttccacagcgccatctgcaacagcagcaccaacctgctgctggcctggctgctggtgctgaacctgaagggctccatgaacagcttctgccaggtggatgcccacaaggccaccaacaagagcagcgagaccctggccctgctggagatcctgaagcacatcgccatcacagaggaggctgatgacctgaaggctgctgtggccaacctggtggagagcaccaccagccacttcggcctgtctgagaaggagcaggacatggtgcccatcgacctgagcgccaactgcagcacagtgaacatccagagcgtgcccaagtgcagtgaaaatgaaagaacccagggcatcagcagcctggatggcggctgcagcgccagcgaggcctgtgcccctgaggtgtgtgtgctggaggtgacctgcagcccctgtgagatgtgcaccgtgaacaaggcctacagccccaaggagacctgcaaccccagcgacaccttcttccccagtgatggctacggcgtggaccagacctccatgaacaaggcctgcttcctgggggaggtgtgcagcctgacagacaccgtcttcagtgacaaggcctgtgcccagaaggagaaccacacctatgaaggagcctgccccattgatgagacctacgtgcctgtgaatgtgtgcaacaccatcgacttcctgaacagcaaagaaaacacctacacagacaacctggacagcacagaggagctggagagaggagatgacatccagaaggacctgaacatcctgacagatcctgagtacaagaatggcttcaacaccctggtgagccaccagaatgtgagcaacctgagcagctgtggcctgtgcctgtctgagaaggaggccgagctggacaagaagcacagcagcctggatgactttgagaactgcagcctgaggaagttccaggatgaaaatgcctacaccagctttgacatggaggagcccaggaccagcgaggagcccggcagcatcaccaacagcatgaccagcagcgagaggaacatcagcgagctggagagctttgaggagctggagaaccacgacacagacatcttcaacacagtggtgaatggaggagagcaggccacagaggagctgatccaggaggaggtggaggccagcaagaccctggagctgattgacatcagcagcaagaacatcatggaggagaagaggatgaatggcatcatctatgagatcatcagcaagaggctggccaccccacccagcctggacttctgctatgacagcaagcagaacagcgagaaggagaccaatgaaggagagaccaagatggtgaagatgatggtgaagaccatggagaccggcagctacagcgagagcagcccagacctgaagaagtgcatcaagagccctgtgaccagtgactggagcgactacagaccagacagcgacagcgagcagccctacaagaccagcagtgatgaccccaatgacagcggggagctgacccaggagaaggagtacaacattggatttgtgaagagggccatcgagaagctgtatggcaaggctgacatcatcaagcccagcttcttccctggcagcaccaggaagagccaggtgtgcccctacaacagcgtggagttccagtgcagcaggaaggccagcctgtatgattctgagggccagagctttggcagcagcgagcaggtgagcagcagcagctccatgctgcaggagttccaggaggagcggcaggacaagtgtgatgtgtctgctgtgcgggacaactactgccgcggggacatcgtggagcccggcaccaagcagaatgatgacagccgcatcctgacagacatcgaggagggcgtgctgattgacaagggcaagtggctgctgaaggagaaccacctgctgaggatgagcagtgaaaatcctggcatgtgtggaaatgctgacaccacctctgtggacaccctgctggacaacaacagcagcgaggtgccctacagccacttcggcaacctggcccctggccccaccatggatgagctgagcagcagcgagctggaggagctgacccagcccctggagctgaagtgcaactacttcaacatgcctcatggcagtgacagcgagcccttccacgaggacctgctggatgtgagaaatgagacctgtgccaaggagagaattgccaaccaccacacagaggagaagggcagccaccagagcgagcgggtgtgcacctctgtgacccacagcttcatctctgctggcaacaaggtgtaccctgtgtctgatgatgccatcaagaaccagcccctgcccggcagcaacatgatccacggcaccctgcaggaggccgacagcctggacaagctgtatgccctgtgtggccagcactgccccatcctgaccgtcatcatccagcccatgaatgaagaagatcggggctttgcctacaggaaggagagtgacatcgagaacttcctgggcttctacctgtggatgaagatccacccctacctgctgcagacagacaagaatgtgttccgggaggagaacaacaaggcctccatgaggcagaacctgattgacaatgccatcggggacatctttgaccagttctacttcagcaacacctttgacctgatgggcaagaggaggaagcagaagaggatcaacttcctgggcctggaggaggagggcaacctgaagaagttccagcctgacctgaaggagcgcttctgcatgaacttcctgcacaccagcctgctggtggtgggcaatgtggacagcaacacccaggacctgagcggccagaccaatgagatcttcaaggctgtggatgagaacaacaacctgctgaacaaccgcttccagggcagcaggaccaacctgaaccaggtggtgcgggagaacatcaactgccactacttctttgagatgctgggccaggcctgcctgctggacatctgccaggtggagaccagcctgaacatcagcaacagaaacatcctggagctgtgcatgtttgaaggagaaaatctcttcatctgggaggaggaggacatcctgaacctgacagacctggagagcagccgggagcaggaggacctgtag

SEQ ID NO: 163354 - DNA, 6471 bp, Artificial Sequence
  derived and/or modified sequence
atgagcgacacccccagcaccggcttcagcatcatccaccccacctcatcagaggggcaggtacctccaccgcgccatttgtcactgactcacccagtagttgcaaaacgcatttccttctacaagagcggggatccccagttcgggggggtccgcgtcgtggtgaaccccagatccttcaagtcatttgatgcccttctagataacctgtcccgaaaggttcccctgcccttcggcgtgcgaaatataagcacccctcgaggtaggcactccattactcgcctggaggaactggaagacggggaatcctacctctgttcccacggacgtaaggtccagcccgtcgatctggacaaagctcgacggcgtccaaggccatggctctctagtagggcaatcagcgcacattcaccaccacaccccgtggctgtggccgcacctggcatgcccaggccacccaggtctctggtcgtctttaggaatggggacccaaaaacccgtcgtgcagttctgctgtcccggcgggtgacccagagcttcgaagcatttctccaacacctgaccgaagttatgcagaggcctgtcgttaagctctacgcaactgacggcagaagggtaccctctctgcaggccgtgattctcagcagcggcgccgttgtggccgccggacgggaaccattcaaacccggaaactatgacatccagaagtacttgctccctgctcgcttgccagggataagtcaacgcgtgtatccgaaagggaatgctaaatcagagtctagaaaaatctcaactcatatgtctagtagcagccggtctcagatttactccgttagttcagagaagacccacaacaacgactgctacctggattactcatttgttccggaaaagtatctggccctggagaagaacgattcgcagaacttacccatttacccttcggaagacgacattgaaaagagtatcatattcaatcaggacggaacgatgacggtcgagatgaaagtcagatttaggatcaaggaagaggagaccattaagtggaccaccaccgtgtctaaaaccggacccagtaataacgacgaaaaaagcgagatgtccttcccaggtcggacggaaagtagatcctccggcttgaagctggcagcttgcagtttttctgccgacgtatcccccatggagcggtcatctaatcaggagggcagtctggcagaagaaatcaacattcaaatgactgaccaggttgcagaaacctgcagctccgcctcatgggagaacgctactgtcgatactgacatcattcagggaacccaggaccaggcaaaacatagattctatagaccgcctacaccaggccttagacgagtgaggcagaaaaaatcagtgatcggctcagtgacactcgtgtcagaaaccgaagtacaggagaagatgattgggcagttttcttacagtgaagagagagagtctggggaaaataaatccgagtatcacatgtttacacactcgtgctccaaaatgtccagcgtgtcgaacaagcccgttcttgtccaaatcaacaataatgatcagatggaagaatcctcgctggagagaaaaaaagaaaattccttactgaagtccagcgccatcagtgctggggtgatcgagataacgtcccaaaaaatgctggaaatgtcccacaacaacggattgccaagcactatcagcaacaattctatcgttgaggaagacgtggttgactgtgttgtgctggataataaaactggaataaagaatttcaagacttacggcaatacaaatgaccggttttctcctatatcagcagatgctacccatttctcttcaaacaattccggcactgataagaacatcagtgaagcacctgcctctgaggcttcatcgaccgtgacggcgcggatagaccggctgatcaacgagtttgcacagtgcggcctaacaaaactgccaaaaaatgagaagaagattttgtcaagcgtggcctcaaagaaaaagaagaagtctcgacagcaagctattaatagccgataccaggatggccagctggcaacaaaggggatcctgaataagaatgaaaggataaatacaaagggtaggatcaccaaggagatgatcgtccaagactcagattcccccttaaaaggggggattctctgtgaggaggacctgcagaaaagtgacacagtgatcgaatctaacaccttctgctcgaagtcaaacctgaactctaccatttccaagaattttcatcgaaacaaactgaacacaacccagaattctaaagtccaaggcctgctgacaaagaggaaaagtcgaagcctgaacaagatttccctgggagccccaaagaagagggagattggtcaacgggacaaagtcttcccccacaatgagtcaaagtattgtaaaagtaccttcgagaataaatctctttttcacgtgtttaacattctcgaacagaagccgaaggatttctacgctcctcaatcacaggccgaggttgcaagcggctatctgcgcggtatggcgaagaaaagtctcgtgagcaaggtgaccgattctcacattacattgaaatcccaaaagaaacggaaaggcgataaggtgaaggcatccgcgatcctgagcaaacagcacgccacgacacgggccaattcgcttgcaagtctcaagaaaccagatttcccagaggccattgctcaccactctattcaaaattacatacagtcctggctgcaaaatattaacccatacccgacactgaagccgattaagagtgctcctgtgtgtagaaatgagacttcagtggtcaattgttcaaataacagcttcagtggcaacgatccgcacacaaactccgggaaaatttcaaatttcgtgatggaaagcaacaagcacatcactaaaatagccggtctcactggagacaatctgtgcaaggaaggcgataaatctttcattgcaaacgatacaggtgaagaagatttgcacgaaactcaggtggggtccctgaatgatgcttatcttgtgccacttcacgaacattgtacactttcacagtccgcaataaatgaccacaataccaaatctcacattgccgctgagaagtcaggcccagaaaagaaactcgtttaccaggaaatcaatttggcgcgaaaacgccagtccgtagaggcagccattcaggttgaccccatcgaggaggaaacccctaaagatctgctccctgtgcttatgctgcaccagctccaggcatccgttcccggaatccataagacccagaatggggtagtacaaatgcctggctccctggccggagtacccttccactccgcgatctgcaacagttccaccaatctactgctcgcctggctcctagtgctcaaccttaaaggatctatgaattctttctgtcaggtcgatgcccataaggctaccaacaaaagcagtgaaaccttagccctcctggaaattctcaaacacatcgccattacagaggaggctgacgacctcaaagccgcagtggccaacctggtggagagcacaacatctcattttggcctaagcgaaaaagagcaagatatggtgcctatcgacctgtcagccaactgttccaccgttaatatccaatcagttcccaagtgtagtgaaaatgaaaggacgcaggggatctcttcattggatggtggatgcagcgcaagtgaggcttgcgccccagaagtgtgcgtattggaggtgacatgttctccctgtgagatgtgcaccgtgaacaaagcctactcccccaaagaaacctgtaacccttcggacactttttttccatccgatgggtatggcgtggatcagacctccatgaacaaggcctgctttctgggggaagtttgttctctgactgatacggtcttctccgacaaggcctgcgctcaaaaggaaaatcatacatacgagggcgcgtgtccaatcgatgaaacctacgtcccagtcaatgtctgcaacactatcgactttctgaatagcaaagaaaatacatataccgacaacctcgacagcactgaagagctggaaaggggggacgacatccagaaagatctgaacatcctgaccgaccccgagtacaaaaatgggttcaacactctcgtctcccaccagaacgtgtctaacctcagcagctgcggactgtgcctgtctgagaaggaagcggagctggacaagaaacacagcagcctagatgactttgaaaactgttccctgcgcaaatttcaagacgagaatgcgtacacttcttttgatatggaggagccccgtacctccgaggaaccaggcagcatcacaaactcaatgacaagtagtgagaggaacatttccgaattagaatccttcgaggagctcgagaatcatgacacagatattttcaacactgtcgttaatgggggtgagcaggctacagaggagctgatacaggaagaagtggaagcttccaaaactctggaactcattgacattagttctaaaaacatcatggaagagaagcgtatgaacggaatcatatacgaaatcatcagtaaacggctggctaccccccccagtttggatttttgctatgacagcaaacagaacagcgaaaaggagactaatgaaggcgagaccaagatggtgaagatgatggtgaagactatggagactggatcgtacagtgaatcctcccccgacctgaagaaatgtataaaaagccccgtaacctcggattggtccgattacagaccggatagcgattcagagcagccttacaaaacttcttcagatgatccaaacgacagcggcgagctcacccaggaaaaagagtacaatattgggttcgtgaaacgcgcaatagagaagctttacggaaaagctgacataatcaagccctcattctttcctggcagcacaagaaagtcccaagtgtgcccttacaatagcgttgaattccagtgcagtcggaaagcctccctctacgactctgaaggccagtccttcggctcttccgagcaggtttcctcctctagctctatgctgcaggagtttcaggaggagaggcaggacaaatgtgacgtgtcggcagtgagagacaattattgtcggggagacatagtagaaccaggtactaagcaaaacgatgacagccgcatactgaccgatatcgaggaaggggttctgatagataaggggaaatggttgctgaaggagaaccacctccttcgaatgagtagcgagaacccagggatgtgcggcaatgccgacacaacaagcgtggacacactcctggataataactcctctgaagtgccctattctcattttggtaatttggctcctggcccaacgatggacgagctgtcctccagcgaattggaagagctgacccagccactcgaattaaaatgtaactactttaatatgccccatgggtcggattccgagccttttcacgaagatctgctggatgtgaggaatgaaacatgcgcaaaggagagaatcgccaaccaccacaccgaagagaaggggagtcatcagtccgaaagagtctgtacaagcgtaactcattcattcatctcagccgggaataaggtctaccctgtgtcagacgacgctataaagaatcagccgctccccgggagtaatatgattcacggaaccctgcaagaggccgattctctcgacaagctttacgccttgtgcgggcaacactgccccattctgaccgtgataatccagccaatgaatgaggaggataggggattcgcctatcgcaaagagagcgacattgaaaattttttaggcttctatctctggatgaaaatccacccttaccttctccagacagataagaacgtttttagagaagagaacaacaaggcctccatgcggcaaaacctcatagataatgctataggcgacatcttcgaccagttctatttttccaatacatttgatctcatggggaagcgtcgaaaacagaaaagaataaatttcttgggtctggaagaagaggggaatttaaaaaaatttcagcctgatctcaaggaaaggttttgtatgaactttctgcatacctcgctactggtagtgggaaatgtggactctaatacacaagacctgagcggccagacaaacgaaatctttaaagctgtagatgagaacaataacctcttaaataatcggttccaaggcagtaggaccaatctgaaccaggtcgtacgagagaatattaattgtcactatttttttgagatgctgggacaagcatgccttctggacatttgtcaagttgaaacttcgctgaatatttcaaaccgcaacattctagagctttgcatgtttgaaggtgaaaatctctttatttgggaggaagaggacatcctgaatctgactgatcttgaaagcagtcgcgaacaggaagatctttag

SEQ ID NO: 163355 - DNA, 6471 bp, Artificial Sequence
  derived and/or modified sequence
atgagcgataccccctccaccggtttctccatcatacaccccacaagctctgaggggcaggtgcccccacccagacatttaagcctgactcacccagtggtcgctaaacgcatcagcttctacaagtcaggtgaccctcaattcggcggtgtgagagtggtggtgaatcccagatcattcaaaagctttgacgccttgctggataacctttcacgcaaggtgcccctgccatttggagtcaggaacatttctaccccaagggggagacattcaatcacacgactcgaagaacttgaggatggtgagagttacctttgctctcacggccgaaaggttcagcccgtggacctggacaaggcccgaagacgacctaggccttggctctcctcacgtgctatcagcgctcactcacccccacatcctgtcgctgtggccgcacctgggatgcctcggccacccaggtccctggttgtgttccggaacggcgatcccaaaacacggcgagctgtgctgctctcaaggcgagtaactcagtcctttgaagctttccttcagcatctgacagaggtgatgcagagaccggttgtgaaactttatgccaccgatggaaggcgcgtcccgtcccttcaggcggtgattctgagctccggcgctgtggtagctgctggcagagagcccttcaagcccggtaactacgacatccagaagtacctgctgcctgccagacttccaggcatttctcagcgggtctacccaaagggtaatgcaaagtctgaatccaggaagatttcgacccacatgtcctcctcatctcgctcacaaatttactccgtgagtagcgaaaagacacacaacaatgactgctacctggattattccttcgtacctgagaagtaccttgcattagagaagaatgacagccagaacctcccgatatacccttccgaggacgacatcgaaaagtctatcatttttaatcaggatggcaccatgaccgtggagatgaaagtgagattccgcataaaagaggaggagaccattaagtggactactaccgtgagcaagaccgggccttcgaataacgacgaaaagtcagagatgtcattcccgggacgcactgagtcgcgctccagcggcctaaagctagccgcatgttctttctcagccgatgttagcccaatggagcgcagcagtaatcaggagggctccctagcagaggagatcaatatccaaatgacagaccaggtagccgaaacatgtagcagtgcgagttgggagaatgccaccgtcgacacagatattatacaaggcacgcaggaccaggctaagcacaggttctaccgcccaccaacccctgggctccgtcgcgtgcgccagaagaagtccgtcatcggcagcgtgactctagtatccgagaccgaggtccaggagaagatgattggtcagttctcttactcagaggaacgagagagcggggaaaacaagtcagagtatcacatgtttacgcactcctgctctaagatgtcctctgttagcaacaaacccgttcttgtacagatcaataataacgatcagatggaggagtcatcacttgagagaaaaaaggaaaattccctccttaagtcatcagccatttctgctggggtgattgagattaccagccaaaaaatgttggagatgtctcataacaacggtcttccaagcaccatcagcaacaactccattgttgaagaggatgtagtggattgtgttgtgctggataataagaccggaatcaagaatttcaagacttatggcaacacaaacgaccgtttttctcccatctccgcggatgctacacatttctcgagcaataacagcggtacagataaaaacatcagcgaggcacccgcatcggaggcctcatccacagtgaccgccagaattgacagacttatcaacgagttcgcgcagtgtggactcaccaaactccctaaaaacgagaagaaaatactctcttccgtggcgagtaagaaaaagaagaaaagtcgccagcaagccattaacagtcgttatcaggatggccagcttgccaccaagggcattctcaacaagaatgagcggattaacacgaagggacggattaccaaggaaatgatcgtccaggatagcgatagtccactcaagggcggaatcctttgcgaggaggacctgcagaagagtgacaccgttatcgaatccaacaccttctgttccaagagcaatctgaattccaccatatctaagaatttccacaggaataaattaaatacgacccagaatagtaaggtacaggggctgttgaccaagcgaaaatcccgcagtctaaataagatcagtctcggcgctcccaagaaacgcgagataggccagagagataaagtatttccacacaacgaaagcaagtattgcaagagcaccttcgaaaataagagccttttccacgtatttaatattctcgaacagaaacccaaagatttttacgcccctcagtcccaggccgaggtagcaagcggctacttacgagggatggcaaagaagtccttggtgtcaaaagttaccgatagccacattacactgaagagccagaagaagcgcaagggcgacaaggttaaggccagcgcaattttaagcaagcagcacgccacaactagggccaatagcttggcaagtcttaaaaaaccagacttccccgaggcaattgcccaccacagcatccagaattacatacagagttggctccagaatattaacccctatcctactctgaagcccattaagagcgctccggtctgccggaacgagacatctgtggtcaactgttccaacaactcattttccggcaacgacccccataccaacagcggcaagatctccaattttgttatggaatcaaacaaacacataaccaagatagcgggactgaccggcgacaacctgtgcaaggaaggcgacaagtcttttattgctaacgatactggtgaggaagatttgcacgaaactcaagtcggctctttaaacgacgcctatctcgtcccactgcacgagcattgcacactcagtcaaagcgccattaatgaccataatactaagtcccacattgcggctgagaagagtggcccagagaaaaaactggtctatcaggaaatcaaccttgcgagaaagaggcagagcgtggaggccgcaatacaagtcgatccaattgaagaggaaactcctaaggacctgctgccagtgctgatgctgcaccagctccaggcctctgttcccggaattcacaaaacgcagaacggagtggttcagatgcccggaagcctagcaggggtgcccttccatagtgcaatttgtaactcgagcaccaacttgttactagcctggctgctggtcctgaacctcaaaggtagcatgaatagtttctgccaggtcgatgcacataaggctactaacaagtcgagcgaaaccttggcactgctggaaattcttaaacacatagctattactgaggaggccgacgatctgaaggccgctgtcgcaaatctggtagagtccaccacgagccactttgggctgagcgaaaaggagcaggacatggtgcccatcgacctcagtgcaaactgttcaactgtgaacatccagagcgtccctaagtgcagtgaaaacgagcgtacacaaggtatttccagcttggacggcggatgcagtgcttctgaagcctgcgctcctgaagtatgtgtgctggaggtaacctgcagtccttgtgaaatgtgcaccgtgaataaagcctactcaccgaaggaaacatgtaaccccagcgataccttttttccctcggacggctacggagttgaccagacatcgatgaataaagcttgcttcttgggcgaagtgtgttctctcactgacactgtattttccgacaaagcctgtgcccaaaaggagaatcacacttacgaaggggcttgccctatcgacgagacctatgttccagtcaatgtttgtaacactatcgatttcctgaacagcaaagagaacacatatactgataacttggacagcacagaagagctggaacgcggtgacgatattcagaaggatctcaatatcctaaccgatccagaatataagaacggctttaacacacttgtgagtcaccagaatgtttcaaacctgagctcatgcggcttgtgtttatccgagaaggaagctgagctcgacaagaaacacagtagtctggatgacttcgagaactgctccctgcgtaaatttcaagacgagaatgcttacacgtcatttgacatggaagaaccaagaactagcgaggaaccaggatccatcacgaactcaatgacttcttcagagagaaacatatctgagcttgaatccttcgaggaacttgaaaatcacgatacagacatcttcaacaccgtggtaaatgggggagagcaggcaacagaggaattgattcaggaagaagtggaggctagtaagactctcgaactgatcgacattagcagcaagaacatcatggaggagaaaaggatgaacggaatcatctatgaaattatttcgaaacgcctagctaccccaccctcgttggacttctgttatgatagtaagcaaaactcagagaaggagacaaatgaaggagaaacaaaaatggtcaaaatgatggtgaagaccatggagacgggatcttatagcgaatcttccccggatctgaaaaagtgtatcaaaagtccagttacaagtgactggtctgattacagacctgacagcgacagcgaacaaccttacaagacaagcagcgacgacccaaatgatagcggagaattaactcaagagaaggagtataacattggattcgtcaagcgtgcaattgaaaagctgtacgggaaggcagacatcatcaagcccagcttcttccccggatctacgagaaagagccaagtttgcccttataattctgtggagttccagtgttctagaaaggcctccctctatgactccgaaggacagtctttcggttcaagcgagcaggtcagttccagtagcagcatgctccaggagtttcaggaagagaggcaggacaagtgtgacgttagtgccgtccgggataactactgtaggggcgacatagttgagcctgggaccaaacagaacgatgactccaggatcctgaccgacattgaagaaggggtcctgatcgataaggggaagtggctgctcaaagagaaccatctgttgcggatgtcctccgagaacccagggatgtgcggcaacgcagataccaccagtgtggacacgctcctcgacaacaactctagtgaagtgccttatagccatttcgggaatctggcacccggtcccacaatggacgagttgtcttcttctgagctggaagaactcactcaaccgttggagctgaaatgcaactactttaatatgccacacggttcggactctgagccgttccacgaagatttgctggacgtgaggaatgagacctgtgctaaggagagaattgccaatcaccacaccgaagagaaagggtctcaccaatcagagcgggtgtgcacttctgtgacgcactcatttatctcagcaggcaacaaggtttaccccgtatccgacgacgcaattaagaaccagcctcttccagggagtaacatgattcacggaacgctccaggaggctgattctctagacaagctctatgcgctgtgcgggcagcattgccctatactgactgtcatcatacaaccaatgaacgaggaggatcgaggcttcgcttataggaaagagtctgacattgagaattttctcggattctatctgtggatgaagatacatccctatctcttgcagaccgataaaaatgttttcagggaggagaacaacaaagcaagtatgcggcagaacctaatagataacgccatcggggatattttcgaccagttctacttctctaatacgttcgatcttatgggtaaaaggaggaagcagaaacggatcaactttctcggcctcgaggaagagggaaacctcaagaagttccagccagatttaaaggaacgattttgcatgaattttcttcacacatcacttttggtagtgggaaatgtggatagtaacacccaggacctgtctgggcagacaaacgagatcttcaaagccgtagacgagaacaacaatctgctgaacaaccgctttcaggggagtaggacgaacttgaaccaggtggtacgggagaatataaactgccattatttcttcgagatgctcggccaggcctgcctcctcgacatctgccaagttgaaactagcctgaacatttcaaaccgaaacatcttggaactgtgtatgttcgaaggggagaacctttttatctgggaagaggaagatatcttgaatttgaccgacctcgagagctcaagggagcaggaggacctgtag

SEQ ID NO: 163356 - DNA, 7100 bp, Artificial Sequence
  derived and/or modified sequence
gacatactgagaataaatccaaagacattagtttctttgcacgaaatgaggttacatatccagtgacatttatttgagctatttaaacaacttaaacatctttttcttttcttaataagggacgtttcaagttgtggtctcagccaaaatgagtgataccccttctactggtttttccatcattcatcctacgtcttctgaaggtcaagttccaccccctcgccatttgagcctcactcatcctgttgtggccaagcgaatcagtttctacaagagcggagacccccaattcggcggggtcagggtggtggtcaaccctcgctcctttaagtcctttgatgctctgctggataacttgtccaggaaggtgcccctcccttttggagtgaggaacatcagcacccctcggggcaggcacagcatcacgcgcctggaggagctggaggacggcgagtcctacctatgttcccacggcaggaaggtgcagcctgtagacctggacaaagcccgtcggcgcccgcggccctggctcagcagccgggccattagcgcgcactcaccgccccaccccgtagccgtcgctgctcccggcatgccccgccccccacggagcctagtggtcttcaggaatggcgacccgaagacgaggcgtgcggttcttctgagcaggagggtcacccagagcttcgaggcatttctacagcacctgacagaggtcatgcagcgccctgtggtcaagctgtacgctacggacggaaggagggttcccagcctccaggcagtgatcctgagctctggagctgtggtggcggcaggaagggagccatttaaaccaggaaattatgacatccaaaaatacttgcttcctgctagattaccagggatctctcagcgtgtgtaccccaagggaaatgcaaagtcagaaagcagaaagataagcacacatatgtcttcaagctcaaggtcccagatttattctgtttcttctgagaaaacacataataatgattgctacttagactattcttttgttcctgaaaagtacttggccttagaaaagaatgattctcagaatttaccaatatatccttctgaagatgatattgagaaatcaattatttttaatcaagacggcactatgacagttgagatgaaagttcgattcagaataaaagaggaagaaaccataaaatggacaactactgtcagtaaaactggtccttctaataatgatgaaaagagtgagatgagttttccaggaagaacagaaagtcgatcatctggtttaaagcttgcagcatgttcattctctgcagatgtgtcacctatggagcgaagcagtaatcaagagggcagtttggcagaggagataaacattcaaatgacagatcaagtggctgaaacttgcagttctgctagttgggagaatgctactgtggacacagatatcatccagggaactcaagaccaagcaaagcatcgtttttataggccccctacacctggactaagaagagtgagacaaaagaaatctgtgattggcagtgtgaccttagtatctgaaactgaggttcaagagaaaatgattggacagttttcatatagtgaagaaagggaaagtggggaaaacaagtctgagtatcacatgtttacacattcttgcagtaaaatgtcatcagtatctaacaaaccagtacttgttcagatcaataacaatgatcaaatggaggagtcatcattagaaagaaaaaaggaaaacagtctgcttaagtcaagtgcaataagtgctggtgttatagaaattacaagtcagaagatgttagagatgtcacataataatggtttgccatcaactatatcaaataactcaattgtggaggaagatgtagttgattgtgtggtattggacaacaaaactggtatcaagaacttcaaaacttatggtaacaccaatgataggttcagtcctatttcagcagatgcaacccatttttcaagtaataactctggaactgacaaaaatatttctgaggctccagcttcagaagcatcctctactgtcactgcaagaattgacagactaattaatgaatttgctcagtgtggtttaacaaaacttccaaaaaatgaaaagaagattttgtcatctgttgccagcaaaaagaagaaaaaatctcgacagcaagcaataaattccaggtatcaagatggacagcttgcaaccaaaggaattcttaataagaatgagagaataaacacaaaaggtagaattacaaaggaaatgatagtgcaagattcagatagtccccttaaaggagggatactttgtgaggaagacctccagaaaagtgatactgtaattgaatcaaatactttttgttccaaaagtaatctcaattccacgatttccaagaatttccatagaaataaattaaatactactcaaaattccaaggttcaaggacttttaaccaaaagaaaatctagatcactaaataaaataagcttaggagcacctaaaaaaagagaaatcggtcaaagagataaagtgtttcctcacaatgaatctaaatattgcaaaagtacttttgaaaacaaaagtttatttcatgtatttaacatccttgagcaaaaacccaaagatttttatgcaccgcaatctcaagcagaagtggcatctgggtatttgagaggaatggcaaagaagagtttagtttcaaaagttactgattcacacataactttaaaaagccagaaaaaacgtaaaggggataaagtgaaagcaagtgctattttaagtaaacaacatgctacaaccagggcaaattctttagcttctttgaaaaaacctgattttcctgaggctattgctcatcattcaattcaaaattatatacagagttggttgcagaacataaatccatatccaactttaaagcctataaaatcagctccagtatgtagaaatgaaacgagtgtggtaaattgtagcaataatagtttttcagggaatgatccccatacaaattctggaaaaataagtaattttgttatggaaagtaataagcacataactaaaattgccggtttgacaggagataatctatgtaaagagggagataagtcttttattgccaatgacactggtgaagaagatctccatgagacacaggttggatctctgaatgatgcttatttggttcccctgcatgaacactgtactttgtcacagtcagctattaatgatcataatactaaaagtcatatagctgctgaaaaatcaggaccagagaaaaaacttgtttaccaggaaataaacctagctagaaaaaggcaaagtgtagaggctgccattcaagtagatcctatagaagaggaaactccaaaagacctcttaccagtcctgatgcttcaccaattgcaagcttcagttcctggtattcacaagactcagaatggagttgttcaaatgccaggttcacttgcaggtgttccctttcattctgcaatatgtaattcatccactaatctccttctagcttggctcttggtgctaaacctaaagggaagtatgaatagcttctgtcaagttgatgctcacaaggctaccaacaaatcttcagaaacacttgcattgttggagattctaaagcacatagctatcacagaggaagctgatgacttgaaagctgctgttgccaatttagtggagtcaactacaagccactttggactcagtgagaaagaacaagacatggttccaatagatctttctgcaaattgttccacggtcaacattcagagtgttcctaagtgcagtgaaaatgaaagaacacaaggaatctcctctttggatggaggttgctctgccagtgaggcatgtgcccctgaagtctgtgttttggaagtgacttgctctccatgtgagatgtgcactgtaaataaggcttattctccaaaagagacatgtaaccccagtgacactttttttcctagtgatggttatggtgtggatcagacttctatgaataaggcttgtttcctaggagaggtctgttcacttactgatactgtgttttctgataaggcttgtgctcaaaaggagaaccatacctatgagggagcttgcccaattgatgagacctacgttcctgtcaatgtctgcaataccattgactttttaaactccaaagaaaacacatatactgataacttggattcaactgaagagttagaaagaggtgatgacattcagaaagatctaaatattttgacagaccctgaatataaaaatggatttaatacattggtgtcacatcaaaatgtcagtaatttaagctcctgtggcctttgcctaagtgaaaaagaagcagaacttgataagaaacatagttctctagatgattttgaaaattgttcactaaggaagtttcaggatgaaaatgcatatacttcctttgatatggaagaaccacggacttctgaagaaccaggctcaataaccaacagcatgacatcaagtgaaagaaacatttcagaattggaatcttttgaagaattagaaaaccatgacactgatatctttaatacagtggtaaatggaggagagcaagccactgaagaattaatccaagaagaggtagaggctagtaaaactttagaattgatagacatctctagtaagaatattatggaagaaaaaagaatgaacggtataatttatgaaataatcagtaagaggctggcaacaccaccatctttagatttttgctatgattctaagcaaaatagtgaaaaggagaccaatgaaggagaaactaagatggtaaaaatgatggtgaaaactatggaaactggaagttattcagagtcctctcctgatttaaaaaaatgcatcaaaagtccagtgacttctgattggtcagactatcggcctgacagtgacagtgagcagccatataaaacatccagtgatgatcccaatgacagtggcgaacttacccaagagaaagaatataacataggatttgttaaaagggcaatagaaaaactgtacggtaaagcagatattatcaaaccatctttttttcctgggtctacccgcaaatctcaggtttgtccttataattctgtggaatttcagtgttccaggaaagcaagtctttatgattctgaagggcagtcatttggctcttctgaacaggtatctagtagttcatctatgttgcaggaattccaggaggaaagacaagataagtgtgatgttagtgctgtgagggacaattattgtaggggtgacattgtagaacctggtacaaaacaaaatgatgatagcagaatcctcacagacatagaggaaggagtactgattgacaaaggcaaatggcttctgaaagaaaatcatttgctaaggatgtcatctgaaaatcctggcatgtgtggcaatgcagacaccacatcagtggacaccctacttgataataacagcagtgaggtaccatattcacattttggtaatttggccccaggcccaacgatggatgaactctcctcttcagaactcgaggaactgactcaaccccttgaactaaaatgcaattactttaacatgcctcatggtagtgactcagaaccttttcatgaggacttgctggatgttcgcaatgaaacctgtgccaaggaaagaatagcaaatcatcatacagaggagaagggtagtcatcagtcagaaagagtatgcacatctgtcactcattcctttatttctgctggtaacaaagtctaccctgtctctgatgatgctattaaaaaccaaccattgcctggcagtaatatgattcatggtacacttcaggaagctgactctttggataaactgtatgctctttgtggtcaacattgcccaatactaactgttattatccaacccatgaatgaggaagaccgaggatttgcatatcgcaaagaatctgatattgaaaatttcttgggtttttatttatggatgaaaatacacccatatttacttcagacagacaaaaatgtgttcagggaagagaacaataaagcaagtatgagacaaaatcttattgataatgccattggtgatatatttgatcagttttatttcagtaacacatttgacttgatgggtaaaagaagaaaacaaaaaagaattaacttcttggggttagaggaagaaggtaatttaaagaaatttcaaccagatttgaaggaaaggttttgtatgaatttcttgcacacatcattgttagttgtgggtaatgtggattcaaatacacaagacctcagcggtcagacaaatgaaatctttaaagcagtcgatgagaataacaacttattaaataacagattccagggctcaagaacaaatctcaaccaagtagtaagagaaaatatcaactgtcattacttctttgaaatgcttggtcaagcttgcctcttagatatttgccaagttgagacctccttaaatattagcaacagaaatattttagaactttgtatgtttgagggtgaaaatcttttcatttgggaagaggaagacatattaaatttaactgatcttgaaagcagtagagaacaagaagatttataatttcaatatcagcacactcattctttgtcaattcattttttcccatgagatgaagcacatgtgacgaatacggactagataacctctaagaattttccacttcttcaaaatgaacttactctagaaagcttacccttggataaccagtttgactttcataatgtctctgttttttgtttttccaacaattacagactcaggttctcttattttggaagtttctatctggttttgttctgaacttacattttttttttttttggtatctatgattttttttgctcagggcatcaaaatgtgctaaggacaagaattatatcctttttaaaaaatgttgttagcttggtgtaaaatgtatattgactgtattggtgaataaattgaatagacataacctcaaagtacttcacttattctttttaactactgatttgataaaaagtatgattataagatatccacgacaatctcatagtttctt

SEQ ID NO: 163357 - DNA, 3606 bp, Artificial Sequence
  derived and/or modified sequence
aattagaggagggttcactcgtaggcagcatctgagcaacaggctcaccagacttcagcctcttcactccgactcttccacgctccagctctcttcattaagatattctagaagcaactgaggagtttctacaaacattttggaaattacaggtctcagccaaaatgagtgataccccttctactggtttttccatcattcatcctacgtcttctgaaggtcaagttccaccccctcgccatttgagcctcactcatcctgttgtggccaagcgaatcagtttctacaagagcggagacccccaattcggcggggtcagggtggtggtcaaccctcgctcctttaagtcctttgatgctctgctggataacttgtccaggaaggtgcccctcccttttggagtgaggaacatcagcacccctcggggcaggcacagcatcacgcgcctggaggagctggaggacggcgagtcctacctatgttcccacggcaggaaggtgcagcctgtagacctggacaaagcccgtcggcgcccgcggccctggctcagcagccgggccattagcgcgcactcaccgccccaccccggagcctagtggtcttcaggaatggcgacccgaagacgaggcgtgcggttcttctgagcaggagggtcacccagagcttcgaggcatttctacagcacctgacagaggtcatgcagcgccctgtggtcaagctgtacgctacggacggaaggagggttcccagcctccaggcagtgatcctgagctctggagctgtggtggcggcaggaagggagccatttaaaccaggaaattatgacatccaaaaatacttgcttcctgctagattaccagggatctctcagcgtgtgtaccccaagggaaatgcaaagtcagaaagcagaaagagtagtaactggaaagtttttataatcaccagtgacttgccagatgcagggaccagctcacagatttatattattctgtatggacaacatagaagttcagcccccatatatctttatggaacagatggggctcgatttcaggttggccatgaagacatatttactataacagttggagacattggagcactctttaagattcgtattggtcataccaactctggatcctccccttcctggcactgcaaggagatacagctgcataatatgaattctggaaaacagttttatgtacctgttcaacgatggttggcacgagatcaagaggatggggaaatctgtcgagaatttcctcttttaagtaaaggacaacctgtccttccagtgacaatatatgaagtgaatgtggcaacgggtgagctatggaatgctggaacagtagcaaacgtctacatttctatccatggggaaaagggagatacaggatccagacaactatttagatcgaagagctccttcaattttttaagaggacaaactgacacctttttcctggaggctgtgcaccttggagatttgtgtaagattgtgataggccatgatggacttggcccaggaaatggttggtttcttgatgatgttgttatcaaggatcccacaacaaattacgaatatgccttcttctgtcacagatggctagatcagggggaagatgattgtaaaattgtcagagaactgtatgccagggataacagtatcttctctgcgaggcagaaattggaacttaagagaaaagaaacatggactgcagaaagctggaagtttacaaaaggaaatactcttcagttctataacaagctgactggagggtttgtccgtttgcatccagatggcacagttgacgccattggagagaagacagacaaatatggtgtctttgatgttattttcaacaaaagaaatatatgcattttccaaagtcatgagatgaggcatctttctcttgctcttgacaatggcattgtcactggaatggttagtggtgaagccaccactgagctgcgggtgctttatcagcctaaccgctgtgcacttcttgagtcggcactggttcctggtcacacagttgtttttgatcgtcatggcaaaatagctgatgcatcatcagcaggctatgcaaatctttcaaaagaatttgtgatttttgtcaagggggtgttcctcaacagtgctgtggttctgcttgctacaagcctgtgtcaggccctgtgtctccagcctgatggaagctgcactggagtgggaagccagtctgaaaaatcctactggaaagtgcataaaatcagctctgggatttgcatgtttgaaagtgtgaaaaatgcacaaatgtatctaagaatcaaggatggccgatgcgatggaacaggtacaggagatgttgactgtcattttaaaattaagaagaacttgaagaatgcatccataagcctggaatctacgaagagcccaggattgtttgttggacttcagtcagatgggcaggcaaaaccaatgatttataccaaggatgagaatgtttgcttctatccacaagtcatccaatttggcagagaaaacccaatgggaatgtctgcaacacccagccaagaagaagaaaagatccatgagtcaaaaaaacagaaaaaaatacccccagaatctgaggctaggagtcccttaccttcttcaactgcaaaagaaatcagacatttccaaagtagtgagactcttctgtcagaagatgaatggaaggtgttagtgctgacaggaaatacaggaactcaagccaatgtcactctctgggtgtatggagataaaggagtcactgggccaataagtcttcgcaaggacagctcagagcagctcttccttccaggacacgaggatgagtttcaggttgaaataagaaacactggaaacatatataagataaggataggacatgatggaaccagtgagcaacccgagtggaacttgcagagggtgaccatgcaacatatgaaaagcaagaagatcctagattttgcagcaaacgtatggctgtctcggattcaggcagatggggatgttgtctgtgagcttcctgtagtaaaaggaggacaagctatttttccattagtgagataccaggttgacgtctacactgggcagctgaagcatgcagagacggagtctgaggttttcctctgtctctttggggagaggggagactctggcctcagacagctgtacaaatctaacatgcaagtaaaatttcaaagaggacagattgataaatttcaagtagcagcagtgtcgcttggaaaactgcagaaggtgctgttgcgctgtgaggccagtgacaaatcacagtactggtactgtgaacaagtcatagtcagagagcccggcaccacatccgagtccatctttacctgtcaaagatggcttcctttcatgtctcagggcataattcattcagaaattgaactttatcttcaaggtgaggattactgaaaccatcagtagaagaaagtacaagatgattttgttacatctggacatcatggaacactattccccagttttcctcagaacatcccctttgatatttatcttttattattggatttatagtattcctcacagtgaaataaaaacatatgtaaagctgt

SEQ ID NO: 163358 - protein, 218 aa, Artificial Sequence
  derived and/or modified sequence
MSSGAASGTGRGRPRGGGPGPGDPPPSETHKLVVVGGGGVGKSALTIQFIQSYFVSDYDPTIEDSYTKICSVDGIPARLDILDTAGQEEFGAMREQYMRAGHGFLLVFAINDRQSFNEVGKLFTQILRVKDRDDFPVVLVGNKADLESQRQVPRSEASAFGASHHVAYFEASAKLRLNVDEAFEQLVRAVRKYQEQELPPSPPSAPRKKGGGCPCVLL

SEQ ID NO: 163359 - DNA, 657 bp, Artificial Sequence
  derived and/or modified sequence
atgtctagtggggccgcttctggtactggacgagggcgaccccgtggtggcggacctggaccaggagacccacccccatcagagacccataagctggtggttgtgggaggcggtggcgtcggaaagtcggctttaaccatccaatttatccagtcttacttcgtttcagactatgatccaactatcgaggattcctacactaaaatttgttcagtggatgggattcccgcacgcctagatatcctggataccgctggccaggaagagttcggcgccatgcgtgagcagtatatgagggcgggtcacgggtttttgttggtatttgctattaacgaccgccaaagctttaacgaagtaggtaaactgtttactcagatcttacgggttaaagacagagatgattttccggtagttcttgttgggaataaggcagacctggagtctcagagacaggttccacgcagtgaagcatctgccttcggggcctcacaccatgtggcttactttgaggcctccgccaagctgcggctgaatgtggatgaagcgtttgaacaactggtgcgcgcagttcgcaagtatcaggagcaggaattgcctccgagcccgcccagtgccccccgaaaaaagggagggggctgcccatgcgtcctcctttag

SEQ ID NO: 163360 - DNA, 657 bp, Artificial Sequence
  derived and/or modified sequence
atgagcagtggagctgccagcggcaccggccggggccggccccggggcggcggccctggccctggggaccccccaccttctgagacccacaagctggtggtggtgggcggcggcggcgtgggcaagagcgccctgaccatccagttcatccagagctactttgtgtctgactatgaccccaccattgaagattcctacaccaagatctgcagcgtggatggcatcccagcccggctggacatcctggacacagctggccaggaggagtttggagccatgagggagcagtacatgagagctggccacggcttcctgctggtgtttgccatcaatgaccggcagagcttcaatgaggtgggcaagctgttcacccagatcctgcgggtgaaggacagagatgacttccctgtggtgctggtgggcaacaaggctgacctggagagccagaggcaggtgcccaggtctgaggccagcgccttcggggccagccaccacgtggcctactttgaggccagcgccaagctgcggctgaatgtggatgaggcctttgagcagctggtgcgggctgtgaggaagtaccaggagcaggagctgccccccagcccccccagcgcccccaggaagaagggcggcggctgcccctgtgtgctgctgtag

SEQ ID NO: 163361 - DNA, 657 bp, Artificial Sequence
  derived and/or modified sequence
atgagcagcggcgccgccagcggcaccggccggggccggccccggggtggtggccctgggcccggcgaccctccgccatcagagacacataaactagtcgtcgtgggcggcggaggcgtgggcaagtctgcactgaccattcagttcatacaatcctactttgtttcagattacgacccgacgatcgaggattcgtacacaaagatttgtagtgtggatggtatacctgcccggttggatatcttggatactgctggtcaggaggaattcggggccatgagggagcagtacatgagggctggccatgggtttctgctggtgttcgccatcaatgaccgacagtcctttaacgaggtgggcaaactctttacccaaatcctgcgggttaaagatcgggacgattttccggttgtgttggttggtaataaagccgatttggagtcacagcgccaggtaccccgatctgaagcctcggcctttggtgcttctcatcatgtggcctacttcgaggcctcggccaaactgcgattaaacgtagatgaagcctttgaacaactggtccgcgccgtgcgtaaatatcaggagcaggagctccctccatcacctccgtccgcccctaggaaaaaggggggcgggtgcccctgtgttttgctgtag

SEQ ID NO: 163362 - DNA, 657 bp, Artificial Sequence
  derived and/or modified sequence
atgagcagcggcgctgccagcggcacaggcaggggccgaccgaggggtgggggacccggacccggtgatccgccaccatcagaaacgcataaactggtggtggtaggcggtggcggtgtcggaaagtctgcccttaccatacagttcatccagtcttactttgttagtgactacgatcctactattgaggacagttatacaaaaatatgcagtgtggatgggataccagccagactggacatcctagacacagccggtcaagaggagttcggagctatgagagaacagtacatgcgggctgggcatgggtttttgctcgtatttgcaataaacgacaggcaatcatttaacgaagtgggtaaactgttcacccaaatcctcagagtgaaggatcgagatgattttcccgttgtgctggtggggaataaggccgacttggagtcccagcgccaggtgcccagatctgaagccagtgcattcggcgcaagccatcacgtagcgtactttgaagcaagcgccaaactgagactgaacgtggacgaggcctttgagcaattggtgcgtgcagtcaggaagtaccaggagcaggagttacctccaagtccgccttctgccccacgcaagaagggaggcggatgcccatgcgtgctgctgtag

SEQ ID NO: 163363 - DNA, 983 bp, Artificial Sequence
  derived and/or modified sequence
ggctcccccgcaggcggtagcgaaggcagcagcagcggtggcgacatgagcagcggggcggcgtccgggacagggcgggggcggccccggggcgggggacctgggcccggggaccccccgcccagcgagacacacaagctggtggtcgtgggcggcggcggcgtgggcaagagcgcgctgaccatccagttcatccagtcctacttcgtgtctgactacgaccccactattgaggactcctacacgaagatctgcagtgtggatggcatcccagcccggctggacatcctggacaccgcgggccaggaagagttcggggccatgagagagcagtacatgcgtgctggccacggcttcctgctggtgttcgccattaacgaccggcagagtttcaacgaggtgggcaagctcttcacgcagattctgcgggtcaaggaccgcgacgacttccccgttgtgttggtcgggaacaaggcagatctggagtcacagcgccaggtcccccgatcagaagcctctgccttcggcgcctcccaccacgtggcctactttgaggcctcggccaaactgcgtctcaacgtggacgaggcttttgagcagctggtgcgggctgtccggaaataccaggaacaagagctcccaccgagccctcccagtgcccccaggaagaagggcgggggctgcccctgcgtcctcctgtagcccaggcaagagagaagcaaccaccacaagctctcgggactagctgccttcgcaccttgctgtgtgacctgaggccctcactgagcctcaatttcctcatctgggtctcccaggacacatcacatacccacccttacttcctggcctcttctgggctactgccactgtgtgccttctgccaacgcctcctgtccccacctaagcctggtgggggtgaggggctccgggtcactgctgtatataactcccctcccccagaaaaataaatgtcactgccaacg

SEQ ID NO: 163364 - DNA, 657 bp, Artificial Sequence
  derived and/or modified sequence
atgagcagcggcgccgccagcggcaccggcagaggcagacccagaggcggcggccccggccccggcgaccccccccccagcgagacccacaagctggtggtggtgggcggcggcggcgtgggcaagagcgccctgaccatccagttcatccagagctacttcgtgagcgactacgaccccaccatcgaggacagctacaccaagatctgcagcgtggacggcatccccgccagactggacatcctggacaccgccggccaggaggagttcggcgccatgagagagcagtacatgagagccggccacggcttcctgctggtgttcgccatcaacgacagacagagcttcaacgaggtgggcaagctgttcacccagatcctgagagtgaaggacagagacgacttccccgtggtgctggtgggcaacaaggccgacctggagagccagagacaggtgcccagaagcgaggccagcgccttcggcgccagccaccacgtggcctacttcgaggccagcgccaagctgagactgaacgtggacgaggccttcgagcagctggtgagagccgtgagaaagtaccaggagcaggagctgccccccagcccccccagcgcccccagaaagaagggcggcggctgcccctgcgtgctgctgtag

SEQ ID NO: 163365 - protein, 94 aa, Artificial Sequence
  derived and/or modified sequence
MGSELETAMETLINVFHAHSGKEGDKYKLSKKELKELLQTELSGFLDAQKDVDAVDKVMKELDENGDGEVDFQEYVVLVAALTVACNNFFWENS

SEQ ID NO: 163366 - protein, 53 aa, Artificial Sequence
  derived and/or modified sequence
MGSELETAMETLINVFHAHSGKEGDKYKLSKKELKELLQTELSGFLDVKELML

SEQ ID NO: 163367 - protein, 147 aa, Artificial Sequence
  derived and/or modified sequence
MEEPQTKTPSAEFPPYRAQPAQPATAPAATFATLAICPEPAPTSGPGQPCTAAMGSELETAMETLINVFHAHSGKEGDKYKLSKKELKELLQTELSGFLDAQKDVDAVDKVMKELDENGDGEVDFQEYVVLVAALTVACNNFFWENS

SEQ ID NO: 163368 - protein, 34 aa, Artificial Sequence
  derived and/or modified sequence
MGSELETAMETLINVFHAHSGKEGDKYKLSKKEL

SEQ ID NO: 163369 - DNA, 285 bp, Artificial Sequence
  derived and/or modified sequence
atggggtctgaactggagactgctatggagaccctgattaacgtatttcacgcgcattccggaaaagagggcgataagtacaaactctcaaagaaggagctcaaggaactgttgcaaaccgagctctcgggatttttggatgctcaaaaggacgtggatgcagtcgacaaggtcatgaaagagcttgatgagaacggggatggcgaagtcgacttccaggaatatgtagttttggtggctgcccttactgttgcgtgcaataactttttttgggaaaatagttag

SEQ ID NO: 163370 - DNA, 162 bp, Artificial Sequence
  derived and/or modified sequence
atgggctcggaactggaaacggcgatggaaacccttatcaatgtttttcatgctcacagcggaaaggagggggacaaatacaaactgagcaagaaagagctaaaagagctgctgcagactgagttgagtggcttcctggatgttaaggaattaatgctgtag

SEQ ID NO: 163371 - DNA, 444 bp, Artificial Sequence
  derived and/or modified sequence
atggaagaaccccagacaaagaccccaagcgcagagttcccaccctacagagctcaacctgctcagccagccacagcccctgctgctacattcgctaccctggctatttgccctgaaccggcgccaacaagtgggcccgggcaaccctgcacagccgccatggggtccgagttagagaccgctatggaaaccctgattaacgtgtttcacgcccactcgggcaaagagggggataaatataaactgtctaagaaggaactgaaagaattgctgcaaaccgaactgtccgggtttctggacgctcaaaaggacgtggatgctgtcgacaaggtaatgaaagagctggacgagaatggggatggcgaagttgattttcaggagtacgttgtcttggtggcagcgctcactgtggcttgtaacaattttttctgggaaaattcctag

SEQ ID NO: 163372 - DNA, 105 bp, Artificial Sequence
  derived and/or modified sequence
atgggaagtgaactcgagactgctatggaaacactgataaatgtattccacgctcacagcggcaaggagggagataaatataagctctccaagaaagagctgtag

SEQ ID NO: 163373 - DNA, 285 bp, Artificial Sequence
  derived and/or modified sequence
atgggcagcgagctggagacagccatggagaccctcatcaacgtgttccacgcccacagcggcaaggagggggacaagtacaagctgagcaagaaggagctgaaggagctgctgcagacagagctgagcggcttcctggatgcccagaaggatgtggatgctgtggacaaggtgatgaaggagctggatgaaaatggagatggagaggtggacttccaggagtatgtggtgctggtggccgccctgactgtggcctgcaacaacttcttctgggagaacagctag

SEQ ID NO: 163374 - DNA, 162 bp, Artificial Sequence
  derived and/or modified sequence
atgggcagcgagctggagacagccatggagaccctcatcaacgtgttccacgcccacagcggcaaggagggggacaagtacaagctgagcaagaaggagctgaaggagctgctgcagacagagctgagcggcttcctggatgtgaaggagctgatgctgtag

SEQ ID NO: 163375 - DNA, 444 bp, Artificial Sequence
  derived and/or modified sequence
atggaggagccccagaccaagacccccagcgctgagttccccccctaccgggcccagcctgcccagcctgccacagccccagctgccacctttgccaccctggccatctgcccagagcccgcccccaccagcggccctggccagccctgcacagctgccatgggcagcgagctggagacagccatggagaccctcatcaacgtgttccacgcccacagcggcaaggagggggacaagtacaagctgagcaagaaggagctgaaggagctgctgcagacagagctgagcggcttcctggatgcccagaaggatgtggatgctgtggacaaggtgatgaaggagctggatgaaaatggagatggagaggtggacttccaggagtatgtggtgctggtggccgccctgactgtggcctgcaacaacttcttctgggagaacagctag

SEQ ID NO: 163376 - DNA, 105 bp, Artificial Sequence
  derived and/or modified sequence
atgggcagcgagctggagacagccatggagaccctcatcaacgtgttccacgcccacagcggcaaggagggggacaagtacaagctgagcaagaaggagctgtag

SEQ ID NO: 163377 - DNA, 285 bp, Artificial Sequence
  derived and/or modified sequence
atgggcagcgagctggagaccgccatggagaccctgatcaacgtgttccatgctcattccggtaaagaaggagacaaatataaactgtctaaaaaggaattaaaggagctactgcagaccgagcttagtggctttctcgacgcccagaaagatgtggatgctgtcgacaaggtgatgaaagaactggatgagaatggggatggagaggttgactttcaggaatacgtggtgctggtggccgcgcttaccgtcgcctgtaacaactttttttgggaaaatagttag

SEQ ID NO: 163378 - DNA, 162 bp, Artificial Sequence
  derived and/or modified sequence
atgggcagcgagctggagaccgccatggagaccctgatcaacgtgtttcacgcacatagcggcaaggagggggataagtataagctgagtaagaaggagctcaaggagctcctgcaaaccgagctgtcaggcttcctggacgttaaggaactcatgctttag

SEQ ID NO: 163379 - DNA, 444 bp, Artificial Sequence
  derived and/or modified sequence
atggaggagccccagaccaagacccccagcgccgagttccccccctatcgggctcagccagcacagccagccaccgcccccgccgctacattcgccaccctagcaatctgtcctgagcccgctcccacttcagggcctggacagccctgtactgccgccatgggctctgagctggaaactgccatggaaaccctgataaatgtgtttcacgcacacagtggcaaggaaggggataagtacaaattgagcaagaaagaattaaaagaattgttgcagactgaactgagcggctttctcgacgcacagaaagatgttgatgcagtggacaaggtcatgaaagagttagacgaaaatggggatggtgaagtagatttccaggagtacgtcgtccttgtagctgccctgaccgtcgcctgtaataatttcttctgggagaactcttag

SEQ ID NO: 163380 - DNA, 105 bp, Artificial Sequence
  derived and/or modified sequence
atgggcagcgagctggagaccgccatggagaccctgatcaacgtgttccatgcccattctgggaaagaaggggacaagtacaaattgtctaagaaggaactatag

SEQ ID NO: 163381 - DNA, 285 bp, Artificial Sequence
  derived and/or modified sequence
atgggcagtgagctggaaacagcaatggagactctgattaatgtatttcacgcccatagtggtaaggaaggagacaagtacaagttgagtaaaaaggagcttaaggaattgcttcagacagaacttagcggcttcctcgacgcacagaaggacgttgatgccgtggataaggtaatgaaggagctggacgaaaatggtgatggtgaggttgacttccaggagtacgtcgtcctggtcgccgctctcaccgtcgcatgtaataatttcttctgggagaattcctag

SEQ ID NO: 163382 - DNA, 162 bp, Artificial Sequence
  derived and/or modified sequence
atggggtccgagctggagactgccatggaaaccctgatcaacgtgttccatgcccatagtggcaaggaaggagataagtacaagctcagcaagaaagagttgaaggagctgctgcagaccgagctgtctggtttcctcgatgtgaaggagctcatgctgtag

SEQ ID NO: 163383 - DNA, 444 bp, Artificial Sequence
  derived and/or modified sequence
atggaggaacctcagactaaaactccttcagccgagttccctccgtaccgagctcagccggctcaaccagcgacggcccctgcagcgacctttgccaccctggcaatctgtccagaacccgctcccaccagtggcccagggcagccctgtactgctgcaatggggagcgaactggagacagccatggaaacactcatcaacgttttccatgctcactccggaaaagagggcgacaaatacaagttaagcaaaaaggaactgaaggagctgctgcagactgagcttagcggtttcctggacgcccagaaggatgtggatgctgtagacaaggtgatgaaggaactggatgaaaacggggatggtgaggtcgactttcaggaatatgtggtcttagtggctgcgttgactgttgcttgcaacaacttcttttgggaaaattcctag

SEQ ID NO: 163384 - DNA, 105 bp, Artificial Sequence
  derived and/or modified sequence
atggggagtgagctggaaacagccatggagaccctcattaatgtatttcatgcccactctgggaaagagggcgacaagtacaagctcagtaagaaggagctctag

SEQ ID NO: 163385 - DNA, 594 bp, Artificial Sequence
  derived and/or modified sequence
ggactgttgaagacaggtctccacacacagctccagcagccacatttgcaaccttggccatctgtccagaacctgctcccacctcaggcccaggccaaccgtgcactgctgcaatgggctctgagctggagacggcgatggagaccctcatcaacgtgttccacgcccactcgggcaaagagggggacaagtacaagctgagcaagaaggagctgaaagagctgctgcagacggagctctctggcttcctggatgcccagaaggatgtggatgctgtggacaaggtgatgaaggagctagacgagaatggagacggggaggtggacttccaggagtatgtggtgcttgtggctgctctcacagtggcctgtaacaatttcttctgggagaacagttgagcagacagccacattgggcagcgcccttcctctccaccctcccagacctgcctcttccccctgcttccacctcaccccacttatccctctccataaccccacccttgcccaccccacccccacccccaccaagggcgcaagagtagcggtccaagcctgcaactcatctttcattaaaggcttctctctcaccagc

SEQ ID NO: 163386 - DNA, 522 bp, Artificial Sequence
  derived and/or modified sequence
cacagctccagcagccacatttgcaaccttggccatctgtccagaacctgctcccacctcaggcccaggccaaccgtgcactgctgcaatgggctctgagctggagacggcgatggagaccctcatcaacgtgttccacgcccactcgggcaaagagggggacaagtacaagctgagcaagaaggagctgaaagagctgctgcagacggagctctctggcttcctggatgtgaaagagcttatgctgtaggcaacagaagccctcaagacctttgaggaggcctagaagagtcccataattcaatgcagttcctctcgctcatctttgcctcctgctcctcaaccacccccttgcctctgactcagtgctgtacccttccctatacacctccctcttcctctcctcccaccacaggcccagaaggatgtggatgctgtggacaaggtgatgaaggagctagacgagaatggagacggggaggtggacttccaggagtatgtggtgcttgtggctgctctcac

SEQ ID NO: 163387 - DNA, 784 bp, Artificial Sequence
  derived and/or modified sequence
cctcagagaaccccaggctgaggccccacacacagagggggatccaggttgagacccccagagaagagtcctggattgaaatccctctgtgggttctcagactcccaagactaagtttctcactgagggtcctctcagtgaggccccatggaggagccacagactaagaccccctcagcagaattccccccttaccgggctcaaccagcacagccagccacagctccagcagccacatttgcaaccttggccatctgtccagaacctgctcccacctcaggcccaggccaaccgtgcactgctgcaatgggctctgagctggagacggcgatggagaccctcatcaacgtgttccacgcccactcgggcaaagagggggacaagtacaagctgagcaagaaggagctgaaagagctgctgcagacggagctctctggcttcctggatgcccagaaggatgtggatgctgtggacaaggtgatgaaggagctagacgagaatggagacggggaggtggacttccaggagtatgtggtgcttgtggctgctctcacagtggcctgtaacaatttcttctgggagaacagttgagcagacagccacattgggcagcgcccttcctctccaccctcccagacctgcctcttccccctgcttccacctcaccccacttatccctctccataaccccacccttgcccaccccacccccacccccaccaagggcgcaagagtagcggtccaagcctgcaactcatctttcattaaaggcttctctctcacc

SEQ ID NO: 163388 - DNA, 236 bp, Artificial Sequence
  derived and/or modified sequence
agaacctgctcccacctcaggcccaggccaaccggagccctcaagtccctgccaaggccccctctgtctcccaggtgttgggaagggtcccagccctcccctgcctcgcctcctgtggggtgcactgctgcaatgggctctgagctggagacggcgatggagaccctcatcaacgtgttccacgcccactcgggcaaagagggggacaagtacaagctgagcaagaaggagctgaa

SEQ ID NO: 163389 - DNA, 285 bp, Artificial Sequence
  derived and/or modified sequence
atgggcagcgagctggagaccgccatggagaccctgatcaacgtgttccacgcccacagcggcaaggagggcgacaagtacaagctgagcaagaaggagctgaaggagctgctgcagaccgagctgagcggcttcctggacgcccagaaggacgtggacgccgtggacaaggtgatgaaggagctggacgagaacggcgacggcgaggtggacttccaggagtacgtggtgctggtggccgccctgaccgtggcctgcaacaacttcttctgggagaacagctag

SEQ ID NO: 163390 - DNA, 162 bp, Artificial Sequence
  derived and/or modified sequence
atgggcagcgagctggagaccgccatggagaccctgatcaacgtgttccacgcccacagcggcaaggagggcgacaagtacaagctgagcaagaaggagctgaaggagctgctgcagaccgagctgagcggcttcctggacgtgaaggagctgatgctgtag

SEQ ID NO: 163391 - DNA, 444 bp, Artificial Sequence
  derived and/or modified sequence
atggaggagccccagaccaagacccccagcgccgagttccccccctacagagcccagcccgcccagcccgccaccgcccccgccgccaccttcgccaccctggccatctgccccgagcccgcccccaccagcggccccggccagccctgcaccgccgccatgggcagcgagctggagaccgccatggagaccctgatcaacgtgttccacgcccacagcggcaaggagggcgacaagtacaagctgagcaagaaggagctgaaggagctgctgcagaccgagctgagcggcttcctggacgcccagaaggacgtggacgccgtggacaaggtgatgaaggagctggacgagaacggcgacggcgaggtggacttccaggagtacgtggtgctggtggccgccctgaccgtggcctgcaacaacttcttctgggagaacagctag

SEQ ID NO: 163392 - DNA, 105 bp, Artificial Sequence
  derived and/or modified sequence
atgggcagcgagctggagaccgccatggagaccctgatcaacgtgttccacgcccacagcggcaaggagggcgacaagtacaagctgagcaagaaggagctgtag

SEQ ID NO: 163393 - protein, 92 aa, Artificial Sequence
  derived and/or modified sequence
MSELEKAMVALIDVFHQYSGREGDKHKLKKSELKELINNELSHFLEEIKEQEVVDKVMETLDNDGDGECDFQEFMAFVAMVTTACHEFFEHE

SEQ ID NO: 163394 - DNA, 279 bp, Artificial Sequence
  derived and/or modified sequence
atgagcgagctcgagaaggctatggttgcattgattgatgtgtttcatcagtattctggtcgagagggagataaacacaagttgaaaaaaagcgagctcaaggagctgattaacaatgaactgagccactttctggaggagataaaagagcaggaggtggtagacaaggttatggagaccctggacaatgatggagacggcgagtgcgactttcaggagtttatggctttcgtcgctatggtcacgactgcctgtcatgaattctttgaacacgagtag

SEQ ID NO: 163395 - DNA, 279 bp, Artificial Sequence
  derived and/or modified sequence
atgtccgaactcgagaaagccatggtcgccctaatcgatgtgtttcaccagtactcgggacgcgaaggggacaagcacaaactaaagaagtccgaactgaaggaactgatcaacaatgagctatctcactttctcgaggagatcaaagaacaagaggttgtggataaggtgatggagaccctggataatgacggtgatggcgagtgtgactttcaagaatttatggcctttgtcgcaatggtaaccactgcatgccatgaattcttcgagcacgagtag

SEQ ID NO: 163396 - DNA, 279 bp, Artificial Sequence
  derived and/or modified sequence
atgtctgagctggagaaggccatggtggccctgattgatgtgttccaccagtacagcggccgggagggggacaagcacaagctgaagaagtctgagctgaaggagctgatcaacaatgagctgagccacttcctggaggagatcaaggagcaggaggtggtggacaaggtgatggagaccctggacaatgatggagatggagaatgtgacttccaggagttcatggcctttgtggccatggtgaccacagcctgccacgagttctttgaacatgaatag

SEQ ID NO: 163397 - DNA, 279 bp, Artificial Sequence
  derived and/or modified sequence
atgagcgagctggagaaggccatggtggccctgatcgacgtgttccaccagtacagcggccgtgagggcgacaaacacaaattgaaaaagtccgagctcaaggagctcattaacaatgagctgagtcattttctggaagaaatcaaggaacaagaagtcgtggacaaggtcatggagaccctggacaacgatggcgacggggaatgcgattttcaagaatttatggccttcgtagcaatggtgaccacagcctgccatgaatttttcgagcatgagtag

SEQ ID NO: 163398 - DNA, 279 bp, Artificial Sequence
  derived and/or modified sequence
atgagcgagctggagaaggccatggtggccctgatcgacgtgttccatcagtattccgggcgagagggggacaaacacaagctcaagaaaagcgaactgaaagaacttatcaacaatgagctgtcacactttttggaggagatcaaggagcaagaggtggtggataaggtgatggagacccttgacaatgatggagacggagagtgcgactttcaggaatttatggcctttgtagcaatggtcaccaccgcttgtcatgaatttttcgagcacgagtag

SEQ ID NO: 163399 - DNA, 279 bp, Artificial Sequence
  derived and/or modified sequence
atgagcgagctggagaaggcaatggttgccctaatcgacgtgttccaccagtactcggggagagagggagacaaacacaagttaaaaaagagcgaactgaaagagctcataaataacgaactctcgcactttctggaagagattaaagagcaagaagttgtcgacaaggttatggagactctggataatgatggcgatggcgagtgcgactttcaggagttcatggcttttgtcgctatggtgaccaccgcctgccatgagtttttcgagcacgagtag

SEQ ID NO: 163400 - DNA, 279 bp, Artificial Sequence
  derived and/or modified sequence
atgagcgaattggagaaggccatggtcgctctcatcgatgttttccaccagtactccgggagagagggcgacaagcataagctaaaaaaatccgagcttaaagaattaatcaataatgagttgtcgcattttctggaagagatcaaggagcaggaggtggtggataaggtgatggagaccctcgataatgacggagatggcgaatgcgatttccaggaatttatggccttcgtggcaatggtgacaacagcatgtcacgagtttttcgaacacgagtag

SEQ ID NO: 163401 - DNA, 877 bp, Artificial Sequence
  derived and/or modified sequence
cctggcagccctgccacccccgccttcggctcccattggctgccacggcctgcagtgggctgcaccagggttcatccatcctccctgggcagagggaataagaggctgcctctgcccaccagtcctgccgcccaggacccgcagcagagacgacgcctgcagcaaggagaccaggaaggggtgagacaaggaagaggatgtctgagctggagaaggccatggtggccctcatcgacgttttccaccaatattctggaagggagggagacaagcacaagctgaagaaatccgaactgaaggagctcatcaacaatgagctttcccatttcttagaggaaatcaaagagcaggaggttgtggacaaagtcatggaaacactggacaatgatggagacggcgaatgtgacttccaggaattcatggcctttgttgccatggttactactgcctgccacgagttctttgaacatgagtgagattagaaagcagccaaacctttcctgtaacagagacggtcatgcaagaaagcagacagcaagggcttgcagcctagtaggagctgagctttccagccgtgttgtagctaattaggaagcttgatttgctttgtgattgaaaaattgaaaacctctttccaaaggctgttttaacggcctgcatcattctttctgctatattaggcctgtgtgtaagctgactggccccagggactcttgttaacagtaacttaggagtcaggtctcagtgataaagcgtgcaccgtgcagcccgccatggccgtgtagaccctaacccggagggaaccctgactacagaaattaccccggggcacccttaaaacttccactacctttaaaaaacaaagccttatccagca

SEQ ID NO: 163402 - DNA, 839 bp, Artificial Sequence
  derived and/or modified sequence
ttgctcctagtcactgtctcactttcagattgattttaacagcttgcagttgatggtttgctcacctgcactctaccacctcatcttggagccttgcaggaacagagagggaccctgtggggattaattcaggggaaattaatccctgaattcccttgctgctctgcctctgtatttttgccagtttccctgttggcccaacccagccagaattcagagggcatgggaatatatccccgtggcccacacggacagagaaggcaggcccacagctgtctaagaggccggtggaaggattatgataaaagtgcaaattcccagaatgcccctccaggccatgcctgctgctctgagcttgaaaagagtgccaaggccattccatcccccttgtctgggttgaggtctgtattgataacatatgaaatgttttaggatgaggtatagatgagaaggcaactttcctttgcgagcccctaggatgtctgagctggagaaggccatggtggccctcatcgacgttttccaccaatattctggaagggagggagacaagcacaagctgaagaaatccgaactgaaggagctcatcaacaatgagctttcccatttcttagaggaaatcaaagagcaggaggttgtggacaaagtcatggaaacactggacaatgatggagacggcgaatgtgacttccaggaattcatggcctttgttgccatggttactactgcctgccacgagttctttgaacatgagtgagattagaaagcagccaaacctttcctgtaacagagacggtcatgcaagaaagcagacagcaagggcttgcagcctagtagga

SEQ ID NO: 163403 - DNA, 279 bp, Artificial Sequence
  derived and/or modified sequence
atgagcgagctggagaaggccatggtggccctgatcgacgtgttccaccagtacagcggcagagagggcgacaagcacaagctgaagaagagcgagctgaaggagctgatcaacaacgagctgagccacttcctggaggagatcaaggagcaggaggtggtggacaaggtgatggagaccctggacaacgacggcgacggcgagtgcgacttccaggagttcatggccttcgtggccatggtgaccaccgcctgccacgagttcttcgagcacgagtag

SEQ ID NO: 163404 - protein, 99 aa, Artificial Sequence
  derived and/or modified sequence
MKASAALLCLLLTAAAFSPQGLAQPVGINTSTTCCYRFINKKIPKQRLESYRRTTSSHCPREAVIFKTKLDKEICADPTQKWVQDFMKHLDKKTQTPKL

SEQ ID NO: 163405 - protein, 109 aa, Artificial Sequence
  derived and/or modified sequence
MWKPMPSPSNMKASAALLCLLLTAAAFSPQGLAQPVGINTSTTCCYRFINKKIPKQRLESYRRTTSSHCPREAVIFKTKLDKEICADPTQKWVQDFMKHLDKKTQTPKL

SEQ ID NO: 163406 - DNA, 300 bp, Artificial Sequence
  derived and/or modified sequence
atgaaggccagcgccgccctgctgtgcctgctgctgaccgccgccgccttcagcccccagggcctggcccagcccgtgggcatcaacaccagcaccacctgctgctacagattcatcaacaagaagatccccaagcagagactggagagctacagaagaaccaccagcagccactgccccagagaggccgtgatcttcaagaccaagctggacaaggagatctgcgccgaccccacccagaagtgggtgcaggacttcatgaagcacctggacaagaagacccagacccccaagctgtag

SEQ ID NO: 163407 - DNA, 330 bp, Artificial Sequence
  derived and/or modified sequence
atgtggaagcccatgcccagccccagcaacatgaaggccagcgccgccctgctgtgcctgctgctgaccgccgccgccttcagcccccagggcctggcccagcccgtgggcatcaacaccagcaccacctgctgctacagattcatcaacaagaagatccccaagcagagactggagagctacagaagaaccaccagcagccactgccccagagaggccgtgatcttcaagaccaagctggacaaggagatctgcgccgaccccacccagaagtgggtgcaggacttcatgaagcacctggacaagaagacccagacccccaagctgtag

SEQ ID NO: 163408 - DNA, 276 bp, Artificial Sequence
  derived and/or modified sequence
atgtggaagcccatgcccagccccagcaacatgaaggccagcgccgccctgctgtgcctgctgctgaccgccgccgccttcagcccccagggcctggcccagcccgagagacccagaacccacccccagtggaccttcctgctggtggtgagcctgcagctgggcctgatcctgcagctgcccgccgccaccgacctgagcatcagaaagagcctgagcagaggctggagagccaccgagggcccccccgtggccaccgtgcccggcaagctgtag

SEQ ID NO: 163409 - DNA, 804 bp, Artificial Sequence
  derived and/or modified sequence
agcagaggggctgagaccaaaccagaaacctccaattctcatgtggaagcccatgccctcaccctccaacatgaaagcctctgcagcacttctgtgtctgctgctcacagcagctgctttcagcccccaggggcttgctcagccagttgggattaatacttcaactacctgctgctacagatttatcaataagaaaatccctaagcagaggctggagagctacagaaggaccaccagtagccactgtccccgggaagctgtaatcttcaagaccaaactggacaaggagatctgtgctgaccccacacagaagtgggtccaggactttatgaagcacctggacaagaaaacccaaactccaaagctttgaacattcatgactgaactgaaaacaagccatgacttgagaaacaaataatttgtataccctgtcctttctcagagtggttctgagattattttaatctaattctaaggaatatgagctttatgtaataatgtgaatcatggtttttcttagtagattttaaaagttattaatattttaatttaatcttccatggattttggtgggttttgaacataaagccttggatgtatatgtcatctcagtgctgtaaaaactgtgggatgctcctcccttctctacctcatgggggtattgtataagtccttgcaagaatcagtgcaaagatttgctttaattgttaagatatgatgtccctatggaagcatattgttattatataattacatatttgcatatgtatgactcccaaattttcacataaaatagatttttgt

SEQ ID NO: 163410 - DNA, 810 bp, Artificial Sequence
  derived and/or modified sequence
agcagaggggctgagaccaaaccagaaacctccaattctcatgtggaagcccatgccctcaccctccaacatgaaagcctctgcagcacttctgtgtctgctgctcacagcagctgctttcagcccccaggggcttgctcagccagttgggattaatacttcaactacctgctgctacagatttatcaataagaaaatccctaagcagaggctggagagctacagaaggaccaccagtagccactgtccccgggaagctgtaatcttcaagaccaaactggacaaggagatctgtgctgaccccacacagaagtgggtccaggactttatgaagcacctggacaagaaaacccaaactccaaagctttgaacattcatgactgaactgaaaacaagccatgacttgagaaacaaataatttgtataccctgtcctttctcagagtggttctgagattattttaatctaattctaaggaatatgagctttatgtaataatgtgaatcatggtttttcttagtagattttaaaagttattaatattttaatttaatcttccatggattttggtgggttttgaacataaagccttggatgtatatgtcatctcagtgctgtaaaaactgtgggatgctcctcccttctctacctcatgggggtattgtataagtccttgcaagaatcagtgcaaagatttgctttaattgttaagatatgatgtccctatggaagcatattgttattatataattacatatttgcatatgtatgactcccaaattttcacataaaatagatttttgtataaca

SEQ ID NO: 163411 - DNA, 696 bp, Artificial Sequence
  derived and/or modified sequence
agaggggctgagaccaaaccagaaacctccaattctcatgtggaagcccatgccctcaccctccaacatgaaagcctctgcagcacttctgtgtctgctgctcacagcagctgctttcagcccccaggggcttgctcagccagaaagacccaggacacaccctcaatggacttttcttcttgttgtttcattgcagttgggattaatacttcaactacctgctgctacagatttatcaataagaaaatccctaagcagaggctggagagctacagaaggaccaccagtagccactgtccccgggaagctgtaatcttcaagaccaaactggacaaggagatctgtgctgaccccacacagaagtgggtccaggactttatgaagcacctggacaagaaaacccaaactccaaagctttgaacattcatgactgaactgaaaacaagccatgacttgagaaacaaataatttgtataccctgtcctttctcagagtggttctgagattattttaatctaattctaaggaatatgagctttatgtaataatgtgaatcatggtttttcttagtagattttaaaagttattaatattttaatttaatcttccatggattttggtgggttttgaacataaagccttggatgtatatgtcatctcagtgctgtaaaaactgtgggatgctcctcccttctc

SEQ ID NO: 163412 - DNA, 687 bp, Artificial Sequence
  derived and/or modified sequence
agaggggctgagaccaaaccagaaacctccaattctcatgtggaagcccatgccctcaccctccaacatgaaagcctctgcagcacttctgtgtctgctgctcacagcagctgctttcagcccccaggggcttgctcagccagcttcaagaccaaactggacaaggagatctgtgctgaccccacacagaagtgggtccaggactttatgaagcacctggacaagaaaacccaaactccaaagctttgaacattcatgactgaactgaaaacaagccatgacttgagaaacaaataatttgtataccctgtcctttctcagagtggttctgagattattttaatctaattctaaggaatatgagctttatgtaataatgtgaatcatggtttttcttagtagattttaaaagttattaatattttaatttaatcttccatggattttggtgggttttgaacataaagccttggatgtatatgtcatctcagtgctgtaaaaactgtgggatgctcctcccttctctacctcatgggggtattgtataagtccttgcaagaatcagtgcaaagatttgctttaattgttaagatatgatgtccctatggaagcatattgttattatataattacatatttgcatatgtatgactcccaaattttcacataaaatagatttttgtataa

SEQ ID NO: 163413 - DNA, 300 bp, Artificial Sequence
  derived and/or modified sequence
atgaaggcctccgctgccctgctttgtctcctgctgaccgcagccgccttttcaccccagggactggcacagccagtggggattaatacgagcaccacttgttgctaccgcttcatcaacaagaaaattcccaaacagagactggagtcataccggaggactacctcatcgcattgtcctcgagaagccgtgatcttcaagacaaagttggacaaagagatctgcgcggaccctacgcaaaaatgggtgcaggacttcatgaagcacctggacaaaaagacacagacccccaagctctag

SEQ ID NO: 163414 - DNA, 330 bp, Artificial Sequence
  derived and/or modified sequence
atgtggaagcctatgccctcaccttctaatatgaaggcaagcgcggctcttctgtgtcttcttctgacagcagctgctttttcaccacagggtctggcccagccagtgggcatcaatacctccacaacgtgctgttaccgctttattaataagaagatacctaaacagagactggagtcctatcgaagaaccacttccagtcattgcccacgggaagctgtaatctttaagacgaaactggacaaagagatctgcgctgacccgacgcaaaaatgggtgcaagattttatgaaacacctggacaagaaaactcagacccccaaactgtag

SEQ ID NO: 163415 - DNA, 276 bp, Artificial Sequence
  derived and/or modified sequence
atgtggaaaccgatgccgtcaccgagcaacatgaaggcgagcgcagcactcctctgcttgctacttactgcggcagcgttttccccccaaggacttgcacaacctgagcggcctagaacacacccacagtggacctttcttctcgtggtctcactccagctcggacttattcttcaattgccagctgccaccgacctctccataagaaagtctctttcccgagggtggcgggcaaccgaaggtccaccagtggctacagtccccggtaagctgtag

SEQ ID NO: 163416 - DNA, 300 bp, Artificial Sequence
  derived and/or modified sequence
atgaaggccagcgctgccctgctgtgcctgctgctgacagctgctgccttcagcccccagggcctggcccagcctgtgggcatcaacaccagcaccacctgctgctaccgcttcatcaacaagaagatccccaagcagaggctggagagctacagaaggaccaccagcagccactgcccccgggaggccgtcatcttcaagaccaagctggacaaggagatctgtgccgaccccacccagaagtgggtgcaggacttcatgaagcacctggacaagaagacccagacccccaagctgtag

SEQ ID NO: 163417 - DNA, 330 bp, Artificial Sequence
  derived and/or modified sequence
atgtggaagcccatgcccagccccagcaacatgaaggccagcgctgccctgctgtgcctgctgctgacagctgctgccttcagcccccagggcctggcccagcctgtgggcatcaacaccagcaccacctgctgctaccgcttcatcaacaagaagatccccaagcagaggctggagagctacagaaggaccaccagcagccactgcccccgggaggccgtcatcttcaagaccaagctggacaaggagatctgtgccgaccccacccagaagtgggtgcaggacttcatgaagcacctggacaagaagacccagacccccaagctgtag

SEQ ID NO: 163418 - DNA, 300 bp, Artificial Sequence
  derived and/or modified sequence
atgaaggccagcgccgccctgctgtgcctgctgctgaccgccgccgcattctcacctcagggcttggcacagccagtgggaattaatacttcaacaacctgttgttacagattcattaataagaaaattcccaaacaaaggctggagagctataggcgaactacttcctcacattgcccccgcgaggccgttatctttaagaccaagctggataaggagatttgtgccgatcctacgcagaaatgggttcaggattttatgaaacacctcgacaaaaagacccagaccccaaagctctag

SEQ ID NO: 163419 - DNA, 330 bp, Artificial Sequence
  derived and/or modified sequence
atgtggaagcccatgcccagccccagcaacatgaaggccagcgccgcactgttatgcctgctgttaacggcggcagcatttagcccacagggccttgcccagccagtcggcattaatacatcaacaacctgttgttaccgattcattaacaaaaagatccctaaacagcggcttgaaagctaccgacgaacaacctcgagccattgtcctcgagaagcggtgatcttcaagaccaagctggacaaggagatctgtgcggatcccactcagaagtgggtgcaggattttatgaaacatctggataagaagacccagactcccaagctctag

SEQ ID NO: 163420 - DNA, 300 bp, Artificial Sequence
  derived and/or modified sequence
atgaaggctagcgcagcattgttatgcctgctcctcaccgccgctgccttctcaccacaagggttggcccagcccgtgggaattaacacgagcaccacttgctgctatcggttcattaataagaagatccctaagcagcgtctcgaatcctaccgaagaacaacttctagccactgccctagggaagcagtcatctttaagacgaagcttgacaaggaaatctgtgccgatccaacacagaagtgggtgcaggacttcatgaaacacctcgataagaagacccagacccccaaattatag

SEQ ID NO: 163421 - DNA, 330 bp, Artificial Sequence
  derived and/or modified sequence
atgtggaaaccaatgcccagcccaagtaatatgaaggcaagcgcggctttgttgtgcctccttttgactgcagccgcatttagtcctcaaggtcttgcacagcccgtcggcatcaatacgtctacgacttgctgttatagattcatcaacaagaagattcccaagcaacgcctcgagtcctataggcgcaccacaagcagtcactgtcccagagaggcagtcatttttaagactaaacttgataaagaaatctgcgctgaccccacacaaaagtgggtgcaggactttatgaagcacttggataagaagacccagacacccaaactgtag

SEQ ID NO: 163422 - protein, 98 aa, Artificial Sequence
  derived and/or modified sequence
MALLLALSLLVLWTSPAPTLSGTNDAEDCCLSVTQKPIPGYIVRNFHYLLIKDGCRVPAVVFTTLRGRQLCAPPDQPWVERIIQRLQRTSAKMKRRSS

SEQ ID NO: 163423 - protein, 104 aa, Artificial Sequence
  derived and/or modified sequence
MALLLALSLLVLWTSPAPTLSGTNDAEDCCLSVTQKPIPGYIVRNFHYLLIKDGCRVPAVVFTTLRGRQLCAPPDQPWVERIIQRLQRTSAKASLALPGPVSSL

SEQ ID NO: 163424 - DNA, 297 bp, Artificial Sequence
  derived and/or modified sequence
atggcactcctgctcgctttgtccctgttggttctgtggacatctccggctcctactttgtcgggcaccaatgatgccgaagattgctgtctcagcgtgacccagaagccgataccaggctacatcgtccgtaattttcattaccttctgatcaaagacgggtgccgggtgcccgccgtagtatttaccacactgagggggcggcaactctgtgcacctcctgatcagccatgggtggagcgaatcattcagagactccaacggacctccgcaaaaatgaagcgtcgcagttcatag

SEQ ID NO: 163425 - DNA, 315 bp, Artificial Sequence
  derived and/or modified sequence
atggccctgctcctcgccctgtctttactagtgctttggactagccccgctccgaccctctctgggaccaacgatgctgaggattgctgtctgagcgtcactcagaaacccatacctggatacatagtcagaaatttccactaccttcttattaaagatgggtgtagggtgccagctgtcgttttcactactctgcgtgggcgccagctttgtgcccctccggatcagccctgggtggaacgaattattcagcggctacaaagaacatccgccaaggcatctttggctctgcctggtcctgtaagttccctgtag

SEQ ID NO: 163426 - DNA, 297 bp, Artificial Sequence
  derived and/or modified sequence
atggccctgctgctggccctgagcctgctggtgctgtggaccagccctgcccccaccctgagcggcaccaatgatgctgaggactgctgcctgtctgtgacccagaagcccatccctggctacatcgtgaggaacttccactacctgctgatcaaggatggctgccgggtgcctgctgtggtgttcaccaccctgcggggccggcagctgtgtgcccccccagaccagccctgggtggagcgcatcatccagaggctgcagaggaccagcgccaagatgaagagaagaagcagctag

SEQ ID NO: 163427 - DNA, 315 bp, Artificial Sequence
  derived and/or modified sequence
atggccctgctgctggccctgagcctgctggtgctgtggaccagccctgcccccaccctgagcggcaccaatgatgctgaggactgctgcctgtctgtgacccagaagcccatccctggctacatcgtgaggaacttccactacctgctgatcaaggatggctgccgggtgcctgctgtggtgttcaccaccctgcggggccggcagctgtgtgcccccccagaccagccctgggtggagcgcatcatccagaggctgcagaggaccagcgccaaggccagcctggccctgcccggccctgtgagcagcctgtag

SEQ ID NO: 163428 - DNA, 297 bp, Artificial Sequence
  derived and/or modified sequence
atggccctgctgctggccctgagcctgctggtgctgtggaccagcccggcccctacactgtctgggaccaatgacgcagaggattgttgtctgagcgtgacccagaagcccatcccaggatacatcgtaagaaattttcactatctactgataaaggacgggtgtagggtacccgccgtcgtcttcactacgctgcgagggagacagctgtgtgcacctccggatcagccatgggtggagcggatcattcaacgcttacagagaacatccgcaaaaatgaaaaggcgctccagctag

SEQ ID NO: 163429 - DNA, 315 bp, Artificial Sequence
  derived and/or modified sequence
atggccctgctgctggccctgagcctgctggtgctgtggaccagcccagctcctacacttagcggaactaacgatgcagaggactgttgcctctctgtcacacaaaagcccatcccaggatacattgttcggaatttccactatctgctgatcaaagacggctgccgggtgccagcggtcgttttcacaactctccgaggccggcagttatgcgcccctcctgatcagccgtgggtcgagcggattatccagaggctgcaacgaacctctgcaaaagcctcccttgccctgcctggtcccgtatcttccctgtag

SEQ ID NO: 163430 - DNA, 297 bp, Artificial Sequence
  derived and/or modified sequence
atggcactgcttttagccctgagtctgctggtgctttggacatcccccgcacccacactgagcgggacaaatgacgctgaggactgttgcctctccgttacccagaagcctataccgggatacattgttaggaactttcattacctgttgatcaaggatggctgccgggtgccagccgtcgtcttcactaccctgcggggaagacagctgtgcgcccctccagaccagccatgggtggagagaatcatacagcggcttcaacgtacgtcagctaagatgaaaaggcggtctagctag

SEQ ID NO: 163431 - DNA, 315 bp, Artificial Sequence
  derived and/or modified sequence
atggctctactcctggccctgtctctcctggtgctgtggacctcccccgcacctaccttgtcaggaaccaatgatgcggaggattgctgcctgagcgtcactcagaagccgattcctggctatattgtccgcaactttcattatctgttaattaaggatgggtgtagggtgccggcagtggtgttcacgaccttgaggggccgacagctgtgcgcaccaccagaccagccctgggttgagcgaatcattcagcgactccaacgtacctccgccaaggcttctctcgctctgccaggccctgtcagcagcctgtag

SEQ ID NO: 163432 - DNA, 687 bp, Artificial Sequence
  derived and/or modified sequence
cattcccagcctcacatcactcacaccttgcatttcacccctgcatcccagtcgccctgcagcctcacacagatcctgcacacacccagacagctggcgctcacacattcaccgttggcctgcctctgttcaccctccatggccctgctactggccctcagcctgctggttctctggacttccccagccccaactctgagtggcaccaatgatgctgaagactgctgcctgtctgtgacccagaaacccatccctgggtacatcgtgaggaacttccactaccttctcatcaaggatggctgcagggtgcctgctgtagtgttcaccacactgaggggccgccagctctgtgcacccccagaccagccctgggtagaacgcatcatccagagactgcagaggacctcagccaagatgaagcgccgcagcagttaacctatgaccgtgcagagggagcccggagtccgagtcaagcattgtgaattattacctaacctggggaaccgaggaccagaaggaaggaccaggcttccagctcctctgcaccagacctgaccagccaggacagggcctggggtgtgtgtgagtgtgagtgtgagcgagagggtgagtgtggtcagagtaaagctgctccacccccagattgcaatgctaccaataaagccgcctggtgtttacaactaattg

SEQ ID NO: 163433 - DNA, 414 bp, Artificial Sequence
  derived and/or modified sequence
tcctgcacacacccagacagctggcgctcacacattcaccgttggcctgcctctgttcaccctccatggccctgctactggccctcagcctgctggttctctggacttccccagccccaactctgagtggcaccaatgatgctgaagactgctgcctgtctgtgacccagaaacccatccctgggtacatcgtgaggaacttccactaccttctcatcaaggatggctgcagggtgcctgctgtagtgttcaccacactgaggggccgccagctctgtgcacccccagaccagccctgggtagaacgcatcatccagagactgcagaggacctcagccaaggcaagcctggccctccctggccctgtctcctccctctgagctcctgtctaagattccagcccatgatccttcc

SEQ ID NO: 163434 - DNA, 297 bp, Artificial Sequence
  derived and/or modified sequence
atggccctgctgctggccctgagcctgctggtgctgtggaccagccccgcccccaccctgagcggcaccaacgacgccgaggactgctgcctgagcgtgacccagaagcccatccccggctacatcgtgagaaacttccactacctgctgatcaaggacggctgcagagtgcccgccgtggtgttcaccaccctgagaggcagacagctgtgcgccccccccgaccagccctgggtggagagaatcatccagagactgcagagaaccagcgccaagatgaagagaagaagcagctag

SEQ ID NO: 163435 - DNA, 315 bp, Artificial Sequence
  derived and/or modified sequence
atggccctgctgctggccctgagcctgctggtgctgtggaccagccccgcccccaccctgagcggcaccaacgacgccgaggactgctgcctgagcgtgacccagaagcccatccccggctacatcgtgagaaacttccactacctgctgatcaaggacggctgcagagtgcccgccgtggtgttcaccaccctgagaggcagacagctgtgcgccccccccgaccagccctgggtggagagaatcatccagagactgcagagaaccagcgccaaggccagcctggccctgcccggccccgtgagcagcctgtag

SEQ ID NO: 163436 - protein, 344 aa, Artificial Sequence
  derived and/or modified sequence
MPRVYIGRLSYNVREKDIQRFFSGYGRLLEVDLKNGYGFVEFEDSRDADDAVYELNGKELCGERVIVEHARGPRRDRDGYSYGSRSGGGGYSSRRTSGRDKYGPPVRTEYRLIVENLSSRCSWQDLKDFMRQAGEVTYADAHKERTNEGVIEFRSYSDMKRALDKLDGTEINGRNIRLIEDKPRTSHRRSYSGSRSRSRSRRRSRSRSRRSSRSRSRSISKSRSRSRSRSKGRSRSRSKGRKSRSKSKSKPKSDRGSHSHSRSRSKDEYEKSRSRSRSRSPKENGKGDIKSKSRSRSQSRSNSPLPVPPSKARSVSPPPKRATSRSRSRSRSKSRSRSRSSSRD

SEQ ID NO: 163437 - DNA, 1035 bp, Artificial Sequence
  derived and/or modified sequence
atgcctcgcgtatatattgggcggctgtcctataacgtcagggagaaagacatccagcgttttttcagcggatacggacggttgttagaggtggacctaaaaaacggatacgggtttgttgaatttgaggacagcagggatgcagatgatgctgtgtatgaactaaacggtaaagagctgtgtggagaaagagtaattgtggaacacgcccgtggccctcgacgcgaccgcgacggatactcctacggcagtaggtccggtggtggaggctattcctcacgacgcacctcgggtagagataagtatggcccaccagtacgaacggagtatcgtctcatcgtggaaaacttaagttcccgttgctcctggcaagatcttaaggattttatgcgtcaggctggggaggtgacctatgctgatgcccataaggaacgcaccaatgagggtgtgattgagtttcggtcctatagtgatatgaagcgcgcattagacaaactcgatggcactgagatcaatgggcgaaatattcgactgattgaggacaagccgcggacctctcatcgaaggtcttactcagggtctcggtccaggtccaggagcagacgcaggtctcggagcaggtcgcggcgatcttcccgaagcagatctcgctcaatttctaagtcaagaagcagatcaagaagtaggtctaagggcaggtctcgaagcaggtcgaaggggagaaaaagccgtagcaaaagcaagtctaaacctaagtcagacagaggctcgcatagccacagtagaagccgctcaaaagacgaatatgaaaaatccaggtctcggtccaggtcccgctcccctaaagagaacggcaagggggacataaagagtaaaagtcgttctcgttctcagtcccgcagtaactctccactgcccgttcctccaagcaaggctaggtctgtttctcccccacccaagagggccacctctcggtcccggtcaagatcccgtagcaaaagccgatcccggtcaaggtcctcctcccgcgattag

SEQ ID NO: 163438 - DNA, 1035 bp, Artificial Sequence
  derived and/or modified sequence
atgccccgggtgtacatcggccgcctgagctacaacgtgcgggagaaggacatccagcgcttcttcagcggctacggccgcctgctggaggtggacctgaagaatggctacggctttgtggagtttgaggacagcagagatgctgatgatgctgtgtatgagctgaatggcaaggagctgtgtggggagagggtcatcgtggagcacgcccggggcccccggcgggacagagatggctacagctatggcagccgcagcggcggcggcggctacagcagcaggaggaccagcggccgggacaagtatggcccccctgtgaggacagagtaccgcctgattgtggagaacctgagcagccgctgctcctggcaggacctgaaggacttcatgaggcaggccggggaggtgacctatgcagatgcccacaaggagaggaccaatgaaggagtgattgagttccgcagctacagcgacatgaagagggccctggacaagctggatggaacagagatcaatggaagaaacatccggctgattgaggacaagcccaggaccagccaccggcgcagctacagcggcagccgcagccgcagccgcagcagaagaagaagccgcagccgcagcagaagaagcagccgcagccgcagccgcagcatcagcaagagccgcagccgcagccgcagccgcagcaagggccgcagccgcagccgcagcaaaggaaggaagagccgcagcaagagcaagagcaagcccaagagtgaccggggcagccacagccacagccgcagccgcagcaaggatgaatatgagaagagccgcagccgcagccgcagccgcagccccaaggaaaatggcaagggggacatcaagagcaagagccgcagccgcagccagagccgcagcaacagccccctgcctgtgccccccagcaaggcccggtctgtgtccccaccacccaagagggccaccagccgcagccgcagccgcagccgcagcaagagccgcagccgcagccgcagcagcagccgggactag

SEQ ID NO: 163439 - DNA, 1035 bp, Artificial Sequence
  derived and/or modified sequence
atgccccgggtgtacatcggccggctgagctacaacgtgcgggagaaagatattcaaaggttcttttctggttacggacggttgctcgaagtggatctgaagaatggatacggcttcgtcgaattcgaggactccagggatgccgacgacgcagtttatgaattgaacgggaaggagctctgcggagagcgggtcatcgtcgagcatgctagaggtcccaggcgcgaccgggatggatacagctatggcagcaggagcggagggggaggctacagcagccgtcggacttcaggcagagataaatacggcccgcctgttaggaccgaatatagactgatcgtcgagaacctttcctctcgctgttcatggcaagacctaaaggacttcatgaggcaggccggagaggtgacctatgctgacgctcacaaggaacgaaccaacgagggtgtgatcgagttcaggagctactctgacatgaagagggctttagacaagctcgacggaacagaaataaacggtcgcaatataagattaatagaggacaaaccgcggacgagccaccgccgctcctactctggcagtaggtctcggtccagaagcagacgaagatctcgctccaggtctcgcaggagcagcaggtcccgtagccggtcaataagcaagtcccgttctcgcagcaggtcaaggtccaagggtaggtcccggtcccgttcaaagggtcgcaaatctcgctctaaatccaaatccaagcctaagagcgatcgtggcagccacagccattcgcgaagtcgaagcaaggacgagtacgaaaaatcccgaagtagaagtcgatcgagatcccctaaagagaatgggaagggagatattaaaagtaaatcaaggtcaagatcccagagtcggtctaactcccctcttcctgttccccccagcaaagccagatcagtctcccccccgcctaaacgagccacatcccgctcccgtagcagaagcaggtcaaagagccgcagcagaagccgctctagttcccgcgactag

SEQ ID NO: 163440 - DNA, 1035 bp, Artificial Sequence
  derived and/or modified sequence
atgcctagagtgtacattggcagattgagctacaatgtgcgtgagaaagacatccagcggttcttcagcgggtacggaaggctcttagaagttgatttgaaaaacggctacggatttgtagagtttgaagacagtcgggacgccgacgatgcagtctacgagctcaatgggaaagaattgtgcggagaacgggtgattgttgagcacgctagaggaccccgacgtgatagggacgggtatagctatggtagccgatccggtggcggaggttatagctccagacgcaccagcggtcgtgacaagtacggtcccccagtgaggaccgaataccgcctgatcgtggaaaacctgtcctcccgctgttcgtggcaggatctgaaagacttcatgcgacaggccggtgaagtcacctatgccgacgcacacaaggaaagaaccaacgagggagttatcgagtttaggagttacagtgatatgaaacgcgcattggacaaattagatgggaccgagatcaacggcagaaacatacggctaattgaagacaagcctcgcacatcccatcggaggagttactccggatctagatcccgtagtagaagccgccgacgatctcggagtaggagcagacgcagttccaggagtagatcccggagcatctcaaagtcccggagtagatcaagatctcgaagtaagggaagaagcaggagccggagcaagggccgtaagtctagatccaagagtaaatcaaaacctaagtctgatcgcggaagccattcacactccaggtcccgaagtaaagacgagtacgagaagagcaggtctcgatcaaggtctagatcccccaaagaaaacgggaagggcgacatcaagagcaaatctcggagtcgttctcagtcacgcagtaatagccccttaccggtgcccccttcaaaggctagatctgtgtctcccccacccaaacgggcaacatcccgcagccgctccagaagtaggtccaaatcacgcagtagaagtaggagttctagtcgggactag

SEQ ID NO: 163441 - DNA, 3683 bp, Artificial Sequence
  derived and/or modified sequence
gtgaggcgcgtgttcgggctcttgccgtccccgcacccgcaccgcggttactggcttgcggtccgccgttcgacaaccagcccttgggtccccgcccgccacggacatgccgcgcgtctacataggacgcctgagctacaacgtccgggagaaggacatccagcgctttttcagtggctatggccgcctcctcgaagtagacctcaaaaatgggtacggcttcgtggagttcgaggactcccgcgacgccgacgacgccgtttacgagctgaacggcaaggagctctgcggcgagcgcgtgatcgtagagcacgcccggggcccgcgtcgcgatcgcgacggctacagctacggaagccgcagtggtggaggtggatacagcagtcggagaacatctggcagagacaaatacggaccacctgttcgtacagaatacaggcttattgtagaaaatctttctagtcggtgcagttggcaagatttaaaggattttatgcgacaagcaggtgaagtaacctatgcggatgcccacaaggaacgaacaaatgagggtgtaattgagtttcgctcctactctgacatgaagcgtgctttggacaaactggatggcacagaaataaatggcagaaatattaggcttattgaagataagccacgcacaagccataggcgatcttactctggaagcagatccaggtctcgatctagaagacggtcacgaagtaggagtcgcaggagcagccgcagtagatctcgaagtatctcaaaaagtcgctcccgttccaggtcgcggagcaaaggtcgatcacgttctcgatcaaaaggcaggaaatctagatcaaagagcaaatctaagcccaagtctgatcggggctcccattcacattctcgaagcagatctaaggatgagtatgagaaatctcgaagcaggtctcggtcccgatcccctaaagaaaatggaaagggtgatataaagtcaaaatccagatcaaggagccagtcccgttccaattcgccgctacctgttccaccctcaaaggcccgttctgtgtcccctccaccaaaaagagctacttcaagatcccgttctagatctcgctcaaagtcaagatcaaggtccaggtcgagttccagagattaactcagaactccttgtttgcacattattatggaacactttcctacttaggcagttactcttccatgtttatacttggcctcttctgcaagaggaatctcttgaaaacaggggcacacagaaatttgatttgtggccaaattggatgaaaaagatgaggctctaaggaaatggtggcatgaagaccctctcccttctttgtagaattaagataactttgattttatagcttttgagctaacgtaacttttgtaaagattaagctcatttagtgttgtttttttttttttttttttttttttttttttttttttagtatttcagcaggatctgctggcagggtttttttgttttatttgtttgcttatttttaaattaactgttttgagctttgaatacttaaggctttagagggagaacccaattttcaattatgttggctttttataaagcttgagttatgtaagatttaaataaaagtttgctaccaagatgattgccttattgaataggtcactattaaattcctttaaatgttgatatctgccatttgtggaaacaacgtaaattctacttaagtgtaaacaaggcaagcctcagaccagcaataaattactcagtttggataacattattttgtgcagttaatcaaatttgccaaagtctttatctgcccctttaacaagttgagtaaaaataaaaggtattttttagtcaatgtgttccatgattttgcttaaattaatacttttaagtaatggaacttttttcaaaggcaaatttaaactatttaagaaatagctcctaatacttgggatcttgtttagagaatccactttctggaagttctcagcataattagtgttgagagtggttcagttgtctttaatgtttgtcatgtggaaatggaagtagcctctttttgttctgaaattgagtttattcaaagtgtaaaagcacatactgcattttctgctgaaagatcattatgtttaacaggcacttaatctcagtaaagtcagttgccagttaagttccacccagtagtcagtcccctttgtagttagtgggattatttgataattggttagatcatacttgtaaattttaatgctttgtgtaattggtttgaaaaacagtgaaatgggtaaacgcaaaacttttgtactttattacgagtaaagtgtaatgagtactgtggaaaccaaatttgaatactgcaaatttgtaggagttactaggttagcaattagtccatacatccataagcctgatgagttgaaattgcagtttgagaagtgaattaaccttacatccctttgttcagataccttaaaagttactttatttaaaagcatttattaatcttagtctgaaatcaaaatatagattaattggctcagctttaatacctttctaggaggtgtcacaatgtagggtaccaagggttggattgtgatggggcatggtcgtacactgctcattgtgccacaggtgtgactggaaagcatgatattctagggttggtttgtagattcaaataatccagaaatatacctaataagattgagtgaaaaatttgagtcaaatatctagggcattcacagagtagctgtgagttcttggtaatgtgaaaaaggccttgtttttcagaaattcctgggtttcctgttaaaaaatcttaaagcccaaccttaggaatatagtgccccaaaaggcggatgcttcttccattatcttattttctttgatactttatttaattagatgtttataaagaaatgggtttatttttccagcataaacctcagaatttaaggaaagaaaatgatgtctgttgttatagttcattgttttgcctactcagcagaagtgatgactcttaaaaattggctttgaccaaagttctcttgttttcagggaaagaacataaaagctttttgaactacagcctttttaaaagagggatgggaggatattacagtaagaaattaggctttctaaaagtatgaaacatccttcaactgggctctcttgttaataggacatcatatggtaatagactggtttgactatattgttagctgccacagtaagcaggtcattgtataggtaaatgcctgcacccataattttctagtaatagccacgaccaatttattaacagtcagggcctatccttgcctgtagttctcagtcactggatgcacaaaatcactgtgtaacattggctcacttggtgagcatagggttgactgataaaatgtttaattcccttgctagcttgtgagaagaatgagttgatgacatgctccataccagtggctagatggagtattaaggtggagcagaaaagaagtgagaacatcttgattcccctttcttttacttgatggtgtttatgaacatgccgtagtgcctttatggccagtttgagtcctgcctactttgacttttacgttcccattcctgtgttaccaccttcctcccgatttgttcacctattttgtgctttaaatctcaataaaatacttactgagggaaa

SEQ ID NO: 163442 - DNA, 1035 bp, Artificial Sequence
  derived and/or modified sequence
atgcccagagtgtacatcggcagactgagctacaacgtgagagagaaggacatccagagattcttcagcggctacggcagactgctggaggtggacctgaagaacggctacggcttcgtggagttcgaggacagcagagacgccgacgacgccgtgtacgagctgaacggcaaggagctgtgcggcgagagagtgatcgtggagcacgccagaggccccagaagagacagagacggctacagctacggcagcagaagcggcggcggcggctacagcagcagaagaaccagcggcagagacaagtacggcccccccgtgagaaccgagtacagactgatcgtggagaacctgagcagcagatgcagctggcaggacctgaaggacttcatgagacaggccggcgaggtgacctacgccgacgcccacaaggagagaaccaacgagggcgtgatcgagttcagaagctacagcgacatgaagagagccctggacaagctggacggcaccgagatcaacggcagaaacatcagactgatcgaggacaagcccagaaccagccacagaagaagctacagcggcagcagaagcagaagcagaagcagaagaagaagcagaagcagaagcagaagaagcagcagaagcagaagcagaagcatcagcaagagcagaagcagaagcagaagcagaagcaagggcagaagcagaagcagaagcaagggcagaaagagcagaagcaagagcaagagcaagcccaagagcgacagaggcagccacagccacagcagaagcagaagcaaggacgagtacgagaagagcagaagcagaagcagaagcagaagccccaaggagaacggcaagggcgacatcaagagcaagagcagaagcagaagccagagcagaagcaacagccccctgcccgtgccccccagcaaggccagaagcgtgagccccccccccaagagagccaccagcagaagcagaagcagaagcagaagcaagagcagaagcagaagcagaagcagcagcagagactag

SEQ ID NO: 163443 - protein, 1697 aa, Artificial Sequence
  derived and/or modified sequence
MMAQFPTAMNGGPNMWAITSEERTKHDRQFDNLKPSGGYITGDQARNFFLQSGLPAPVLAEIWALSDLNKDGKMDQQEFSIAMKLIKLKLQGQQLPVVLPPIMKQPPMFSPLISARFGMGSMPNLSIPQPLPPAAPITSLSSATSGTNLPPLMMPTPLVPSVSTSSLPNGTASLIQPLPIPYSSSTLPHGSSYSLMMGGFGGASIQKAQSLIDLGSSSSTSSTASLSGNSPKTGTSEWAVPQPTRLKYRQKFNTLDKSMSGYLSGFQARNALLQSNLSQTQLATIWTLADVDGDGQLKAEEFILAMHLTDMAKAGQPLPLTLPPELVPPSFRGGKQIDSINGTLPSYQKMQEEEPQKKLPVTFEDKRKANYERGNMELEKRRQALMEQQQREAERKAQKEKEEWERKQRELQEQEWKKQLELEKRLEKQRELERQREEERRKDIERREAAKQELERQRRLEWERIRRQELLNQKNREQEEIVRLNSKKKNLHLELEALNGKHQQISGRLQDVRLKKQTQKTELEVLDKQCDLEIMEIKQLQQELQEYQNKLIYLVPEKQLLNERIKNMQFSNTPDSGVSLLHKKSLEKEELCQRLKEQLDALEKETASKLSEMDSFNNQLKCGNMDDSVLQCLLSLLSCLNNLFLLLKELRETYNTQQLALEQLYKIKRDKLKEIERKRLELMQKKKLEDEAARKAKQGKENLWKENLRKEEEEKQKRLQEEKTQEKIQEEERKAEEKQRKDKDTLKAEEKKRETASVLVNYRALYPFEARNHDEMSFNSGDIIQVDEKTVGEPGWLYGSFQGNFGWFPCNYVEKMPSSENEKAVSPKKALLPPTVSLSATSTSSEPLSSNQPASVTDYQNVSFSNLTVNTSWQKKSAFTRTVSPGSVSPIHGQGQVVENLKAQALCSWTAKKDNHLNFSKHDIITVLEQQENWWFGEVHGGRGWFPKSYVKIIPGSEVKREEPEALYAAVNKKPTSAAYSVGEEYIALYPYSSVEPGDLTFTEGEEILVTQKDGEWWTGSIGDRSGIFPSNYVKPKDQESFGSASKSGASNKKPEIAQVTSAYVASGSEQLSLAPGQLILILKKNTSGWWQGELQARGKKRQKGWFPASHVKLLGPSSERATPAFHPVCQVIAMYDYAANNEDELSFSKGQLINVMNKDDPDWWQGEINGVTGLFPSNYVKMTTDSDPSQQWCADLQTLDTMQPIERKRQGYIHELIQTEERYMADLQLVVEVFQKRMAESGFLTEGEMALIFVNWKELIMSNTKLLKALRVRKKTGGEKMPVQMIGDILAAELSHMQAYIRFCSCQLNGAALLQQKTDEDTDFKEFLKKLASDPRCKGMPLSSFLLKPMQRITRYPLLIRSILENTPESHADHSSLKLALERAEELCSQVNEGVREKENSDRLEWIQAHVQCEGLAEQLIFNSLTNCLGPRKLLHSGKLYKTKSNKELHGFLFNDFLLLTYMVKQFAVSSGSEKLFSSKSNAQFKMYKTPIFLNEVLVKLPTDPSSDEPVFHISHIDRVYTLRTDNINERTAWVQKIKAASEQYIDTEKKKREKAYQARSQKTSGIGRLMVHVIEATELKACKPNGKSNPYCEISMGSQSYTTRTIQDTLNPKWNFNCQFFIKDLYQDVLCLTLFDRDQFSPDDFLGRTEIPVAKIRTEQESKGPMTRRLLLHEVPTGEVWVRFDLQLFEQKTLL

SEQ ID NO: 163444 - DNA, 5094 bp, Artificial Sequence
  derived and/or modified sequence
atgatggcccaattccccaccgcaatgaatgggggacctaacatgtgggccattaccagcgaggagaggaccaagcacgacagacagtttgataacctgaagccatccggcgggtatatcacaggcgaccaagctagaaacttctttttgcagtccggcctgcccgccccagttctggccgagatctgggctctctccgaccttaacaaagacggtaaaatggatcaacaggaattcagcatcgccatgaaactgatcaagcttaagctgcaggggcaacagctcccagtagtgcttccgcctattatgaagcagcctcctatgttttctccactcatctcagcccgatttgggatgggctccatgcccaacctgtcgatcccacagccacttcctcctgctgcgcctattacttcactctccagcgccacaagcggaaccaatctgccgcccctaatgatgccgactcccttggtgccaagtgtctcaacctcctcccttccaaatgggactgccagtttaatccagccgctgcccataccatactcctccagcactctgccacacggatctagctactctctgatgatgggcggatttggaggcgcaagcatccaaaaggcccagtcactgatcgatttgggctcctcatctagtacaagctctaccgccagcctctctgggaattctcctaagaccggaaccagtgaatgggccgtgccccagccgactagactaaaatatcgtcagaagttcaacacccttgacaaaagcatgtccggatacttaagcggcttccaggcccggaatgccctccttcagtccaatctgagccagacgcagctcgcaactatatggacactggcagacgtcgatggagatgggcaactcaaagcagaggagtttattcttgcaatgcacctcaccgacatggcaaaggccggacagcccctacccctgacccttccacctgagctcgtgccgcctagttttaggggtggaaagcagatagattcaatcaatgggactctccccagctaccaaaagatgcaagaggaagagccccagaagaagctgccggttacatttgaagataaacggaaagctaattatgaaagagggaacatggagcttgaaaaacgtcggcaggcccttatggaacaacagcagagagaggcagaaaggaaggcacagaaggaaaaggaagaatgggaacggaagcaacgcgaactgcaagaacaggagtggaaaaaacagttggaactcgaaaagagactggagaaacagcgcgaacttgaacgtcagagagaagaggagaggcgcaaagacatcgaaagaagggaggcagcgaagcaggaacttgagaggcagagacgattagaatgggaacgaatccgcagacaggagctgctcaaccagaagaatcgagaacaggaggaaatagttcgtctgaactccaagaaaaaaaacctccacttggagctcgaagctttaaacggaaaacaccagcagatttcagggcgattgcaggatgtgcggctaaaaaagcaaacacaaaagaccgaactcgaggtactggataagcagtgcgacctagagatcatggaaattaagcagctgcaacaggaattgcaggaataccagaacaagttgatttatctcgtgcctgaaaaacaactcctgaatgagaggataaagaatatgcagtttagcaatacgccagactccggcgtgagtcttctgcacaagaagagtctagagaaagaggagttgtgccaaaggctgaaggagcagctggatgcactggagaaggagactgccagcaagctcagcgagatggactcattcaataaccaactgaagtgcgggaacatggatgactccgtcctgcagtgtctcctcagcctcctgagttgcctgaacaacctgttcctacttctgaaggagctgcgggaaacttacaatactcagcagttggccttggagcaactgtacaaaatcaaacgggataagctcaaagaaattgagcggaagcgcctggagctcatgcagaagaaaaagctggaggatgaagcagcccgtaaggccaagcagggcaaggagaatctctggaaggaaaacctgcgaaaggaggaagaggagaagcagaagcgcctacaagaggaaaagacccaggagaagatccaagaagaagaaaggaaggccgaagaaaagcagcgcaaagacaaggacacattaaaagctgaggagaagaaacgtgaaacagcaagcgtcctggtgaattacagggccttatacccattcgaggccaggaaccatgatgagatgtcatttaacagcggggatatcatacaggtggacgagaagaccgttggcgaacccggttggctgtacggaagctttcaggggaattttggttggtttccctgtaactacgtcgagaagatgccaagcagcgagaatgaaaaagcggtgtcccccaaaaaggccctactgccccccaccgtgtcgctgagcgccacctcgacgtcaagcgagcccctgtcttcaaatcagcccgccagtgtcaccgattatcagaacgtctcattctctaacctcaccgtgaacacttcttggcagaagaaatcggcgtttacccgcactgtcagccccggcagtgttagccctatccatggccaggggcaggttgtggagaacttgaaggcccaggccctttgctcttggaccgccaaaaaagataaccatctgaacttctcaaaacacgatattatcaccgtactcgagcagcaggagaattggtggttcggggaggttcatggcggtagggggtggttccccaaaagctacgtgaagattataccaggctccgaggttaagcgagaggaaccagaagccctctacgcagctgtcaacaagaagccgacaagcgccgcctattctgtcggagaggagtacattgccctctatccatactcatccgtagagccgggagatctgacttttaccgaaggtgaggaaattctcgtaacccagaaagatggagagtggtggacagggagcattggggatcgcagcgggatttttccctccaactatgtaaaacccaaggaccaggaaagcttcgggagcgcctccaagagcggggcttcaaacaagaaacctgagatagctcaggtaacctccgcctacgttgccagcggctcagaacaactgtcactcgcccccggccagcttatcctgatcctaaagaaaaatacttccgggtggtggcagggtgagttgcaggcccgggggaaaaaacgccagaagggctggttccctgcctcgcacgtgaagttattagggccatctagtgaaagagcaactccggccttccatccagtctgccaggttattgctatgtatgattacgctgccaataatgaggatgagctctcttttagcaagggccaattaattaacgttatgaacaaagacgaccccgattggtggcagggtgagataaacggtgtcacaggactattccctagcaattacgtcaagatgacaaccgattccgacccaagccagcaatggtgtgcagacttacaaactctagacactatgcagcccattgagcgaaagcggcagggttacattcacgagctgatacagaccgaggaacggtatatggccgatcttcagctggtcgtggaggtgtttcagaaaaggatggccgagagcgggtttctgaccgagggcgagatggcactaatatttgttaactggaaagaacttataatgtccaatacaaaactgctgaaggctctgagagtgaggaaaaaaactggaggcgagaagatgccagtgcagatgattggcgatatcttggctgctgagttgtcccatatgcaggcatatattaggttttgctcttgccagttaaatggagcggcattactccagcagaaaacggacgaggatacagatttcaaggaattcttgaaaaagctagcctctgaccctcgatgcaaaggaatgcctctgtcctcttttctgctcaaacccatgcaaaggattactcgctatcccctactgatacggtctatactggagaacaccccagagtctcatgctgatcattcttccctgaaactggcactagagagggctgaggagctctgttcgcaggtcaatgagggagttcgggagaaagagaacagcgaccgcctcgaatggatccaggctcatgtgcagtgcgaaggactagctgaacagttgattttcaattccctgactaactgtctggggccacggaaattgctgcactccggcaaactgtacaagacaaagagcaacaaagaattacatggattcttgtttaatgattttctgttactgacatatatggtgaaacaattcgccgtgtctagtgggagtgaaaagctgttctctagcaagagcaacgcccagttcaagatgtacaagactcccatattcctgaacgaggtgctcgtgaagctccccactgatcccagcagcgacgagcccgtctttcatatatcccatatcgatcgagtgtatacgttgcggacagacaatattaatgagcgaaccgcgtgggtgcagaagatcaaggcagctagcgaacagtacatcgatacagagaagaagaagagagagaaagcgtatcaggctagatcgcagaaaacctccggcattggacgcttgatggtgcacgttattgaggcaacagagctcaaagcttgtaagcccaacgggaaaagcaacccatactgtgagatcagtatgggtagtcagagttacaccacaagaactatccaggacactttgaacccaaaatggaacttcaactgccagttcttcattaaggatctgtaccaggatgtactgtgtctgacgttgttcgacagggaccagttcagcccagacgacttcctgggccggacggaaatcccggttgccaagattcggacggagcaggaaagcaaggggcctatgactcggagactcctgctgcatgaggtccctactggggaggtctgggtgagatttgacctgcagctgtttgagcagaaaacgcttttgtag

SEQ ID NO: 163445 - DNA, 6300 bp, Artificial Sequence
  derived and/or modified sequence
gcttcggacccgaccgactcggagcagaccttcagggttcaatgccccggaactcctggggcgaggagccacgcccgggcagtttcgggctccggagggtggggagtcggtgcccggcagcgggcgggccgtcagctgcccggcccggcgcctacctccccgccccccggcttcctgcggaggccgcggccgccatgttgttgtggggctgaggcggcgccggcggagccctgagcggctgtgacaggctacgcaacaggttcgcgggcggcggcctgacgaccaagccagctgcagtggcggcgacggcggcagagcagggtctccccgcgcctgcccgcgcccaggctgccggtgctgagggacgcggagtcgcgctgtgacgagcgggaggcgcggcgagggcgccagatggctgagagctagcaaggaaaactcaggaccatgatggctcagtttcccacagctatgaatggagggccaaacatgtgggctattacctctgaagaacgtactaagcatgacaggcagtttgataacctcaaaccttcaggaggttacataacaggtgatcaagcacgtaattttttcctacaatcaggtctgccggcccctgttttagctgaaatatgggctttatcagacctaaacaaggatgggaagatggatcagcaagagttctccatagctatgaaactcatcaaactgaagcttcaaggccaacagttgcctgtggttctccctcctattatgaagcaaccccctatgttttctccattaatttctgctcgttttggaatgggaagcatgcccaatctgtccattcctcagccattgcctccagctgcacctataacatcattgtcttctgcgacttcagggaccaaccttcctcccttaatgatgcccactcccctagtgccttctgttagcacatcatcattaccaaatggaaccgccagtctcattcagcctttacccattccttattcttcttcaacattgcctcatgggtcatcttatagtctgatgatgggaggatttggaggtgctagtatacagaaagcgcagtctctgattgatttaggatctagtagctcaacttcctcgactgcttcactctcagggaactcacccaagactgggacctcagagtgggcagttcctcagcctacaagattaaaatatcggcaaaaatttaatactcttgacaaaagtatgagtggatatctctcaggttttcaagctagaaatgcccttcttcagtcaaatctttctcaaactcagctggctactatttggactctggctgacgttgatggtgatggacagctaaaagcagaagagtttattcttgcaatgcaccttactgacatggccaaagctggacagccattaccactgactttacctcctgagcttgttcctccatctttcagaggaggaaagcaaattgattccattaatggaactctgccttcatatcagaaaatgcaagaagaggagcctcagaagaaattaccagttacttttgaggacaaacggaaagccaactatgagcgagggaacatggagctggaaaagcgacgccaagccttgatggagcagcaacaaagggaggcagaacgtaaagcccagaaagaaaaggaagagtgggaacgaaaacagagagaattacaagaacaagaatggaagaaacaacttgaattagaaaaacgcttagagaagcaacgggaattggagagacaacgagaggaagaaaggagaaaagacatagaaagacgagaggcagcaaaacaggaacttgaacgacaacgtcgcttagaatgggagagaattcggcgacaggagcttctcaatcaaaagaatagagaacaagaagaaattgtcaggttaaactctaaaaagaagaatcttcatcttgagttggaagcactgaatggcaaacatcagcagatctcaggcagacttcaggatgtccgactcaaaaagcaaactcaaaagactgagctggaagttctggataagcagtgtgacttggaaattatggaaatcaagcaacttcaacaggaacttcaggaatatcagaataagcttatctatctggtacctgagaagcaattattaaatgaaagaattaaaaacatgcagttcagtaacacacctgattcaggggtcagtttacttcataaaaaatcattagaaaaggaagaattatgccaaagacttaaagaacagttagatgctcttgaaaaagaaactgcatctaagctgtcagaaatggattcttttaacaatcaactaaagtgtgggaatatggatgactctgttcttcagtgccttttgtctctgctaagctgtctcaacaacctcttcctcttacttaaggaactgagagaaacctacaacacacagcagttagcccttgaacagctttataagatcaaacgtgacaagttgaaggaaattgaaaggaaaagattagaactaatgcagaaaaagaaactagaagatgaggctgcaaggaaagcaaagcaaggaaaagaaaacttatggaaagaaaatcttagaaaggaggaagaagaaaaacaaaagcgactccaggaagaaaaaacacaagaaaaaattcaagaagaggaacggaaagctgaggagaaacaacgtaaggataaggatactttgaaagctgaggagaaaaaacgtgagacagctagtgttttggtgaattatagagcattatacccctttgaagcaaggaaccatgatgagatgagttttaattctggagatataattcaggttgatgaaaaaaccgtaggagaacctggttggctttatggtagttttcaaggaaattttggctggtttccatgcaattatgtagaaaaaatgccatcaagtgaaaatgaaaaagctgtatctccaaagaaggccttacttcctcctacagtttctttatctgctacctcaacttcctctgaaccactttcttcaaatcaaccagcatcagtgactgattatcaaaatgtatctttttcaaacctaactgtaaatacatcatggcagaaaaaatcagccttcactcgaactgtgtcccctggatctgtatcacctattcatggacagggacaagtggtagaaaacttaaaagcacaggccctttgttcctggactgcaaagaaagataaccacttgaacttctcaaaacatgacattattactgtcttggagcagcaagaaaattggtggtttggggaggtgcatggaggaagaggatggtttcccaaatcttatgtcaagatcattcctgggagtgaagtaaaacgggaagaaccagaagctttgtatgcagctgtaaataagaaacctacctcggcagcctattcagttggagaagaatatattgcactttatccatattcaagtgtggaacctggagatttgactttcacagaaggtgaagaaatattggtgacccagaaagatggagagtggtggacaggaagtattggagatagaagtggaatttttccatcaaactatgtcaaaccaaaggatcaagagagttttgggagtgctagcaagtctggagcatcaaataaaaaacctgagattgctcaggtaacttcagcatatgttgcttctggttctgaacaacttagccttgcaccaggacagttaatattaattctaaagaaaaatacaagtgggtggtggcaaggagagttacaggccagaggaaaaaagcgacagaaaggatggtttcctgccagtcatgttaaacttttgggtccaagtagtgaaagagccacacctgcctttcatcctgtatgtcaggtgattgctatgtatgactatgcagcaaataatgaagatgagctcagtttctccaagggacaactcattaatgttatgaacaaagatgatcctgattggtggcaaggagagatcaacggggtgactggtctctttccttcaaactacgttaagatgacgacagactcagatccaagtcaacagtggtgtgctgatctgcaaaccctggacacaatgcagccaattgagaggaaaagacagggctatattcatgagctgattcagaccgaagagcggtacatggctgaccttcagctcgtcgtcgaggtttttcagaaacgcatggcagagtcaggctttctcactgaaggggagatggccctgatttttgttaactggaaggagctcatcatgtccaacacaaagctgctgaaggctttgcgggtgcggaagaagaccgggggcgagaagatgccggtgcagatgattggggacatcctggccgctgagctgtcccacatgcaggcttacatcaggttctgcagctgccagcttaatggagcagctctgttacagcagaagacagatgaagacacagatttcaaagaatttttaaagaagctggcatctgacccgcggtgtaaaggaatgcccctctccagcttcctgctgaaacccatgcagaggatcacccgctacccactgctcatcagaagtattctggagaacaccccggagagccatgcagaccattcctccctaaagctggccctcgagcgggcagaggagctgtgctctcaagtgaatgagggagttcgggagaaggaaaactcggaccgactggagtggatccaggcgcacgtgcagtgtgaaggcctcgcggagcaacttattttcaactctctcaccaactgcctggggccccggaagctcttacacagtgggaaattatacaagaccaagagcaacaaggaactgcacggattcctcttcaatgacttcctgcttcttacctacatggtcaagcagtttgctgtttcctctggctctgagaaacttttcagctcgaagtccaatgctcaattcaaaatgtataaaacgcccattttcctgaatgaagtcttggtgaaactgcccacagacccttccagcgatgagcctgtcttccacatttcccacattgatcgggtctacaccctccgaacagacaacattaatgagaggaccgcctgggtgcagaagatcaaggcggcgtctgagcagtacatcgacaccgagaagaagaagcgtgagaaagcttaccaagcccgctcccaaaagacttcaggcattgggcgcctgatggtgcatgtcattgaagctacagaattaaaagcctgcaaaccaaatggaaagagcaacccatactgtgaaatcagcatgggctcccagagctacaccaccaggaccatccaggacacactcaatcccaagtggaattttaactgccagttctttattaaggatctctaccaagacgtgctgtgtctcaccctgtttgacagagaccagttttcaccagatgatttcctgggtcgtactgaaattccagtggcaaaaattcgaacagaacaggaaagcaaaggccctatgacccgccgactgctgctgcatgaggtccccaccggggaggtctgggtccgttttgacctgcagctttttgagcaaaaaactctcctgtaggggttctaaaggacagcaccagcgggacagcccacaaggctggggctggagaatgagagactgcgctctcttggggctgagggagcaccatgcagcttcacccctcacaaagccatgcacgctgggggctctgttttcctgcacactaaatagctagcaatctatgcaaacacctttcccataaagaaaccaaaccccatagtacagtgccttgtcctagtgttcacatgttcagctctgtttgtttagatgccaaggtttccattttcagggctataaaaagtattacttggaaatgaggcatcagaccaccagatgttaccgctcggttgaatgtgtccaccgtggagtggtttggtgacgctgtaaccattccacgccagtgacctctgctgggtcacagccactcaggaggggaagggtcaggatgagaggctgcagcctcgacacttggcgcggcctgatactgaaatagcgtctactcgtgcactgaataaaaacagaaacttgatcattttattcctgattagattttatcactctctgctaagacaatatagtctggagtataagtgggaaagcttgatttaaatactgtgaactctaataatgtggaaaatatttttcaactttaattttctgaagtataaattatttatgtaaattcattgtttttgcatatttcttaggacatgcatctttaagctttatcattgcccatatgtacagaaagagaataaagacatatgtttatggatggaa

SEQ ID NO: 163446 - DNA, 6187 bp, Artificial Sequence
  derived and/or modified sequence
cggccgccatgttgttgtggggctgaggcggcgccggcggagccctgagcggctgtgacaggctacgcaacaggttcgcgggcggcggcctgacgaccaagccagctgcagtggcggcgacggcggcagagcagggtctccccgcgcctgcccgcgcccaggctgccggtgctgagggacgcggagtcgcgctgtgacgagcgggaggcgcggcgagggcgccagatggctgagagctagcaaggaaaactcaggaccatgatggctcagtttcccacagctatgaatggagggccaaacatgtgggctattacctctgaagaacgtactaagcatgacaggcagtttgataacctcaaaccttcaggaggttacataacaggtgatcaagcacgtaattttttcctacaatcaggtctgccggcccctgttttagctgaaatatgggctttatcagacctaaacaaggatgggaagatggatcagcaagagttctccatagctatgaaactcatcaaactgaagcttcaaggccaacagttgcctgtggttctccctcctattatgaagcaaccccctatgttttctccattaatttctgctcgttttggaatgggaagcatgcccaatctgtccattcctcagccattgcctccagctgcacctataacatcattgtcttctgcgacttcagggaccaaccttcctcccttaatgatgcccactcccctagtgccttctgttagcacatcatcattaccaaatggaaccgccagtctcattcagcctttacccattccttattcttcttcaacattgcctcatgggtcatcttatagtctgatgatgggaggatttggaggtgctagtatacagaaagcgcagtctctgattgatttaggatctagtaggagctggagctcaggtagtagtgctcactcacctgccactcaccgagccccgctgtccagcccggttcctaacagctcaacttcctcgactgcttcactctcagggaactcacccaagactgggacctcagagtgggcagttcctcagcctacaagattaaaatatcggcaaaaatttaatactcttgacaaaagtatgagtggatatctctcaggttttcaagctagaaatgcccttcttcagtcaaatctttctcaaactcagctggctactatttggactctggctgacgttgatggtgatggacagctaaaagcagaagagtttattcttgcaatgcaccttactgacatggccaaagctggacagccattaccactgactttacctcctgagcttgttcctccatctttcagaggaggaaagcaaattgattccattaatggaactctgccttcatatcagaaaatgcaagaagaggagcctcagaagaaattaccagttacttttgaggacaaacggaaagccaactatgagcgagggaacatggagctggaaaagcgacgccaagccttgatggagcagcaacaaagggaggcagaacgtaaagcccagaaagaaaaggaagagtgggaacgaaaacagagagaattacaagaacaagaatggaagaaacaacttgaattagaaaaacgcttagagaagcaacgggaattggagagacaacgagaggaagaaaggagaaaagacatagaaagacgagaggcagcaaaacaggaacttgaacgacaacgtcgcttagaatgggagagaattcggcgacaggagcttctcaatcaaaagaatagagaacaagaagaaattgtcaggttaaactctaaaaagaagaatcttcatcttgagttggaagcactgaatggcaaacatcagcagatctcaggcagacttcaggatgtccgactcaaaaagcaaactcaaaagactgagctggaagttctggataagcagtgtgacttggaaattatggaaatcaagcaacttcaacaggaacttcaggaatatcagaataagcttatctatctggtacctgagaagcaattattaaatgaaagaattaaaaacatgcagttcagtaacacacctgattcaggggtcagtttacttcataaaaaatcattagaaaaggaagaattatgccaaagacttaaagaacagttagatgctcttgaaaaagaaactgcatctaagctgtcagaaatggattcttttaacaatcaactaaagtgtgggaatatggatgactctgttcttcagtgccttttgtctctgctaagctgtctcaacaacctcttcctcttacttaaggaactgagagaaacctacaacacacagcagttagcccttgaacagctttataagatcaaacgtgacaagttgaaggaaattgaaaggaaaagattagaactaatgcagaaaaagaaactagaagatgaggctgcaaggaaagcaaagcaaggaaaagaaaacttatggaaagaaaatcttagaaaggaggaagaagaaaaacaaaagcgactccaggaagaaaaaacacaagaaaaaattcaagaagaggaacggaaagctgaggagaaacaacgtaaggataaggatactttgaaagctgaggagaaaaaacgtgagacagctagtgttttggtgaattatagagcattatacccctttgaagcaaggaaccatgatgagatgagttttaattctggagatataattcaggttgatgaaaaaaccgtaggagaacctggttggctttatggtagttttcaaggaaattttggctggtttccatgcaattatgtagaaaaaatgccatcaagtgaaaatgaaaaagctgtatctccaaagaaggccttacttcctcctacagtttctttatctgctacctcaacttcctctgaaccactttcttcaaatcaaccagcatcagtgactgattatcaaaatgtatctttttcaaacctaactgtaaatacatcatggcagaaaaaatcagccttcactcgaactgtgtcccctggatctgtatcacctattcatggacagggacaagtggtagaaaacttaaaagcacaggccctttgttcctggactgcaaagaaagataaccacttgaacttctcaaaacatgacattattactgtcttggagcagcaagaaaattggtggtttggggaggtgcatggaggaagaggatggtttcccaaatcttatgtcaagatcattcctgggagtgaagtaaaacgggaagaaccagaagctttgtatgcagctgtaaataagaaacctacctcggcagcctattcagttggagaagaatatattgcactttatccatattcaagtgtggaacctggagatttgactttcacagaaggtgaagaaatattggtgacccagaaagatggagagtggtggacaggaagtattggagatagaagtggaatttttccatcaaactatgtcaaaccaaaggatcaagagagttttgggagtgctagcaagtctggagcatcaaataaaaaacctgagattgctcaggtaacttcagcatatgttgcttctggttctgaacaacttagccttgcaccaggacagttaatattaattctaaagaaaaatacaagtgggtggtggcaaggagagttacaggccagaggaaaaaagcgacagaaaggatggtttcctgccagtcatgttaaacttttgggtccaagtagtgaaagagccacacctgcctttcatcctgtatgtcaggtgattgctatgtatgactatgcagcaaataatgaagatgagctcagtttctccaagggacaactcattaatgttatgaacaaagatgatcctgattggtggcaaggagagatcaacggggtgactggtctctttccttcaaactacgttaagatgacgacagactcagatccaagtcaacagtggtgtgctgatctgcaaaccctggacacaatgcagccaattgagaggaaaagacagggctatattcatgagctgattcagaccgaagagcggtacatggctgaccttcagctcgtcgtcgaggtttttcagaaacgcatggcagagtcaggctttctcactgaaggggagatggccctgatttttgttaactggaaggagctcatcatgtccaacacaaagctgctgaaggctttgcgggtgcggaagaagaccgggggcgagaagatgccggtgcagatgattggggacatcctggccgctgagctgtcccacatgcaggcttacatcaggttctgcagctgccagcttaatggagcagctctgttacagcagaagacagatgaagacacagatttcaaagaatttttaaagaagctggcatctgacccgcggtgtaaaggaatgcccctctccagcttcctgctgaaacccatgcagaggatcacccgctacccactgctcatcagaagtattctggagaacaccccggagagccatgcagaccattcctccctaaagctggccctcgagcgggcagaggagctgtgctctcaagtgaatgagggagttcgggagaaggaaaactcggaccgactggagtggatccaggcgcacgtgcagtgtgaaggcctcgcggagcaacttattttcaactctctcaccaactgcctggggccccggaagctcttacacagtgggaaattatacaagaccaagagcaacaaggaactgcacggattcctcttcaatgacttcctgcttcttacctacatggtcaagcagtttgctgtttcctctggctctgagaaacttttcagctcgaagtccaatgctcaattcaaaatgtataaaacgcccattttcctgaatgaagtcttggtgaaactgcccacagacccttccagcgatgagcctgtcttccacatttcccacattgatcgggtctacaccctccgaacagacaacattaatgagaggaccgcctgggtgcagaagatcaaggcggcgtctgagcagtacatcgacaccgagaagaagaagcgtgagaaagcttaccaagcccgctcccaaaagacttcaggcattgggcgcctgatggtgcatgtcattgaagctacagaattaaaagcctgcaaaccaaatggaaagagcaacccatactgtgaaatcagcatgggctcccagagctacaccaccaggaccatccaggacacactcaatcccaagtggaattttaactgccagttctttattaaggatctctaccaagacgtgctgtgtctcaccctgtttgacagagaccagttttcaccagatgatttcctgggtcgtactgaaattccagtggcaaaaattcgaacagaacaggaaagcaaaggccctatgacccgccgactgctgctgcatgaggtccccaccggggaggtctgggtccgttttgacctgcagctttttgagcaaaaaactctcctgtaggggttctaaaggacagcaccagcgggacagcccacaaggctggggctggagaatgagagactgcgctctcttggggctgagggagcaccatgcagcttcacccctcacaaagccatgcacgctgggggctctgttttcctgcacactaaatagctagcaatctatgcaaacacctttcccataaagaaaccaaaccccatagtacagtgccttgtcctagtgttcacatgttcagctctgtttgtttagatgccaaggtttccattttcagggctataaaaagtattacttggaaatgaggcatcagaccaccagatgttaccgctcggttgaatgtgtccaccgtggagtggtttggtgacgctgtaaccattccacgccagtgacctctgctgggtcacagccactcaggaggggaagggtcaggatgagaggctgcagcctcgacacttggcgcggcctgatactgaaatagcgtctactcgtgcactgaataaaaacagaaacttgatcattttattcctgattagattttatcactctctgctaagacaatatagtctggagtataagtgggaaagcttgatttaaatactgtgaactctaataatgtggaaaatatttttcaactttaattttctgaagtataaattatttatgtaaattcattgtttttgcatatttcttaggacatgcatctttaagctttatcattgcccatatgtacagaaagagaataaagacatatgtttatggatgg

SEQ ID NO: 163447 - DNA, 5094 bp, Artificial Sequence
  derived and/or modified sequence
atgatggcccagttccccacagccatgaatggaggccccaacatgtgggccatcaccagcgaggagaggaccaagcatgaccggcagtttgacaacctgaagcccagcggcggctacatcactggagaccaggccaggaacttcttcctgcagagcggcctgcctgcccctgtgctggccgagatctgggccctgagtgacctgaacaaggatggcaagatggaccagcaggagttcagcatcgccatgaagctgatcaagctgaagctgcagggccagcagctgcctgtggtgctgccccccatcatgaagcagccccccatgttcagccccctcatcagcgccaggtttggcatgggctccatgcccaacctgagcatcccccagcccctgcccccagctgcccccatcaccagcctgagcagcgccaccagcggcaccaacctgccccccctgatgatgcccacccccctggtgcccagcgtgtccaccagcagcctgcccaatggaacagccagcctcatccagcccctgcccatcccctacagcagcagcaccctgccccacggcagcagctacagcctgatgatgggcggctttggaggagccagcatccagaaggcccagagcctgattgacctgggcagcagcagcagcaccagcagcacagccagcctgagcggcaacagccccaagacaggcaccagcgagtgggccgtgccccagcccacccggctgaagtaccggcagaagttcaacaccctggacaagtccatgagcggctacctgagcggcttccaggccagaaatgccctgctgcagagcaacctgagccagacccagctggccaccatctggaccctggctgatgtggatggagatggccagctgaaggccgaggagttcatcctggccatgcacctgacagacatggccaaggccggccagcccctgcccctgaccctgcccccagagctggtgccccccagcttccggggcggcaagcagattgacagcatcaatggcaccctgcccagctaccagaagatgcaggaggaggagccccagaagaagctgcctgtgacctttgaggacaagaggaaggccaactatgagcggggcaacatggagctggagaagaggcggcaggccctgatggagcagcagcagcgggaggccgagaggaaggcccagaaggagaaggaggagtgggagaggaagcagcgggagctgcaggagcaggagtggaagaagcagctggagctggagaagaggctggagaagcagcgggagctggagcggcagcgggaggaggagaggaggaaggacatcgagcggcgggaggccgccaagcaggagctggagcggcagaggcggctggagtgggagcgcatccggcggcaggagctgctgaaccagaagaaccgggagcaggaggagatcgtgcggctgaacagcaagaagaagaacctgcacctggagctggaggccctgaatggcaagcaccagcagatcagcggccgcctgcaggatgtgcggctgaagaagcagacccagaagacagagctggaggtgctggacaagcagtgtgacctggagatcatggagatcaagcagctgcagcaggagctgcaggagtaccagaacaagctgatctacctggtgcctgagaagcagctgctgaatgaaagaatcaagaacatgcagttcagcaacaccccagacagcggcgtgtccctgctgcacaagaagagcctggagaaggaggagctgtgccagaggctgaaggagcagctggatgccctggagaaggagacagccagcaagctgtctgagatggacagcttcaacaaccagctgaagtgtggcaacatggatgacagcgtgctgcagtgcctgctgagcctgctgagctgcctgaacaacctcttcctgctgctgaaggagctgcgggagacctacaacacccagcagctggccctggagcagctgtacaagatcaagagggacaagctgaaggagattgaaaggaagaggctggagctgatgcagaagaagaagctggaggatgaggccgccaggaaggccaagcagggcaaggagaacctgtggaaggagaacctgaggaaggaggaggaggagaagcagaagaggctgcaggaggagaagacccaggagaagatccaggaggaggagaggaaggccgaggagaagcagaggaaggacaaggacaccctgaaggccgaggagaagaagcgggagacagcctctgtgctggtgaactaccgggccctgtacccctttgaggccagaaatcatgatgagatgtccttcaacagcggggacatcatccaggtggatgagaagacagtgggggagcccggctggctgtatggcagcttccagggcaactttggctggttcccctgcaactacgtggagaagatgcccagcagtgaaaatgagaaggctgtgagccccaagaaggccctgctgcccccaacagtgtccctgagcgccaccagcaccagcagcgagcccctgagcagcaaccagcctgcctctgtgacagactaccagaatgtgtccttcagcaacctgactgtgaacacctcctggcagaagaagagcgccttcaccaggacagtgtccccaggctctgtgagccccatccacggccagggccaggtggtggagaacctgaaggcccaggccctgtgctcctggacagccaagaaggacaaccacctgaacttcagcaagcatgacatcatcaccgtgctggagcagcaggagaactggtggtttggagaggtgcacggcggccggggctggttccccaagagctatgtgaagatcatccctggcagcgaggtgaagcgggaggagcctgaggccctgtatgctgctgtgaacaagaagcccaccagcgctgcctacagcgtgggggaggagtacatcgccctgtacccctacagctctgtggagcccggggacctgaccttcacagaaggagaggagatcctggtgacccagaaggatggagagtggtggacaggcagcatcggggacaggagcggcatcttccccagcaactacgtgaagcccaaggaccaggagagctttggcagcgccagcaagagcggggccagcaacaagaagccagaaattgcccaggtgaccagcgcctacgtggccagcggcagcgagcagctgagcctggcccctggccagctgatcctgatcctgaagaagaacaccagcggctggtggcagggcgagctgcaggcccggggcaagaagaggcagaagggctggttccctgccagccacgtgaagctgctgggccccagcagcgagcgggccaccccagccttccaccctgtgtgccaggtgattgccatgtatgactatgctgccaacaatgaagatgagctgtccttcagcaagggccagctgatcaacgtgatgaacaaggatgatcctgactggtggcagggcgagatcaacggggtgacaggcctcttccccagcaactacgtgaagatgaccacagacagcgaccccagccagcagtggtgtgccgacctgcagaccctggacaccatgcagcccatcgagaggaagaggcagggctacatccacgagctgatccagacagaggagcgctacatggctgacctgcagctggtggtggaggtgttccagaagaggatggccgagagcggcttcctgacagaaggagagatggccctgatctttgtgaactggaaggagctgatcatgagcaacaccaagctgctgaaggccctgcgggtgaggaagaagacaggaggagagaagatgcctgtgcagatgattggagacatcctggccgctgagctgagccacatgcaggcctacatccgcttctgcagctgccagctgaatggagctgccctgctgcagcagaagacagatgaggacacagacttcaaggagttcctgaagaagctggccagtgacccccgctgcaagggcatgcccctgagcagcttcctgctgaagcccatgcagaggatcacccgctaccccctgctgatccgcagcatcctggagaacaccccagagagccatgctgaccacagcagcctgaagctggccctggagagagctgaggagctgtgcagccaggtgaatgaaggagtgcgggagaaggagaacagcgaccggctggagtggatccaggcccacgtgcagtgtgagggcctggccgagcagctgatcttcaacagcctgaccaactgcctgggccccaggaagctgctgcacagcggcaagctgtacaagaccaagagcaacaaggagctgcacggcttcctgttcaatgacttcctgctgctgacctacatggtgaagcagtttgctgtgagcagcggcagcgagaagctgttcagcagcaagagcaatgcccagttcaagatgtacaagacccccatcttcctgaatgaggtgctggtgaagctgcccacagaccccagcagtgatgagcctgtgttccacatcagccacatcgacagagtgtacaccctgaggacagacaacatcaatgaaagaacagcctgggtgcagaagatcaaggccgccagcgagcagtacatcgacacagagaagaagaagcgggagaaggcctaccaggcccggagccagaagaccagcggcatcggccgcctgatggtgcacgtgattgaggccacagagctgaaggcctgcaagcccaacgggaagagcaacccctactgtgagatctccatgggcagccagagctacaccaccaggaccatccaggacaccctgaaccccaagtggaacttcaactgccagttcttcatcaaggacctgtaccaggatgtgctgtgcctgaccctgtttgaccgggaccagttctccccagatgacttcctgggccgcacagagatccctgtggccaagatcagaacagagcaggagagcaagggccccatgacccggcggctgctgctgcacgaggtgcccactggagaggtgtgggtgcgctttgacctgcagctgtttgagcagaagaccctgctgtag

SEQ ID NO: 163448 - DNA, 5094 bp, Artificial Sequence
  derived and/or modified sequence
atgatggcccagttccccaccgccatgaacggcggccccaacatgtgggcaataaccagtgaagagcggactaaacacgatcgacagtttgataacttaaagccttctggcgggtacataactggcgaccaggcgcgaaatttcttcctgcagtcaggacttcccgcgcctgtgctggccgagatatgggcattgagcgacctcaacaaggacggcaaaatggaccagcaagagttctcaatcgcgatgaagctcatcaagcttaagctgcagggacagcagttgcccgtggtcttgccacctataatgaaacagccccctatgttctcccccttaattagtgcccggttcggcatgggcagcatgcctaacctgtccattccgcagccgctcccgcctgcagcacccatcacctctctgagcagtgctacaagcgggacaaatttgccgccgctgatgatgcctactcctttagttccttctgtttctacatcatcactgccgaatggtactgcttcacttatacaacccttgcctatcccatactcttcttccaccttgccgcacggctccagctactcactgatgatgggtggattcggtggcgcctctattcagaaggctcaatctctcattgatctcggcagttcatccagcacctcaagcacagccagcctttccggaaattcacctaaaaccggcacatcagaatgggcagttccccagcccacaaggctgaagtaccgacagaaattcaatacactggacaagtctatgagtggttacctgagcggcttccaagccaggaacgcactgctccagagtaatctctcgcaaactcagctggctacaatttggacgctggccgatgtcgatggagacgggcagctgaaggctgaggagttcatcctagctatgcacctgaccgacatggctaaggccggccagcctctaccattgacactgccgccagaactcgttccaccctccttccgcgggggtaagcaaatcgattcaatcaacgggacgctgccatcttaccaaaagatgcaggaggaagagccacagaaaaaactgcccgtgacgtttgaagataagaggaaggcgaattacgaacgtggaaacatggagctggagaagcggaggcaggctttgatggaacagcagcagcgcgaagccgaaaggaaggcccagaaggaaaaagaggaatgggaacgaaaacagcgggagctgcaggagcaagagtggaaaaagcagttggaattggaaaagcgcttggagaagcagcgagaacttgagaggcagcgggaagaagagagaagaaaggacattgagagacgggaggccgcgaaacaggaattggaaaggcagcgtcgactggagtgggaacgtatccggcgccaggagctgctgaatcagaaaaacagagaacaggaggagattgttcgcctgaactctaagaagaagaacctgcacttagagttggaggccctgaacggcaaacatcagcaaatttccgggaggcttcaggatgtcaggctcaagaaacaaacacaaaaaactgagctcgaggtgttggataagcaatgtgacctggagatcatggaaattaagcagttgcagcaggagttgcaagagtaccagaataagttaatctacctcgtgcccgaaaagcagcttcttaatgaacgcattaaaaatatgcagttcagtaacacaccagacagtggcgtctctcttctgcataaaaagtctctcgaaaaagaggagctctgccagaggcttaaggagcagctggacgctctcgaaaaggaaacagccagcaagttgtccgaaatggatagttttaacaatcaactcaaatgcggcaacatggacgatagcgtcctgcagtgtttgctgagcctactcagctgcctgaataacttgttccttcttctgaaggagctgcgggaaacctacaacacccagcaactggccctggagcaattatacaaaattaagagggacaaactgaaagagatcgaacgcaaacgtctggagctcatgcagaagaaaaaactggaagacgaggcagccagaaaggccaaacaaggaaaagagaatttgtggaaggagaacctgaggaaggaggaggaggaaaaacagaagaggctgcaggaggaaaagacccaggagaagatccaggaagaggaaaggaaggctgaagagaagcaaagaaaagataaagatacgctcaaggcagaggagaaaaagcgggaaactgcaagcgtgctcgtgaattatagagcactgtacccattcgaagctcgcaaccacgacgagatgtcttttaatagtggggacatcattcaggtggacgaaaaaactgtgggagaaccaggatggctgtacgggtcatttcagggcaacttcggttggtttccatgtaactacgtggagaaaatgccatcaagcgaaaatgagaaggccgtgagtccaaagaaggctctgctccctcccacagtctcactctcagccacctcaacttcgagcgagcctttgtcgtctaaccaacccgcctctgtgactgactaccagaatgtctcctttagcaacctgaccgtgaatacctcgtggcagaaaaagtctgcgttcacccggacagttagtcctgggtccgttagtccaatacacggccagggccaggtcgttgagaacctgaaagctcaggctttatgcagctggacagcaaagaaggataaccatcttaatttcagcaaacacgatataattacagtcctggagcagcaagagaattggtggtttggcgaagtgcacggcggcagggggtggttcccgaagtcctacgtgaagattattcctggaagcgaagtgaaacgcgaagaacctgaagctctctatgccgcggtcaacaagaagccaacgagcgccgcctacagtgttggagaagaatacatcgctctctacccttacagcagcgttgaacccggcgacctgacgtttactgagggtgaggagattctggtgacgcagaaagacggcgaatggtggactggctccatcggagaccggtccggcatttttccaagcaactatgttaaaccgaaggatcaagagtcattcggctcagcctcaaagtccggtgcgtcgaacaagaagccagagattgcccaggttacatcagcctatgtcgcttccggatccgaacagctgtcccttgccccgggacaactgatcctcatactcaagaagaatactagcgggtggtggcagggcgaactgcaagcacggggcaaaaaacggcagaagggctggttcccagccagtcatgtcaaacttttgggacccagtagcgagcgggctactcctgcatttcaccccgtgtgccaagtcatcgccatgtacgattatgccgccaataatgaagacgagctcagttttagcaaaggccagctgatcaacgttatgaataaggatgatccagactggtggcagggcgaaattaatggcgttacagggctgttcccatctaattacgtgaaaatgacaacagacagcgatccaagccaacagtggtgcgccgacctccaaaccctcgatactatgcaacccattgagcggaaacggcaaggctatatccatgagctgatccagacggaggagagatacatggctgacttacagctggtcgtggaggttttccagaaacgcatggctgaatctggtttcctaacagagggcgaaatggctctgatctttgttaactggaaggaacttattatgtccaatacaaaattgctgaaggccctgcgtgtgcgcaaaaagacgggaggggagaagatgcccgttcagatgataggagacatactcgccgcagagctttctcacatgcaggcatacatcaggttctgttcttgccagcttaacggcgccgctctgctccagcaaaaaaccgatgaggatactgatttcaaggaattcctcaaaaagctggcgagcgacccaaggtgcaaaggcatgcctttatctagctttctcctgaagccaatgcagagaattacccggtaccctctgttaattcgctcaatcctggaaaacacacccgaaagtcacgccgatcactcgtctctgaagctggccttagagcgtgcggaggagctctgttcacaagtcaacgaaggagttcgagagaaagagaacagtgaccggctggaatggatccaagctcacgtacagtgcgagggacttgcggagcagctgatctttaatagcctgactaattgtttaggtccaagaaagctgcttcattcgggaaaactgtataagaccaaatccaataaggagctgcatggctttctgttcaacgacttcctcctgctcacatatatggtcaagcagttcgctgtgtcgagtgggagcgagaagctgttctccagcaagagcaatgcacaattcaagatgtataagacacctatctttttgaatgaagtcttggtgaagctgcccacggacccctcttctgacgaacctgtgtttcatatttcccacatcgacagggtgtatactttgcgaaccgacaacattaatgaacgcaccgcttgggtccagaaaatcaaagcggcttctgagcagtacatcgataccgagaaaaagaaaagagaaaaagcataccaggcacggagccagaaaacttccggaatcggacgacttatggtccatgtgattgaagctacagaacttaaggcctgtaagccgaacggcaagagtaatccttactgcgagatttccatgggatcccagtcctatactacaaggactattcaggacactttaaaccccaagtggaactttaattgtcagtttttcatcaaagatctctatcaggatgtgctgtgcctcacgctgtttgatcgggaccagttttcgccagatgactttctcgggagaacagagattccagtagccaagattagaacagagcaggaatctaaaggaccgatgacccggaggctactgttacacgaagttcctaccggcgaggtctgggtccgctttgatctgcagttgtttgaacaaaagaccctgctgtag

SEQ ID NO: 163449 - DNA, 5093 bp, Artificial Sequence
  derived and/or modified sequence
atgatggcccaatttccaactgccatgaacggcggacccaacatgtgggctattacctcggaggagcgcaccaagcatgatagacagttcgacaatttaaagcctagcggagggtatatcacaggggaccaggctagaaactttttcctccagtcgggcctgccagcccctgtcctggcagagatttgggctctgagtgatctcaataaggatggaaaaatggatcaacaggagtttagtatcgccatgaagctgataaagctgaaacttcaaggtcagcagctgccagtcgtccttccacccatcatgaaacaacctcccatgttcagcccgcttattagcgctcgttttggcatgggctccatgcccaacttaagcattccacagcctctccccccagctgccccaattacttctctatccagcgccacctctggtacaaatctgccaccccttatgatgcctacgccactggtaccttccgtaagcacatcatcactgcccaatggcaccgcctccttgatccagccacttcccatcccgtacagcagctctacgttgccccacgggtcatcctactcactgatgatgggcggattcgggggtgcttccatacagaaagcacagtcactgatcgaccttggctcttcctcttcaacttctagtactgcctcacttagcggtaatagtcccaaaaccgggacatctgagtgggcagtgcctcagcctacccgactgaaatatagacaaaagtttaacaccctggataagtccatgtctggttacttatcaggtttccaggcccgtaatgctctcctgcagtctaatctcagccagacacagctcgcaaccatatggactctggcggacgtggacggggacggccagctgaaggccgaggagtttattctggcaatgcatctcacagacatggctaaagctggacagcccctgcctttaaccctgcctccagagctagtgccaccttcgttcagaggaggaaagcagatagactctattaatgggaccctgccctcttatcagaaaatgcaggaggaggaaccccaaaagaagctgcccgtgacatttgaagacaagcgcaaagccaattatgagcgcggtaatatggaactcgagaaacggagacaggcactgatggaacagcagcagcgggaggccgagaggaaggctcagaaggagaaagaggaatgggaaagaaaacaacgtgagctgcaagagcaggagtggaaaaaacagcttgagttagagaagcggctggagaagcagagggaactggaacgtcaaagagaggaagaacggcgtaaggatattgaacggagggaggcagccaagcaagagttggaaagacagcgcaggctggagtgggaacggattcggagacaggagcttctcaaccagaaaaaccgggagcaggaagagatcgttaggctgaactcgaagaagaagaacctgcacttggagttagaggccctgaacggcaaacaccagcagatctctggacggcttcaggacgtgcgcctcaaaaagcaaacccaaaaaaccgaactggaggttcttgacaagcagtgcgatttagagataatggagatcaagcagcttcaacaagaactacaggagtatcaaaacaagctgatttaccttgtccctgagaaacaattactaaatgagaggattaagaatatgcaattctcaaacactcccgatagcggagtgtccctgttgcacaaaaaaagcttggagaaagaagagctgtgtcaaaggcttaaggaacagctggacgccctcgaaaaggagactgccagcaagctttcagagatggattcctttaacaaccagctcaaatgcggtaacatggatgattctgtgcttcagtgcctgttgtcattactttcttgtctaaacaacctgttcttgctcctcaaggaactcagggaaacatacaacactcaacagctggccttggagcagctgtataaaattaagcgggacaagctgaaggaaatcgagcgaaaaagactcgaactgatgcaaaaaaaaaaattagaagatgaggccgctagaaaggctaagcagggcaaggaaaacttgtggaaggaaaacctccggaaagaggaggaagaaaaacagaaacgcctgcaggaggagaaaacacaggaaaagatccaggaagaggaacgtaaagctgaggagaaacagcgaaaggataaggatactcttaaagctgaagaaaaaaagcgagagacggcatccgtgctcgtaaattacagagccctgtatccctttgaggccagaaaccatgatgagatgagctttaactcaggtgacattatccaggtggacgagaagaccgtcggggaaccagggtggctctacggctccttccaggggaatttcggctggttcccttgtaactatgtagaaaaaatgccttccagtgaaaatgagaaggccgtgagtcccaagaaggccctgctgcccccaactgtgtctctaagcgctactagcacgtctagcgagcctctgtccagcaatcagccggcttctgttactgactaccagaacgtgtcattttccaacctcaccgtcaatacctcctggcagaaaaagtccgccttcacaaggacagtttcacccggaagcgtgagccctattcacggacagggccaggttgttgagaatctcaaggctcaagccctgtgcagttggactgccaaaaaagataaccatctcaattttagcaagcatgacatcatcacagtcctcgaacagcaggagaattggtggtttggcgaagtgcatggtggcagaggttggttcccaaaatcatatgtcaagatcatcccgggatcagaggtcaagcgcgaagaacctgaggcactgtatgctgcggtgaacaaaaagccaacctctgccgcttatagcgtaggtgaggaatacatcgccctgtacccatacagtagtgtagagcccggagacctgaccttcacagaaggcgaggagattttggtgacccagaaagacggagaatggtggacgggcagtattggtgataggtccggtatttttccaagcaattacgtgaagcccaaagaccaagagagctttggaagcgcaagtaaaagtggggcatcaaataagaaaccggagatagcacaagttacctccgcctatgtggcttctggcagtgaacagctgtctctggcgccaggtcagttaatcttgatcttgaaaaagaacacatcgggctggtggcaaggcgagctacaagccaggggcaaaaagcggcagaagggctggttccctgcctctcacgtgaagcttctgggtccctctagcgaaagagccacaccagcgtttcaccccgtgtgtcaagtaatcgcaatgtacgactacgccgcaaataatgaggacgagctgtccttttcaaaaggacagctgattaatgtcatgaacaaggatgaccccgattggtggcagggagagatcaacggcgtcaccgggcttttcccgagcaattacgtgaaaatgacaactgatagcgatcctagccagcagtggtgtgctgacctacagacactggacacgatgcaacctattgaaaggaaaagacagggatacatccatgagctgattcaaacggaggaacggtacatggccgacctgcagttggtcgtggaagtgtttcaaaagaggatggctgagagcggtttcttaaccgagggggaaatggctctaatctttgtcaactggaaagagttgatcatgagcaacaccaagctgctgaaggccttgagggtgcggaaaaaaacgggcggagagaagatgcccgtccaaatgatcggggacatcctggctgcagagctgtcccatatgcaggcttatataaggttctgctcatgtcaactgaatggcgcagcgctattgcagcaaaaaaccgacgaagacactgacttcaaggaatttttaaaaaagttggctagtgatccaagatgtaaaggtatgccactatccagcttcctgctcaaacccatgcaaaggataacacggtatccgttgcttatcaggtctattctggaaaacaccccagaatcccacgcagatcactccagtcttaagctcgctctggaacgtgccgaagaactttgttcacaggtaaacgagggcgtcagagagaaggaaaattccgatagactcgaatggattcaggctcacgtgcagtgtgaaggtttggccgagcagctgatcttcaacagtttaaccaattgtctagggcctcgaaaactgttacatagtggaaagctctacaaaacaaagagcaataaagagctgcacggcttcctattcaacgacttcctgctgctaacttatatggtgaagcagttcgccgtgagttcagggagtgagaagctattttcaagtaagtcgaacgcccagttcaaaatgtataagacccccatattcctcaacgaagtgctcgtgaaactcccaaccgaccccagttccgacgaacctgtatttcacatctcgcacatagatcgggtgtacacccttcggacagacaacattaacgaacgtactgcttgggtgcagaagattaaggccgcttccgaacagtatatagatacagagaagaaaaaaagggaaaaggcataccaggcacggtctcaaaaaacgagtggaatcgggcgtctgatggtacacgtaatcgaagcaacggaactgaaggcctgtaagcccaatggaaaaagtaatccatattgtgagatctccatgggcagccaaagctatactacccggaccatacaagacacgttgaatccgaagtggaattttaattgccagtttttcattaaagatctctaccaggacgtgctgtgtctcaccctcttcgatcgagatcagttttcacccgacgactttctgggcagaaccgaaatcccagtagccaagattaggaccgagcaggagtcaaagggccctatgacccgacgccttctcttgcacgaggtgcctacaggtgaagtatgggtgagatttgacctgcaattatttgagcagaaaaccctgttata

SEQ ID NO: 163450 - DNA, 5094 bp, Artificial Sequence
  derived and/or modified sequence
atgatggcccagttccccaccgccatgaacggcggccccaacatgtgggccatcaccagcgaggagagaaccaagcacgacagacagttcgacaacctgaagcccagcggcggctacatcaccggcgaccaggccagaaacttcttcctgcagagcggcctgcccgcccccgtgctggccgagatctgggccctgagcgacctgaacaaggacggcaagatggaccagcaggagttcagcatcgccatgaagctgatcaagctgaagctgcagggccagcagctgcccgtggtgctgccccccatcatgaagcagccccccatgttcagccccctgatcagcgccagattcggcatgggcagcatgcccaacctgagcatcccccagcccctgccccccgccgcccccatcaccagcctgagcagcgccaccagcggcaccaacctgccccccctgatgatgcccacccccctggtgcccagcgtgagcaccagcagcctgcccaacggcaccgccagcctgatccagcccctgcccatcccctacagcagcagcaccctgccccacggcagcagctacagcctgatgatgggcggcttcggcggcgccagcatccagaaggcccagagcctgatcgacctgggcagcagcagcagcaccagcagcaccgccagcctgagcggcaacagccccaagaccggcaccagcgagtgggccgtgccccagcccaccagactgaagtacagacagaagttcaacaccctggacaagagcatgagcggctacctgagcggcttccaggccagaaacgccctgctgcagagcaacctgagccagacccagctggccaccatctggaccctggccgacgtggacggcgacggccagctgaaggccgaggagttcatcctggccatgcacctgaccgacatggccaaggccggccagcccctgcccctgaccctgccccccgagctggtgccccccagcttcagaggcggcaagcagatcgacagcatcaacggcaccctgcccagctaccagaagatgcaggaggaggagccccagaagaagctgcccgtgaccttcgaggacaagagaaaggccaactacgagagaggcaacatggagctggagaagagaagacaggccctgatggagcagcagcagagagaggccgagagaaaggcccagaaggagaaggaggagtgggagagaaagcagagagagctgcaggagcaggagtggaagaagcagctggagctggagaagagactggagaagcagagagagctggagagacagagagaggaggagagaagaaaggacatcgagagaagagaggccgccaagcaggagctggagagacagagaagactggagtgggagagaatcagaagacaggagctgctgaaccagaagaacagagagcaggaggagatcgtgagactgaacagcaagaagaagaacctgcacctggagctggaggccctgaacggcaagcaccagcagatcagcggcagactgcaggacgtgagactgaagaagcagacccagaagaccgagctggaggtgctggacaagcagtgcgacctggagatcatggagatcaagcagctgcagcaggagctgcaggagtaccagaacaagctgatctacctggtgcccgagaagcagctgctgaacgagagaatcaagaacatgcagttcagcaacacccccgacagcggcgtgagcctgctgcacaagaagagcctggagaaggaggagctgtgccagagactgaaggagcagctggacgccctggagaaggagaccgccagcaagctgagcgagatggacagcttcaacaaccagctgaagtgcggcaacatggacgacagcgtgctgcagtgcctgctgagcctgctgagctgcctgaacaacctgttcctgctgctgaaggagctgagagagacctacaacacccagcagctggccctggagcagctgtacaagatcaagagagacaagctgaaggagatcgagagaaagagactggagctgatgcagaagaagaagctggaggacgaggccgccagaaaggccaagcagggcaaggagaacctgtggaaggagaacctgagaaaggaggaggaggagaagcagaagagactgcaggaggagaagacccaggagaagatccaggaggaggagagaaaggccgaggagaagcagagaaaggacaaggacaccctgaaggccgaggagaagaagagagagaccgccagcgtgctggtgaactacagagccctgtaccccttcgaggccagaaaccacgacgagatgagcttcaacagcggcgacatcatccaggtggacgagaagaccgtgggcgagcccggctggctgtacggcagcttccagggcaacttcggctggttcccctgcaactacgtggagaagatgcccagcagcgagaacgagaaggccgtgagccccaagaaggccctgctgccccccaccgtgagcctgagcgccaccagcaccagcagcgagcccctgagcagcaaccagcccgccagcgtgaccgactaccagaacgtgagcttcagcaacctgaccgtgaacaccagctggcagaagaagagcgccttcaccagaaccgtgagccccggcagcgtgagccccatccacggccagggccaggtggtggagaacctgaaggcccaggccctgtgcagctggaccgccaagaaggacaaccacctgaacttcagcaagcacgacatcatcaccgtgctggagcagcaggagaactggtggttcggcgaggtgcacggcggcagaggctggttccccaagagctacgtgaagatcatccccggcagcgaggtgaagagagaggagcccgaggccctgtacgccgccgtgaacaagaagcccaccagcgccgcctacagcgtgggcgaggagtacatcgccctgtacccctacagcagcgtggagcccggcgacctgaccttcaccgagggcgaggagatcctggtgacccagaaggacggcgagtggtggaccggcagcatcggcgacagaagcggcatcttccccagcaactacgtgaagcccaaggaccaggagagcttcggcagcgccagcaagagcggcgccagcaacaagaagcccgagatcgcccaggtgaccagcgcctacgtggccagcggcagcgagcagctgagcctggcccccggccagctgatcctgatcctgaagaagaacaccagcggctggtggcagggcgagctgcaggccagaggcaagaagagacagaagggctggttccccgccagccacgtgaagctgctgggccccagcagcgagagagccacccccgccttccaccccgtgtgccaggtgatcgccatgtacgactacgccgccaacaacgaggacgagctgagcttcagcaagggccagctgatcaacgtgatgaacaaggacgaccccgactggtggcagggcgagatcaacggcgtgaccggcctgttccccagcaactacgtgaagatgaccaccgacagcgaccccagccagcagtggtgcgccgacctgcagaccctggacaccatgcagcccatcgagagaaagagacagggctacatccacgagctgatccagaccgaggagagatacatggccgacctgcagctggtggtggaggtgttccagaagagaatggccgagagcggcttcctgaccgagggcgagatggccctgatcttcgtgaactggaaggagctgatcatgagcaacaccaagctgctgaaggccctgagagtgagaaagaagaccggcggcgagaagatgcccgtgcagatgatcggcgacatcctggccgccgagctgagccacatgcaggcctacatcagattctgcagctgccagctgaacggcgccgccctgctgcagcagaagaccgacgaggacaccgacttcaaggagttcctgaagaagctggccagcgaccccagatgcaagggcatgcccctgagcagcttcctgctgaagcccatgcagagaatcaccagataccccctgctgatcagaagcatcctggagaacacccccgagagccacgccgaccacagcagcctgaagctggccctggagagagccgaggagctgtgcagccaggtgaacgagggcgtgagagagaaggagaacagcgacagactggagtggatccaggcccacgtgcagtgcgagggcctggccgagcagctgatcttcaacagcctgaccaactgcctgggccccagaaagctgctgcacagcggcaagctgtacaagaccaagagcaacaaggagctgcacggcttcctgttcaacgacttcctgctgctgacctacatggtgaagcagttcgccgtgagcagcggcagcgagaagctgttcagcagcaagagcaacgcccagttcaagatgtacaagacccccatcttcctgaacgaggtgctggtgaagctgcccaccgaccccagcagcgacgagcccgtgttccacatcagccacatcgacagagtgtacaccctgagaaccgacaacatcaacgagagaaccgcctgggtgcagaagatcaaggccgccagcgagcagtacatcgacaccgagaagaagaagagagagaaggcctaccaggccagaagccagaagaccagcggcatcggcagactgatggtgcacgtgatcgaggccaccgagctgaaggcctgcaagcccaacggcaagagcaacccctactgcgagatcagcatgggcagccagagctacaccaccagaaccatccaggacaccctgaaccccaagtggaacttcaactgccagttcttcatcaaggacctgtaccaggacgtgctgtgcctgaccctgttcgacagagaccagttcagccccgacgacttcctgggcagaaccgagatccccgtggccaagatcagaaccgagcaggagagcaagggccccatgaccagaagactgctgctgcacgaggtgcccaccggcgaggtgtgggtgagattcgacctgcagctgttcgagcagaagaccctgctgtag

SEQ ID NO: 163451 - protein, 329 aa, Artificial Sequence
  derived and/or modified sequence
MVSKSRWKLLAMLALVLVVMVWYSISREDSFYFPIPEKKEPCLQGEAESKASKLFGNYSRDQPIFLRLEDYFWVKTPSAYELPYGTKGSEDLLLRVLAITSSSIPKNIQSLRCRRCVVVGNGHRLRNSSLGDAINKYDVVIRLNNAPVAGYEGDVGSKTTMRLFYPESAHFDPKVENNPDTLLVLVAFKAMDFHWIETILSDKKRVRKGFWKQPPLIWDVNPKQIRILNPFFMEIAADKLLSLPMQQPRKIKQKPTTGLLAITLALHLCDLVHIAGFGYPDAYNKKQTIHYYEQITLKSMAGSGHNVSQEALAIKRMLEMGAIKNLTSF

SEQ ID NO: 163452 - protein, 328 aa, Artificial Sequence
  derived and/or modified sequence
MCPAGWKLLAMLALVLVVMVWYSISREDSFYFPIPEKKEPCLQGEAESKASKLFGNYSRDQPIFLRLEDYFWVKTPSAYELPYGTKGSEDLLLRVLAITSSSIPKNIQSLRCRRCVVVGNGHRLRNSSLGDAINKYDVVIRLNNAPVAGYEGDVGSKTTMRLFYPESAHFDPKVENNPDTLLVLVAFKAMDFHWIETILSDKKRVRKGFWKQPPLIWDVNPKQIRILNPFFMEIAADKLLSLPMQQPRKIKQKPTTGLLAITLALHLCDLVHIAGFGYPDAYNKKQTIHYYEQITLKSMAGSGHNVSQEALAIKRMLEMGAIKNLTSF

SEQ ID NO: 163453 - DNA, 990 bp, Artificial Sequence
  derived and/or modified sequence
atggtttcaaaatcaaggtggaaactgttagccatgctggcccttgtcctagtagtgatggtgtggtactccatctctagggaggattcattttactttccaatcccagaaaagaaggaaccctgtctgcagggtgaagctgagagtaaggctagcaaactgttcggcaactattcaagagatcagccaatttttctacggctggaggactacttctgggtgaaaactccgtctgcttacgaactgccctacggcaccaaaggatccgaggacctgctgctccgggtgctagccattacgtcgtcaagtattcccaaaaatatacagtccctgcggtgccgccgatgtgtggtggtcggaaatgggcatcggttgcggaattcaagccttggcgatgcaattaataaatatgatgtggttatcagactcaacaacgcgcctgtcgcagggtacgagggagacgtggggagcaaaaccactatgcgcctcttttatcctgagagtgctcattttgatcccaaagtcgaaaacaaccccgatacacttctggtgcttgtcgcattcaaggctatggactttcattggattgaaacaatcctgtcagacaagaaacgtgtgaggaaaggcttctggaagcagcccccactcatctgggatgttaatcccaaacaaatacgaattctgaatcctttcttcatggagatcgcggctgataagcttttgtccttgccaatgcaacagccgagaaagattaagcagaagcccacaaccggcctgttagcgatcacccttgcactgcacctctgtgacttggtccacatcgcaggcttcggatatccagatgcttacaacaagaaacagaccattcattactacgagcagattactcttaagtcaatggccggaagcggtcataacgtgtcccaagaggctctcgctatcaaaagaatgttggagatgggcgctatcaagaacctgacgtcattttag

SEQ ID NO: 163454 - DNA, 990 bp, Artificial Sequence
  derived and/or modified sequence
atggtgtctaagtcacgttggaaactcctcgcgatgctggccttagtactcgtagtgatggtttggtattccattagcagagaagacagtttttattttccgatccctgaaaagaaggagccctgtctgcagggtgaggccgaatctaaagcaagtaaactgtttggaaactatagccgagatcaacccatctttctgcgcttagaagattacttctgggttaaaacaccatctgcatacgagctgccttacggaacaaaaggatcggaggatctgctcttacgggtattggcaattacctcttcttctattcctaaaaatatccagagcctcagatgtagacgctgcgtggtagtcggtaacggccacaggcttcgaaactctagtttaggggacgccatcaataagtacgacgtggtgatcagacttaacaacgctcccgtcgccggatacgaaggggacgtggggtcaaagactaccatgcgccttttttatcctgaatctgcccactttgaccctaaggtggagaacaaccctgacacactgctcgtgcttgtggcattcaaagctatggacttccactggatagagaccattctcagcgataagaagcgcgtgcggaaaggcttctggaaacaacctccgctcatttgggacgtgaaccccaaacagataagaatcttaaacccctttttcatggagattgctgcagacaaactcttgtccctgccaatgcagcaaccacgcaaaattaagcagaaaccaaccaccggcctgttggccatcacactcgctctgcacttatgtgatctcgtgcacatcgctggatttggctatccagatgcatacaataagaaacaaaccatacattattacgaacagatcactctgaaatcgatggctggtagtggccacaatgtaagccaggaagccctcgcaattaaaagaatgctggaaatgggagccatcaagaatctaacatccttctag

SEQ ID NO: 163455 - DNA, 990 bp, Artificial Sequence
  derived and/or modified sequence
atggtgtctaagtcacgttggaaactcctcgcgatgctggccttagtactcgtagtgatggtttggtattccattagcagagaagacagtttttattttccgatccctgaaaagaaggagccctgtctgcagggtgaggccgaatctaaagcaagtaaactgtttggaaactatagccgagatcaacccatctttctgcgcttagaagattacttctgggttaaaacaccatctgcatacgagctgccttacggaacaaaaggatcggaggatctgctcttacgggtattggcaattacctcctcttccatccctaagaacatccaatctctgcggtgccgcaggtgtgtggtggtggggaatggacacaggttacggaactcatctctgggagacgcaattaataaatacgacgtggtgataagactgaacaatgccccagtggcaggatacgagggcgatgtgggtagcaagacaacaatgcgactgttttacccagaatccgctcactttgaccctaaggtggaaaataaccccgatactctccttgttctcgttgctttcaaagctatggactttcattggatcgaaacaatactgagcgataagaagagggtgcgcaagggattttggaagcagccacctctcatttgggacgttaaccctaaacagatccgaatcctgaacccctttttcatggagattgcagctgataaacttttatccctgcccatgcagcagccccggaagataaaacaaaagcccaccactggtttactggcaatcactctggcccttcatctgtgcgatttggtacacatcgccggctttggatatcctgacgcttataataaaaagcaaactatacactactacgagcaaatcacactcaaaagcatggctggtagtggccacaatgtaagccaggaagccctcgcaattaaaagaatgctggaaatgggagccatcaagaatctaacatccttctag

SEQ ID NO: 163456 - DNA, 1459 bp, Artificial Sequence
  derived and/or modified sequence
gagccgcggggtcctcggccgcctgaccccagccggcgccgcgcctcccggagggggtcgggccctgcacgtgggcgcagcgcgggtcggggtggggctgccacagccctgcggagctgctttccggggtccctttccctggaccagattttcgcgggaagccggatcctctccgttcccttggagtgagcaagcgggacagttctgcggaaagtttccgcccccaatcccccagccctgcgcccggactgaagcggcggcccccacctccagcatcctcgagcgatggtttctcccacaactaccccggtcaggtccagcacttgggagctgactgtgctggaggtgacaggctttgcggggtccgcctgtgtgcaggagtcgcaaggtcgctgagcaggacccaaaggtggcccgaggcagccgggatgacagctctccccaggaatcctgctgcctgctgagaaacatggtcagcaagtcccgctggaagctcctggccatgttggctctggtcctggtcgtcatggtgtggtattccatctcccgggaagacagtttttattttcccatcccagagaagaaggagccgtgcctccagggtgaggcagagagcaaggcctctaagctctttggcaactactcccgggatcagcccatcttcctgcggcttgaggattatttctgggtcaagacgccatctgcttacgagctgccctatgggaccaaggggagtgaggatctgctcctccgggtgctagccatcaccagctcctccatccccaagaacatccagagcctcaggtgccgccgctgtgtggtcgtggggaacgggcaccggctgcggaacagctcactgggagatgccatcaacaagtacgatgtggtcatcagattgaacaatgccccagtggctggctatgagggtgacgtgggctccaagaccaccatgcgtctcttctaccctgaatctgcccacttcgaccccaaagtagaaaacaacccagacacactcctcgtcctggtagctttcaaggcaatggacttccactggattgagaccatcctgagtgataagaagcgggtgcgaaagggtttctggaaacagcctcccctcatctgggatgtcaatcctaaacagattcggattctcaaccccttcttcatggagattgcagctgacaaactgctgagcctgccaatgcaacagccacggaagattaagcagaagcccaccacgggcctgttggccatcacgctggccctccacctctgtgacttggtgcacattgccggctttggctacccagacgcctacaacaagaagcagaccattcactactatgagcagatcacgctcaagtccatggcggggtcaggccataatgtctcccaagaggccctggccattaagcggatgctggagatgggagctatcaagaacctcacgtccttctga

SEQ ID NO: 163457 - DNA, 1790 bp, Artificial Sequence
  derived and/or modified sequence
cccgggcccgggtccccgcctcccctgcaggcggactcgcccgctcccaggccggacccgcgcccgggacagggacccggccgagtcgagccgtcgcgccagcgctgcgccgccggtcggtgcgcctagcggatcggagctgcgcgcggaaccgtgctgccccgccccgctccacccgtgagggtggcccgaggcagccgggatgacagctctccccaggaatcctgctgcctgctgagaaacatggtcagcaagtcccgctggaagctcctggccatgttggctctggtcctggtcgtcatggtgtggtattccatctcccgggaagacagtttttattttcccatcccagagaagaaggagccgtgcctccagggtgaggcagagagcaaggcctctaagctctttggcaactactcccgggatcagcccatcttcctgcggcttgaggattatttctgggtcaagacgccatctgcttacgagctgccctatgggaccaaggggagtgaggatctgctcctccgggtgctagccatcaccagctcctccatccccaagaacatccagagcctcaggtgccgccgctgtgtggtcgtggggaacgggcaccggctgcggaacagctcactgggagatgccatcaacaagtacgatgtggtcatcagattgaacaatgccccagtggctggctatgagggtgacgtgggctccaagaccaccatgcgtctcttctaccctgaatctgcccacttcgaccccaaagtagaaaacaacccagacacactcctcgtcctggtagctttcaaggcaatggacttccactggattgagaccatcctgagtgataagaagcgggtgcgaaagggtttctggaaacagcctcccctcatctgggatgtcaatcctaaacagattcggattctcaaccccttcttcatggagattgcagctgacaaactgctgagcctgccaatgcaacagccacggaagattaagcagaagcccaccacgggcctgttggccatcacgctggccctccacctctgtgacttggtgcacattgccggctttggctacccagacgcctacaacaagaagcagaccattcactactatgagcagatcacgctcaagtccatggcggggtcaggccataatgtctcccaagaggccctggccattaagcggatgctggagatgggagctatcaagaacctcacgtccttctgacctgggcaagagctgtagcctgtcggttgcctactctgctgtctgggtgacccccatgcgtggctgtgggggtggctggtgccagtatgacccacttggactcaccccctcttggggagggagttctgggcctggccaggtctgagatgaggccatgcccctggctgctcttatggagccgagatccagtcagggtgggggcgctggagccgtgggagcccggccagggcagggggctcgttgctgtggcaccccctctctgccagcaccaagagattatttaatgggctatttaattaaggggtaggaaggtgctgtgggctggtcccacacatccaggaaagaggccagtagagaattctgcccactttttataaaaacttacagcgatggccccaccaaggcctagacacggcactggcctcccaggagggcaggggcattgggaatgggtgggtgccctccagagaggggctgctacctcccagcaggcatgggaagagcactggtgtgggggttccaccgagaaggggacctcatctagaaaagaggttaca

SEQ ID NO: 163458 - DNA, 990 bp, Artificial Sequence
  derived and/or modified sequence
atggtgagcaagagcagatggaagctgctggccatgctggccctggtgctggtggtgatggtgtggtacagcatcagcagagaggacagcttctacttccccatccccgagaagaaggagccctgcctgcagggcgaggccgagagcaaggccagcaagctgttcggcaactacagcagagaccagcccatcttcctgagactggaggactacttctgggtgaagacccccagcgcctacgagctgccctacggcaccaagggcagcgaggacctgctgctgagagtgctggccatcaccagcagcagcatccccaagaacatccagagcctgagatgcagaagatgcgtggtggtgggcaacggccacagactgagaaacagcagcctgggcgacgccatcaacaagtacgacgtggtgatcagactgaacaacgcccccgtggccggctacgagggcgacgtgggcagcaagaccaccatgagactgttctaccccgagagcgcccacttcgaccccaaggtggagaacaaccccgacaccctgctggtgctggtggccttcaaggccatggacttccactggatcgagaccatcctgagcgacaagaagagagtgagaaagggcttctggaagcagccccccctgatctgggacgtgaaccccaagcagatcagaatcctgaaccccttcttcatggagatcgccgccgacaagctgctgagcctgcccatgcagcagcccagaaagatcaagcagaagcccaccaccggcctgctggccatcaccctggccctgcacctgtgcgacctggtgcacatcgccggcttcggctaccccgacgcctacaacaagaagcagaccatccactactacgagcagatcaccctgaagagcatggccggcagcggccacaacgtgagccaggaggccctggccatcaagagaatgctggagatgggcgccatcaagaacctgaccagcttctag

SEQ ID NO: 163459 - DNA, 990 bp, Artificial Sequence
  derived and/or modified sequence
atggtcagtaaatcccggtggaagttactggcaatgttggctcttgtgctcgttgttatggtctggtactccatctctagggaagactccttctatttccctatcccggaaaaaaaggagccctgtctccagggagaagccgagtctaaagcatctaagctgttcggcaactattcccgggaccagccaatctttctccggctggaagactacttctgggtcaagacgccatcagcctatgagcttccttatgggacaaagggatcggaagaccttctcttacgggtgctggccatcacatcctccagcatcccaaagaacattcagtccctccggtgtagaaggtgcgtggttgtgggaaacggccaccggctcagaaactcgtccctgggcgacgccatcaacaagtatgatgtggtcattcgtttgaataacgctccggtcgcaggctacgagggagacgtagggtccaagaccacaatgcgactcttctaccccgagagcgcccactttgatccaaaggtcgaaaacaaccccgatacgctcctggtgctcgtcgctttcaaagctatggactttcattggatcgagactatattgtcagacaaaaagagagtgcgcaaaggcttttggaagcaaccgcccctcatctgggatgtgaaccccaaacagatacggattctgaacccattctttatggagattgccgcagacaagctgctctccctacccatgcaacagccacggaagataaagcagaagccaactaccggcttgctagcaatcacattggccctccatttatgcgatctggtgcatatcgccggatttgggtatcctgacgcatataataagaaacagacgatccactattacgagcagattacactcaagagcatggcgggatccggtcacaatgtgtcgcaggaggccctcgcaataaagaggatgcttgagatgggcgcaatcaagaacctgactagtttctag

SEQ ID NO: 163460 - DNA, 990 bp, Artificial Sequence
  derived and/or modified sequence
atggtgtccaagagccgctggaagctgctggccatgctggccctggtgctggtggtgatggtgtggtacagcatcagccgggaggacagcttctacttccccatccctgagaagaaggagccctgcctgcagggcgaggccgagagcaaggccagcaagctgtttggaaactacagccgggaccagcccatcttcctgcggctggaggactacttctgggtgaagacccccagcgcctatgagctgccctacggcaccaagggcagcgaggacctgctgctgcgggtgctggccatcaccagcagcagcatccccaagaacatccagagcctgcgctgccgccgctgtgtggtggtgggcaatggccaccggctgaggaacagcagcctgggagatgccatcaacaagtatgatgtggtgatccggctgaacaatgcccctgtggccggctatgaaggagatgtgggcagcaagaccaccatgaggctcttctacccagagagcgcccactttgaccccaaggtggagaacaacccagacaccctgctggtgctggtggccttcaaggccatggacttccactggattgagaccatcctgagtgacaagaagagggtgaggaagggcttctggaagcagcccccactcatctgggatgtgaaccccaagcagatccgcatcctgaaccccttcttcatggagattgctgctgacaagctgctgagcctgcccatgcagcagcccaggaagatcaagcagaagcccaccaccggcctgctggccatcaccctggccctgcacctgtgtgacctggtgcacatcgccggcttcggctacccagatgcctacaacaagaagcagaccatccactactatgagcagatcaccctgaagtccatggccggcagcggccacaacgtgtcccaggaggccctggccatcaagaggatgctggagatgggcgccatcaagaacctgaccagcttctag

SEQ ID NO: 163461 - DNA, 990 bp, Artificial Sequence
  derived and/or modified sequence
atggtgagcaagagccggtggaagctgctggccatgctggccctggtgttggtggttatggtgtggtatagcatctccagagaggatagtttctacttcccaattccggaaaagaaagagccctgcctgcagggtgaggctgagagcaaagccagtaaacttttcgggaactatagcagagaccagccgatcttcttgagactggaggattacttttgggttaaaacaccgtctgcctacgaattaccttatgggacaaagggcagcgaggatttactgcttagggtgctggccattactagcagctcaatccctaaaaatattcaatctctgcggtgtagacgttgcgtggtggtcggcaacggccatcgacttagaaattcgagtctcggcgatgctattaacaaatacgatgtggtcattcgcctaaacaatgcacccgtcgcaggctatgagggggacgtcgggtccaagaccacaatgcgtttgttctatccagagagcgctcatttcgacccgaaagttgagaacaatcctgatacgctgctggtgcttgtggctttcaaggccatggattttcactggatcgagacgatcctgagcgacaaaaagcgagtgcggaaaggcttctggaaacagccccctctgatctgggacgttaatccaaagcagatccgcatcctaaacccattttttatggaaatcgcggccgataagctgctcagcctgcccatgcaacagccccgcaagataaaacagaagccaactactgggcttctggccatcacactggctcttcatttgtgtgatctggtacacatcgccggcttcgggtaccctgatgcttataataaaaagcaaaccatccattattatgagcaaattaccttgaagtctatggcgggtagtggccataatgtcagccaggaggctctggccattaaacgaatgctggaaatgggcgctatcaagaacctgacttccttttag

SEQ ID NO: 163462 - DNA, 990 bp, Artificial Sequence
  derived and/or modified sequence
atggtgtcaaagtcccgctggaagttgctcgcaatgcttgctctagttctggtggtgatggtgtggtactccattagtcgggaagattccttttactttccaatccctgagaaaaaggaaccctgcttacaaggtgaggccgagtctaaagcctcaaaactcttcggcaactattccagggaccagccaattttcctccggctggaagattacttctgggtcaaaacacccagtgcctatgagctaccctacggtacaaagggtagcgaggacctgctgctgagagtgctcgcaatcaccagttcttcaatccccaaaaacatccagtcactgcggtgtcgtcgctgcgttgtggtggggaacgggcatcggctgcggaattcttccctaggcgacgcaatcaataagtacgatgtcgtcattagactcaataatgcaccagtggctggctatgagggggacgtcggatcaaagacaacaatgaggctgttctacccggaatccgcccatttcgatcctaaggtagagaataaccctgacacactgctcgttttggtggcctttaaggcaatggactttcattggatagagaccatcctttcagataaaaagagggtcaggaagggattttggaagcagccccctctgatttgggacgtgaaccccaaacagattaggatactgaaccctttctttatggagatcgcagccgacaaactcctgtcccttccgatgcagcagccaagaaagataaaacaaaaaccaacaacaggactgctggcaataacattagctttacatctctgtgatctggtccacatcgcggggtttggatacccagatgcctataataagaagcaaaccatacattactacgagcagattactttgaagagcatggctggaagcgggcacaacgtctcccaggaagccttagccatcaaaagaatgttggaaatgggcgcaataaaaaacctcacctcattctag

SEQ ID NO: 163463 - DNA, 990 bp, Artificial Sequence
  derived and/or modified sequence
atggtgagcaagagccggtggaagctgctggccatgctggccctggttttggtggtcatggtttggtatagcataagccgcgaggactccttctattttcccatcccggagaaaaaggagccctgtctgcaaggagaggcggagtcgaaagcctccaagctatttggtaactattcaagagaccagcccatcttcctgcgactcgaggattatttctgggtgaagacacccagcgcctacgaattgccttacggcacaaagggttccgaggacctcctcctcagagtacttgccattacatcttcatcaatccccaaaaatattcagtctctccgctgtcggaggtgcgttgtggtggggaatggccaccggttgcgaaacagctctttaggggacgcaattaacaagtacgatgttgtcatccggttgaataatgcccctgttgcaggctacgagggagatgtcggcagcaagacgacaatgcgcctgttctatcccgaatccgctcactttgatcctaaggtagaaaacaaccctgacacccttcttgtgctggtggccttcaaagccatggacttccattggattgagactattctcagcgacaagaagagggtgcgcaagggcttctggaaacagcctccactaatctgggatgtcaatcctaaacagattagaattcttaaccccttctttatggaaatcgctgccgacaagctgcttagcttacccatgcagcagccgaggaagatcaagcagaaacccaccactggtttgttggcaattaccctggcactgcacctgtgtgacctcgtgcacatcgccggattcggttacccagacgcctataacaagaaacagacaatccactactatgaacagataactctgaaaagcatggctgggagcgggcataatgtgagtcaagaagcgttagcaatcaagagaatgctggagatgggggccatcaagaacctgacatcgttctag

SEQ ID NO: 163464 - DNA, 990 bp, Artificial Sequence
  derived and/or modified sequence
atggtgtctaaatctaggtggaagttgctggctatgctggcgctggtgcttgtggtgatggtgtggtattccattagtcgcgaggacagcttctactttcctatccccgagaaaaaggagccatgtttgcagggcgaagccgaatccaaggccagcaaacttttcggaaactattctcgcgatcagccgatatttttgaggctggaggattacttttgggtcaagactccatctgcttacgagctcccttacggcaccaagggaagcgaggatctcctcctgcgcgtgctggcgataacctcgtcgtcaatcccaaaaaacattcagtcactgaggtgccggagatgcgttgtggtgggtaatgggcaccgcctgcgtaatagtagccttggggatgcgatcaacaaatacgacgtagtgatcaggcttaacaacgccccagtggccggatatgaaggcgatgtcggatctaaaacgaccatgagactgttctacccagagtccgctcacttcgatccaaaggtggaaaacaatcccgatacactgctggttctggttgcgttcaaggctatggacttccactggatcgagactatcttgagcgataagaagagagtgcggaaaggcttctggaagcagcctccccttatatgggacgtgaacccaaagcaaattcgcatactgaacccattctttatggagatagctgccgacaagttacttagtttgcctatgcagcaaccaaggaagatcaaacaaaagcctactactggactgctcgcaattactttggccctgcatctttgtgacctagttcacatagcagggtttggttatccggatgcttataacaaaaagcagacaatacattattacgagcagattaccctgaagagcatggcagggagtgggcataatgtttcccaagaggccttggcaatcaaaaggatgctggaaatgggagctatcaaaaacctgacttccttctag

SEQ ID NO: 163465 - DNA, 990 bp, Artificial Sequence
  derived and/or modified sequence
atggttagcaaatcacggtggaagttacttgctatgctggctttagtgctggtagtcatggtgtggtattcgatctccagggaggatagtttttactttcccatccccgaaaaaaaggagccatgtctgcagggggaagccgaaagtaaagcaagcaagctctttggtaattatagtagggaccaaccgatatttctgcgcttagaagattacttttgggtcaagaccccttcagcttatgagctgccatatggtactaagggctccgaagacctccttctccgggtgttggcgattacctcctcaagcatccctaaaaacattcaaagtttaagatgcagaaggtgcgttgtggtgggaaacggacatagactcaggaacagctctcttggcgacgctattaacaagtacgatgtcgttattcgcctgaacaatgcccctgtagctgggtacgagggggacgtgggttccaaaacaaccatgcgacttttctaccctgagagtgcccacttcgatcctaaggtggagaacaaccctgatacactacttgtcttagtggccttcaaagcaatggattttcattggatagaaactattttgtctgacaagaaacgtgttcggaaaggattttggaagcagccccccctcatatgggatgttaacccaaagcaaataagaatccttaatccctttttcatggagatcgctgcagacaagctgctctctctgccgatgcaacagccgagaaaaattaaacaaaagcctaccaccgggttactcgcgataacattagctttacatctgtgtgaccttgtccatatcgcgggctttggctaccctgacgcctacaacaaaaagcagacaattcactattacgagcagatcacactcaagtctatggccgggagcggacataacgtttctcaggaggctctggcgatcaagcggatgctggagatgggagccattaagaatctgaccagcttttag

SEQ ID NO: 163466 - DNA, 990 bp, Artificial Sequence
  derived and/or modified sequence
atggtctccaagtcccgctggaaactcttggcaatgctggccttggtcctcgtggtcatggtttggtattcgattagcagggaggactcattttatttccccatacctgagaaaaaagagccatgcctgcagggtgaggcagagtccaaagccagcaaattgtttggcaattactcaagggaccaaccgatattcctacggcttgaagactacttttgggtgaaaactccctcagcatacgagttgccttatggtactaaaggaagtgaagatctgcttttaagggtacttgctattacctcctcaagcatccctaaaaacattcaaagtttaagatgcagaaggtgcgttgtggtgggaaacggacatagactcaggaacagctctcttggcgacgctattaacaagtacgatgtcgttattcgcctgaacaatgcccctgtagctgggtacgagggggacgtgggttccaaaacaaccatgcgacttttctaccctgagagtgcccacttcgatcctaaggtggagaacaaccctgatacactacttgtcttagtggccttcaaagcaatggattttcattggatagaaactattttgtcagacaaaaaacgggtgagaaagggcttttggaagcagccacccttaatctgggatgttaatccaaaacaaatccgaattctaaaccccttcttcatggagatagcagctgacaaactgctatcgcttcctatgcagcaacctcgcaaaatcaaacaaaaaccaacgactgggctcctagctataacactggcactccacctgtgcgatcttgtccacatcgctggtttcgggtatccagacgcctacaacaaaaaacagactatacactactatgagcagattacgctaaaaagtatggcaggcagcggtcacaatgtctcccaggaagcccttgctatcaaaaggatgttggaaatgggcgccatcaagaaccttacctccttctag

SEQ ID NO: 163467 - RNA, 990 nt, Artificial Sequence
  derived and/or modified sequence
auggugucuaagucacguuggaaacuccucgcgaugcuggccuuaguacucguagugaugguuugguauuccauuagcagagaagacaguuuuuauuuuccgaucccugaaaagaaggagcccugucugcagggugaggccgaaucuaaagcaaguaaacuguuuggaaacuauagccgagaucaacccaucuuucugcgcuuagaagauuacuucuggguuaaaacaccaucugcauacgagcugccuuacggaacaaaaggaucggaggaucugcucuuacggguauuggcaauuaccucuucuucuauuccuaaaaauauccagagccucagauguagacgcugcgugguagucgguaacggccacaggcuucgaaacucuaguuuaggggacgccaucaauaaguacgacguggugaucagacuuaacaacgcucccgucgccggauacgaaggggacguggggucaaagacuaccaugcgccuuuuuuauccugaaucugcccacuuugacccuaagguggagaacaacccugacacacugcucgugcuuguggcauucaaagcuauggacuuccacuggauagagaccauucucagcgauaagaagcgcgugcggaaaggcuucuggaaacaaccuccgcucauuugggacgugaaccccaaacagauaagaaucuuaaaccccuuuuucauggagauugcugcagacaaacucuugucccugccaaugcagcaaccacgcaaaauuaagcagaaaccaaccaccggccuguuggccaucacacucgcucugcacuuaugugaucucgugcacaucgcuggauuuggcuauccagaugcauacaauaagaaacaaaccauacauuauuacgaacagaucacucugaaaucgauggcugguaguggccacaauguaagccaggaagcccucgcaauuaaaagaaugcuggaaaugggagccaucaagaaucuaacauccuucuag

SEQ ID NO: 163468 - RNA, 990 nt, Artificial Sequence
  derived and/or modified sequence
auggugucuaagucacguuggaaacuccucgcgaugcuggccuuaguacucguagugaugguuugguauuccauuagcagagaagacaguuuuuauuuuccgaucccugaaaagaaggagcccugucugcagggugaggccgaaucuaaagcaaguaaacuguuuggaaacuauagccgagaucaacccaucuuucugcgcuuagaagauuacuucuggguuaaaacaccaucugcauacgagcugccuuacggaacaaaaggaucggaggaucugcucuuacggguauuggcaauuaccuccucuuccaucccuaagaacauccaaucucugcggugccgcagguguguggugguggggaauggacacagguuacggaacucaucucugggagacgcaauuaauaaauacgacguggugauaagacugaacaaugccccaguggcaggauacgagggcgauguggguagcaagacaacaaugcgacuguuuuacccagaauccgcucacuuugacccuaagguggaaaauaaccccgauacucuccuuguucucguugcuuucaaagcuauggacuuucauuggaucgaaacaauacugagcgauaagaagagggugcgcaagggauuuuggaagcagccaccucucauuugggacguuaacccuaaacagauccgaauccugaaccccuuuuucauggagauugcagcugauaaacuuuuaucccugcccaugcagcagccccggaagauaaaacaaaagcccaccacugguuuacuggcaaucacucuggcccuucaucugugcgauuugguacacaucgccggcuuuggauauccugacgcuuauaauaaaaagcaaacuauacacuacuacgagcaaaucacacucaaaagcauggcugguaguggccacaauguaagccaggaagcccucgcaauuaaaagaaugcuggaaaugggagccaucaagaaucuaacauccuucuag

SEQ ID NO: 163469 - protein, 491 aa, Artificial Sequence
  derived and/or modified sequence
MEQPPAPKSKLKKLSEDSLTKQPEEVFDVLEKLGEGSYGSVFKAIHKESGQVVAIKQVPVESDLQEIIKEISIMQQCDSPYVVKYYGSYFKNTDLWIVMEYCGAGSVSDIIRLRNKTLIEDEIATILKSTLKGLEYLHFMRKIHRDIKAGNILLNTEGHAKLADFGVAGQLTDTMAKRNTVIGTPFWMAPEVIQEIGYNCVADIWSLGITSIEMAEGKPPYADIHPMRAIFMIPTNPPPTFRKPELWSDDFTDFVKKCLVKNPEQRATATQLLQHPFIKNAKPVSILRDLITEAMEIKAKRHEEQQRELEEEEENSDEDELDSHTMVKTSVESVGTMRATSTMSEGAQTMIEHNSTMLESDLGTMVINSEDEEEEDGTMKRNATSPQVQRPSFMDYFDKQDFKNKSHENCNQNMHEPFPMSKNVFPDNWKVPQDGDFDFLKNLSLEELQMRLKALDPMMEREIEELRQRYTAKRQPILDAMDAKKRRQQNF

SEQ ID NO: 163470 - DNA, 1476 bp, Artificial Sequence
  derived and/or modified sequence
atggagcagccccccgcccccaagagcaagctgaagaagctgagcgaggacagcctgaccaagcagcccgaggaggtgttcgacgtgctggagaagctgggcgagggcagctacggcagcgtgttcaaggccatccacaaggagagcggccaggtggtggccatcaagcaggtgcccgtggagagcgacctgcaggagatcatcaaggagatcagcatcatgcagcagtgcgacagcccctacgtggtgaagtactacggcagctacttcaagaacaccgacctgtggatcgtgatggagtactgcggcgccggcagcgtgagcgacatcatcagactgagaaacaagaccctgatcgaggacgagatcgccaccatcctgaagagcaccctgaagggcctggagtacctgcacttcatgagaaagatccacagagacatcaaggccggcaacatcctgctgaacaccgagggccacgccaagctggccgacttcggcgtggccggccagctgaccgacaccatggccaagagaaacaccgtgatcggcacccccttctggatggcccccgaggtgatccaggagatcggctacaactgcgtggccgacatctggagcctgggcatcaccagcatcgagatggccgagggcaagcccccctacgccgacatccaccccatgagagccatcttcatgatccccaccaaccccccccccaccttcagaaagcccgagctgtggagcgacgacttcaccgacttcgtgaagaagtgcctggtgaagaaccccgagcagagagccaccgccacccagctgctgcagcaccccttcatcaagaacgccaagcccgtgagcatcctgagagacctgatcaccgaggccatggagatcaaggccaagagacacgaggagcagcagagagagctggaggaggaggaggagaacagcgacgaggacgagctggacagccacaccatggtgaagaccagcgtggagagcgtgggcaccatgagagccaccagcaccatgagcgagggcgcccagaccatgatcgagcacaacagcaccatgctggagagcgacctgggcaccatggtgatcaacagcgaggacgaggaggaggaggacggcaccatgaagagaaacgccaccagcccccaggtgcagagacccagcttcatggactacttcgacaagcaggacttcaagaacaagagccacgagaactgcaaccagaacatgcacgagcccttccccatgagcaagaacgtgttccccgacaactggaaggtgccccaggacggcgacttcgacttcctgaagaacctgagcctggaggagctgcagatgagactgaaggccctggaccccatgatggagagagagatcgaggagctgagacagagatacaccgccaagagacagcccatcctggacgccatggacgccaagaagagaagacagcagaacttctag

SEQ ID NO: 163471 - DNA, 1476 bp, Artificial Sequence
  derived and/or modified sequence
atggaacagcctcccgcccctaaaagtaagctgaaaaaactctcggaagactccttgaccaaacagcccgaggaagtgttcgatgtgctggagaaactcggcgaaggaagttacggctctgtgtttaaagctattcacaaggaaagtggccaggtggtggcaatcaagcaggttcccgtggagtctgatctgcaagagatcattaaggagatttcaataatgcaacagtgtgactcgccctacgtggtgaagtattacgggagttatttcaaaaacaccgacctgtggatcgtgatggagtattgtggtgccggctcggtctccgacataattagactgagaaataagacactgatcgaggacgagatcgccaccattttaaaatccaccctcaagggcctcgagtatctgcatttcatgagaaaaattcaccgcgacatcaaggccggcaacattctgctcaacacagaagggcacgcaaagctggctgattttggggtggctgggcaattaacggacaccatggctaaacggaataccgtgataggcacgcccttttggatggcacctgaagtcattcaggagatcgggtataattgcgtggccgatatttggagtctgggcatcacatcaatcgaaatggccgaaggcaagcctccctacgcagacatacatcctatgcgcgccatttttatgatcccgactaatcccccgccaacgtttagaaaacccgaactgtggtctgatgacttcacagactttgttaagaaatgtcttgtgaagaacccggagcagagggctacggcgacccagttgctccagcatccttttatcaagaacgcaaaaccagtgtctattctgcgagacctcatcaccgaggcaatggaaatcaaagccaagaggcacgaggaacagcagcgggaattagaggaagaggaggaaaatagtgatgaagatgagttggatagtcacactatggtgaaaacttctgttgagagtgtcgggaccatgagagccacaagcaccatgtctgagggcgcccagacaatgatcgagcacaacagtactatgctcgagtctgacctgggtactatggtaataaactctgaggatgaggaggaggaagatggaaccatgaagcgaaacgccacctcacctcaagtccaacggccatcattcatggattacttcgataagcaggactttaaaaataagagtcatgagaactgcaatcagaatatgcacgagccctttcctatgtcaaagaacgtctttcccgataattggaaagtgccccaggacggcgacttcgactttctgaagaatttgtccctggaggagttgcaaatgcggctgaaggcgctcgaccctatgatggaacgcgagatcgaagagctaagacaacgctacacagccaagcgccaaccaattcttgacgccatggacgcaaaaaaaagacgccaacagaatttctag

SEQ ID NO: 163472 - DNA, 1476 bp, Artificial Sequence
  derived and/or modified sequence
atggagcagcccccagcccccaagagcaagctgaagaagctgtctgaggacagcctgaccaagcagcctgaggaggtgtttgatgtgctggagaagctgggggagggcagctatggcagcgtcttcaaggccatccacaaggagagcggccaggtggtggccatcaagcaggtgcctgtggagagtgacctgcaggagatcatcaaggagatcagcatcatgcagcagtgtgacagcccctacgtggtgaagtactacggcagctacttcaagaacacagacctgtggatcgtgatggagtactgtggggccggctctgtgtctgacatcatccggctgaggaacaagaccctgattgaagatgaaattgccaccatcctgaagagcaccctgaagggcctggagtacctgcacttcatgaggaagatccaccgggacatcaaggccggcaacatcctgctgaacacagagggccacgccaagctggccgactttggagtggccggccagctgacagacaccatggccaagaggaacacagtcatcggcacccccttctggatggcccctgaggtgatccaggagatcggctacaactgtgtggccgacatctggagcctgggcatcaccagcattgagatggccgagggcaagccaccctatgctgacatccaccccatgagggccatcttcatgatccccaccaaccccccacccaccttcaggaagccagagctgtggagcgatgacttcacagactttgtgaagaagtgcctggtgaagaaccctgagcagagggccacagccacccagctgctgcagcaccccttcatcaagaatgccaagcctgtgtccatcctgcgggacctgatcacagaggccatggagatcaaggccaagagacatgaggagcagcagcgggagctggaggaggaggaggagaacagtgatgaagatgagctggacagccacaccatggtgaagacctctgtggagagcgtgggcaccatgagggccaccagcaccatgtctgagggcgcccagaccatgattgagcacaacagcaccatgctggagagtgacctgggcaccatggtgatcaacagtgaagatgaggaggaggaggatggcaccatgaagagaaatgccaccagcccccaggtgcagaggcccagcttcatggactactttgacaagcaggacttcaagaacaagagccatgagaactgcaaccagaacatgcatgagcccttccccatgagcaagaatgtgtttcctgacaactggaaggtgccccaggatggagactttgacttcctgaagaacctgagcctggaggagctgcagatgaggctgaaggccctggaccccatgatggagcgggagattgaggagctgcggcagcgctacacagccaagaggcagcccatcctggatgccatggatgccaagaagaggcggcagcagaacttctag

SEQ ID NO: 163473 - DNA, 1476 bp, Artificial Sequence
  derived and/or modified sequence
atggagcagccccccgcccccaagagcaagctgaagaagctgagcgaggatagcctgacaaaacagcccgaagaagtgttcgacgttctcgaaaaactgggagagggaagttatggatctgtgttcaaggctatccacaaggagtctgggcaagtcgtagcaatcaagcaggtccccgtggaatctgatctgcaggaaataatcaaggaaattagtataatgcagcaatgcgacagcccctatgttgtgaagtactacggatcctacttcaagaatactgatctgtggattgtaatggaatactgcggcgcgggatccgtgtccgacatcattagactgcgcaataagactttaatcgaagacgagattgcgactatcctgaagagcaccctgaaggggttggagtacttgcatttcatgaggaaaatccacagggacatcaaagcgggcaatattctactgaacactgagggtcacgctaagctcgcggattttggagtggccggtcaactgacggataccatggcaaagcgaaataccgttatcgggacccctttctggatggcacctgaggttatccaagaaatcggctacaattgtgttgccgatatttggagcctgggaattacctccattgagatggcggagggcaaacctccttacgctgatattcatcctatgcgcgctatctttatgataccaaccaatccaccgccaacctttcgtaagcctgaactatggtctgatgattttacagactttgtgaaaaagtgtctggtcaaaaaccctgaacagcgggcgactgcaactcagcttcttcagcatcctttcatcaagaacgccaagcctgtctccatcctgcgcgacctcataaccgaagccatggaaataaaagctaaaaggcatgaagagcaacagagggaactggaggaagaagaggaaaatagtgatgaagacgagctcgattcccatactatggtgaagacatccgtggaatctgtcgggactatgcgagccacgtcaaccatgtctgaaggggctcaaacgatgattgagcataatagtactatgctcgagtcagatctaggcactatggtgatcaattccgaggacgaagaagaggaagacggcactatgaaacgcaatgcaacctccccccaagtccagcgtcccagtttcatggactatttcgacaaacaagactttaagaacaagtcccatgaaaactgcaatcaaaacatgcacgaaccctttccaatgtctaagaacgtgttcccagacaattggaaggtcccccaggatggtgacttcgactttctgaaaaatttaagcctcgaagagcttcaaatgcgtctgaaggcactggacccaatgatggaacgggaaatcgaggagctgagacaaagatatactgccaagcgacaacctattttagacgccatggacgcgaaaaaacggcgtcaacagaacttttag

SEQ ID NO: 163474 - DNA, 2820 bp, Artificial Sequence
  derived and/or modified sequence
ccgcggagttacgggaaagttggtccgagttcccagagtttccctctgtggtgccctaggctcggccggccggtgccccggctcctttcctcctttcggccttcgccgtccaccaggtccctctctctgtccccggccgccatggagcagccgccggcgcctaagagtaaactaaaaaagctgagtgaagacagtttgactaagcagcctgaagaagtttttgatgtattagagaagcttggagaagggtcttatggaagtgtatttaaagcaatacacaaggaatccggtcaagttgtcgcaattaaacaagtacctgttgaatcagatcttcaggaaataatcaaagaaatttccataatgcagcaatgtgacagcccatatgttgtaaagtactatggcagttattttaagaatacagacctctggattgttatggagtactgtggcgctggctctgtctcagacataattagattacgaaacaagacattaatagaagatgaaattgcaaccattcttaaatctacattgaaaggactagaatatttgcactttatgagaaaaatacacagagatataaaagctggaaatattctcctcaatacagaaggacatgcaaaattggcagattttggagtggctggtcagttaacagatacaatggcaaaacgcaatactgtaataggaactccattttggatggctcctgaggtgattcaagaaataggctataactgtgtggccgacatctggtcccttggcattacttctatagaaatggctgaaggaaaacctccttatgctgatatacatccaatgagggctatttttatgattcccacaaatccaccaccaacattcagaaagccagaactttggtccgatgatttcaccgattttgttaaaaagtgtttggtgaagaatcctgagcagagagctactgcaacacaacttttacagcatccttttatcaagaatgccaaacctgtatcaatattaagagacctgatcacagaagctatggagatcaaagctaaaagacatgaggaacagcaacgagaattggaagaggaagaagaaaattcggatgaagatgagctggattcccacaccatggtgaagactagtgtggagagtgtgggcaccatgcgggccacaagcacgatgagtgaaggggcccagaccatgattgaacataatagcacgatgttggaatccgacttggggaccatggtgataaacagtgaggatgaggaagaagaagatggaactatgaaaagaaatgcaacctcaccacaagtacaaagaccatctttcatggactactttgataagcaagacttcaagaataagagtcacgaaaactgtaatcagaacatgcatgaacccttccctatgtccaaaaacgtttttcctgataactggaaagttcctcaagatggagactttgactttttgaaaaatctaagtttagaagaactacagatgcggttaaaagcactggaccccatgatggaacgggagatagaagaacttcgtcagagatacactgcgaaaagacagcccattctggatgcgatggatgcaaagaaaagaaggcagcaaaacttttgagtctaatttcctctctgtttttaactattctggagaccaagaaaccactaggaattgaaggaatatttggatatttttaatcctaagattttgccctacaattaggcagaggtcaaaaagtgacaatggtacatgcccaggtaaattcccaaaaggcagaattgacagttgtatctgctgtgcattcactctaagatgaggagaacaaaagaagtgtattctcttgttctgtcagctgcataccagtaataaaactgttatgaaatggattttcaaggtctctaaaccttgaaaatccaaagctattgttgcattgtacagcactgaagggctttatgttacaatattctttattcctatctagtatactaggctatttattgtatccccttaggtaaacttatttatttatgctattttgctttgtttcattttttaaggacaagatcaggatagctttggtgaaggtagggtcatattaatatgatgataatgtgcaaccaatttatactttctgcagggagctatggggtacattccttgatttccaggatagtttttcaaataggaaagcaataatggcagtagttctcaaatgggctaggccttttttatattgaagcaataattccatttttaccctttgaaattttgtttttttgatttttgatgtttggtacaaatagaactatatatatttaggtaaaatagatctatcgtgtttaaaaccaaagaaatcaatggaacccttgcacaaaaaagtgtgataaatatttttaaataaaaacttaatacaaatgtaatttgttaatattgtttcatgttttatgtgtagatctaatagctgaactgattcaaactgtaataagctcatcaatttcatttctatgaaaatgtgctctgttgtcacaggatgtttctgttgattttattcatttcctgggaattggtaaacatcatgttcctgatgataacccagtagcaaaaacatttgtactgagtggtacaagccttggggactgaaaaaaaaaagattaaaaccattaaaaagaaactcatttttacgctgaatgaacatttatatgattgcattgggaccagtcatttcctaagctacatatggccatcttgacagtgttttttcttttgtgtgtttaattattatgtgtaaatcataaagacaaataaatttcactgtgccac

SEQ ID NO: 163475 - DNA, 1476 bp, Artificial Sequence
  derived and/or modified sequence
atggaacagccccctgctccgaagagcaagcttaagaaacttagtgaagactccctgaccaaacaacccgaggaagtctttgatgttcttgaaaagttgggggaagggagctatgggtctgtgtttaaagccatacacaaggagtccggccaggtcgtagccattaaacaggtccccgttgagtccgacctgcaggagatcatcaaggagatttccataatgcaacagtgcgacagtccttacgtggtaaaatactacggatcttacttcaagaacaccgacctgtggattgtcatggaatactgcggcgctggatctgtgagtgatatcattcgtctccgaaacaagacactcatcgaggatgagattgcaaccatcctgaagtcaaccttgaagggcttggagtaccttcacttcatgcgcaagatccatagagatatcaaggctgggaacatcctcttaaacacagagggacacgccaaactggcagattttggagtcgcaggtcagctgactgacacaatggctaaaagaaacacagttattggaactcctttttggatggccccagaggtgatccaggagattggatacaactgtgtagccgatatttggtctttaggcataacctctatagagatggcggagggaaagcctccgtacgcagatatccacccaatgagggccatctttatgattccaacaaacccacctcccaccttccgaaaacccgagctgtggagcgacgactttaccgacttcgtgaaaaaatgtctggtcaagaacccggaacagcgggctacagccactcagcttctccagcacccttttattaaaaacgcaaaacccgtttcgatcctccgcgacctgatcacagaggctatggagatcaaggccaaaagacacgaggagcaacagcgagagctcgaggaggaagaggaaaacagcgatgaagatgagctggacagtcataccatggtgaagacttcagtggaatcagtcggcacaatgcgcgctacttctactatgtctgagggagctcagaccatgatcgaacacaactccacgatgctcgagagcgatctagggactatggtcatcaacagcgaagatgaggaagaggaagacgggactatgaaacgcaacgccacgagcccacaagtgcagcgcccatccttcatggattatttcgacaaacaggacttcaagaataaatcacacgagaattgcaatcagaatatgcacgaacccttccccatgtctaagaatgtgtttcccgataactggaaagtgcctcaggacggcgacttcgacttcttgaagaacctctcactagaagaactgcagatgcgcctgaaggctttagatcctatgatggaacgggagattgaagaattgcggcaacggtatacagcaaaacgtcagccgatattggacgccatggacgccaagaagcgcagacaacagaacttctag

SEQ ID NO: 163476 - protein, 487 aa, Artificial Sequence
  derived and/or modified sequence
METVQLRNPPRRQLKKLDEDSLTKQPEEVFDVLEKLGEGSYGSVYKAIHKETGQIVAIKQVPVESDLQEIIKEISIMQQCDSPHVVKYYGSYFKNTDLWIVMEYCGAGSVSDIIRLRNKTLTEDEIATILQSTLKGLEYLHFMRKIHRDIKAGNILLNTEGHAKLADFGVAGQLTDTMAKRNTVIGTPFWMAPEVIQEIGYNCVADIWSLGITAIEMAEGKPPYADIHPMRAIFMIPTNPPPTFRKPELWSDNFTDFVKQCLVKSPEQRATATQLLQHPFVRSAKGVSILRDLINEAMDVKLKRQESQQREVDQDDEENSEEDEMDSGTMVRAVGDEMGTVRVASTMTDGANTMIEHDDTLPSQLGTMVINAEDEEEEGTMKRRDETMQPAKPSFLEYFEQKEKENQINSFGKSVPGPLKNSSDWKIPQDGDYEFLKSWTVEDLQKRLLALDPMMEQEIEEIRQKYQSKRQPILDAIEAKKRRQQNF

SEQ ID NO: 163477 - protein, 432 aa, Artificial Sequence
  derived and/or modified sequence
METVQLRNPPRRQLKKLDEDSLTKQPEEVFDVLEKLGEGSYGSVYKAIHKETGQIVAIKQVPVESDLQEIIKEISIMQQCDSPHVVKYYGSYFKNTDLWIVMEYCGAGSVSDIIRLRNKTDTMAKRNTVIGTPFWMAPEVIQEIGYNCVADIWSLGITAIEMAEGKPPYADIHPMRAIFMIPTNPPPTFRKPELWSDNFTDFVKQCLVKSPEQRATATQLLQHPFVRSAKGVSILRDLINEAMDVKLKRQESQQREVDQDDEENSEEDEMDSGTMVRAVGDEMGTVRVASTMTDGANTMIEHDDTLPSQLGTMVINAEDEEEEGTMKRRDETMQPAKPSFLEYFEQKEKENQINSFGKSVPGPLKNSSDWKIPQDGDYEFLKSWTVEDLQKRLLALDPMMEQEIEEIRQKYQSKRQPILDAIEAKKRRQQNF

SEQ ID NO: 163478 - DNA, 1464 bp, Artificial Sequence
  derived and/or modified sequence
atggaaaccgtgcagctgcgaaatcctccccggcggcaactgaagaaactcgatgaagattcacttaccaaacagccagaggaggtgttcgatgtgctcgagaagcttggggaagggtcctatggaagtgtatacaaggctatccataaagagacaggccagattgtagctatcaaacaagtgcctgtcgagagcgacttgcaggaaattatcaaggaaattagcatcatgcagcagtgtgactcaccgcatgtggtaaagtattatgggtcttacttcaaaaacactgatctgtggatcgtgatggagtattgtggcgccggctccgttagcgatattatccgcctgagaaataaaaccctcaccgaggatgaaattgctacgatcctccagagcacgctgaaggggctggagtatctgcacttcatgcgcaagatccatagagacatcaaggcaggaaatatcttactaaatacagagggccacgctaagttagcggactttggggtcgccggacaacttaccgacacaatggccaaacggaatacagtaattggtacccctttttggatggcacccgaagtgatccaggagatcggctataattgtgtcgcggatatttggtctctggggatcaccgccatagagatggctgaggggaagccaccctatgctgacatccaccctatgcgggcgatttttatgatccccaccaacccaccaccaacattccgaaaacccgaactgtggtctgataattttacagacttcgtgaagcagtgtttagtcaaatcccccgaacaaagagcgactgcaacacagctgctgcagcacccatttgtacgcagcgctaagggcgtgtccatcctaagggatttgattaacgaagcaatggacgttaaactgaaacggcaggagtctcagcagcgtgaggtagaccaagacgacgaagaaaattcagaggaggatgaaatggactccggaaccatggtgcgcgccgtaggtgatgagatgggcactgttagggtcgcctcaacgatgaccgatggcgccaataccatgatcgagcatgatgacaccctgccatcgcaacttggaaccatggtgattaatgccgaagatgaagaagaggaaggaactatgaagagacgcgacgagactatgcagcctgctaagccatcctttcttgagtattttgaacaaaaggagaaagaaaaccagattaattcctttggcaagtccgtccccggtcctctcaagaatagttccgactggaagatccctcaagatggggattatgagttcttgaagtcttggacagtggaagatctccagaagagactgctcgcattggatcccatgatggagcaggagatagaggaaatacggcaaaagtatcagagcaaacggcagccgatcctcgatgctattgaagccaaaaagaggcggcagcaaaatttttag

SEQ ID NO: 163479 - DNA, 1299 bp, Artificial Sequence
  derived and/or modified sequence
atggagaccgtgcagttgcgtaatccaccccggcgccagcttaagaagctcgatgaggactcactgacaaaacagccagaagaggttttcgatgtgctggagaaattaggtgagggatcctatggctcagtgtacaaggccatccacaaagagacaggccagattgttgccatcaagcaggtgccagttgagtccgacctgcaggagatcattaaggagatctctatcatgcaacaatgcgattcccctcacgtggtgaagtattacgggtcctacttcaagaatactgatctgtggatcgtgatggagtattgcggcgctggcagcgtaagcgacatcatccgtttacgcaacaaaactgacacgatggctaagaggaacactgtgattgggactcccttctggatggcacccgaggtgatccaggagatcggctataactgcgtggctgatatctggtccctggggataactgcaattgaaatggcagagggtaagcccccttacgccgacattcacccaatgcgggctatcttcatgattcctaccaacccccctccaactttcaggaagcctgagttgtggagtgacaacttcacggatttcgtgaagcagtgcctcgttaaatcccctgaacagcgagcgactgccactcagttgctacaacatccatttgtcagatctgctaagggagtgagtattctgagagatctcatcaacgaggccatggatgtgaaactgaaaaggcaggaatcacagcagcgcgaggtggatcaggatgacgaggaaaacagtgaggaggatgaaatggattcaggcacaatggttcgtgcagtgggtgacgagatgggtacagtcagggtggcctccacaatgactgacggagctaacacgatgatcgagcacgacgacacactccctagtcagcttggcaccatggtgatcaatgccgaggacgaggaggaggaggggaccatgaagagaagagatgagacgatgcagcccgccaagccgtcatttttggagtactttgagcagaaagaaaaagagaatcagatcaacagctttggtaaatccgtccccggccctctgaagaactcctccgactggaaaataccgcaagacggagactacgaatttctcaagagttggaccgtggaggatttgcagaagcgcctgttggccctggatccaatgatggagcaggaaatcgaggaaattagacagaaatatcagtcgaagagacagcccatactggacgcaatcgaagctaaaaaacgcaggcaacagaatttctag

SEQ ID NO: 163480 - DNA, 1464 bp, Artificial Sequence
  derived and/or modified sequence
atggagaccgtgcagctgagaaatccaccccggcggcagctgaagaagctggatgaggacagcctgaccaagcagcctgaggaggtgtttgatgtgctggagaagctgggggagggcagctatggctctgtgtacaaggccatccacaaggagaccggccagatcgtggccatcaagcaggtgcctgtggagagtgacctgcaggagatcatcaaggagatcagcatcatgcagcagtgtgacagcccccacgtggtgaagtactacggcagctacttcaagaacacagacctgtggatcgtgatggagtactgtggggccggctctgtgtctgacatcatccggctgaggaacaagaccctgacagaagatgagatcgccaccatcctgcagagcaccctgaagggcctggagtacctgcacttcatgaggaagatccaccgggacatcaaggccggcaacatcctgctgaacacagagggccacgccaagctggccgactttggagtggccggccagctgacagacaccatggccaagaggaacacagtgattggcacccccttctggatggcccctgaggtgatccaggagatcggctacaactgtgtggccgacatctggagcctgggcatcacagccatcgagatggccgagggcaagccaccctatgctgacatccaccccatgagggccatcttcatgatccccaccaaccccccacccaccttcaggaagccagagctgtggagcgacaacttcacagactttgtgaagcagtgcctggtgaagagccctgagcagagggccacagccacccagctgctgcagcacccctttgtgcgcagcgccaagggcgtgtccatcctgcgggacctgatcaatgaggccatggatgtgaagctgaagaggcaggagagccagcagcgggaggtggaccaggatgatgaggagaacagcgaggaggatgagatggattctggcaccatggtgcgggctgtgggagatgagatgggcaccgtgcgggtggccagcaccatgacagatggagccaacaccatgattgaacatgatgacaccctgcccagccagctgggcaccatggtgatcaatgcagaagatgaggaggaggagggcaccatgaagagaagagatgagaccatgcagcctgccaagcccagcttcctggagtactttgagcagaaggagaaggagaaccagatcaacagctttgggaagtctgtgcccggccccctgaagaacagcagtgactggaagatcccccaggatggagactatgagttcctgaagtcctggacagtggaggacctgcagaagaggctgctggccctggaccccatgatggagcaggagattgaggagatccggcagaagtaccagagcaagaggcagcccatcctggatgccatcgaggccaagaagaggcggcagcagaacttctag

SEQ ID NO: 163481 - DNA, 1299 bp, Artificial Sequence
  derived and/or modified sequence
atggagaccgtgcagctgagaaatccaccccggcggcagctgaagaagctggatgaggacagcctgaccaagcagcctgaggaggtgtttgatgtgctggagaagctgggggagggcagctatggctctgtgtacaaggccatccacaaggagaccggccagatcgtggccatcaagcaggtgcctgtggagagtgacctgcaggagatcatcaaggagatcagcatcatgcagcagtgtgacagcccccacgtggtgaagtactacggcagctacttcaagaacacagacctgtggatcgtgatggagtactgtggggccggctctgtgtctgacatcatccggctgaggaacaagacagacaccatggccaagaggaacacagtcatcggcacccccttctggatggcccctgaggtgatccaggagatcggctacaactgtgtggccgacatctggagcctgggcatcacagccatcgagatggccgagggcaagccaccctatgctgacatccaccccatgagggccatcttcatgatccccaccaaccccccacccaccttcaggaagccagagctgtggagcgacaacttcacagactttgtgaagcagtgcctggtgaagagccctgagcagagggccacagccacccagctgctgcagcacccctttgtgcgcagcgccaagggcgtgtccatcctgcgggacctgatcaatgaggccatggatgtgaagctgaagaggcaggagagccagcagcgggaggtggaccaggatgatgaagaaaattctgaagaagatgagatggacagcggcaccatggtgcgggctgtgggagatgagatgggcaccgtgcgggtggccagcaccatgacagatggagccaacaccatgattgaacatgatgacaccctgcccagccagctgggcaccatggtgatcaatgcagaagatgaggaggaggagggcaccatgaagagaagagatgagaccatgcagcctgccaagcccagcttcctggagtactttgagcagaaggagaaggagaaccagatcaacagctttgggaagtctgtgcccggccccctgaagaacagcagtgactggaagatcccccaggatggagactatgagttcctgaagtcctggacagtggaggacctgcagaagaggctgctggccctggaccccatgatggagcaggagattgaggagatccggcagaagtaccagagcaagaggcagcccatcctggatgccatcgaggccaagaagaggcggcagcagaacttctag

SEQ ID NO: 163482 - DNA, 1464 bp, Artificial Sequence
  derived and/or modified sequence
atggagaccgtgcagctgcggaaccccccccggcggcagctgaagaagctcgatgaagattcattgacaaaacagcccgaagaggtattcgacgtgctggagaagcttggcgagggatcttatggatccgtgtataaggccattcacaaagagactggccagatcgtggccattaaacaggtaccagtggagtcagatcttcaggaaatcattaaagaaatttccatcatgcagcaatgcgatagccctcatgtcgtcaaatattatggctcttatttcaaaaatacagatctctggatcgtcatggaatactgcggggccgggtccgtgtccgacattataagattaagaaataaaacattgactgaggacgagatcgccactatactgcagtctacccttaagggcctagagtacctgcacttcatgaggaaaattcaccgagacatcaaggccggcaacatcttactgaatacagaagggcatgctaaactggccgacttcggcgtggctggtcagctaaccgataccatggccaaaagaaacacagtaatagggacaccattctggatggctccagaggtgattcaggagattggatacaactgcgtcgctgatatttggtccctgggcattacagccatcgaaatggctgagggaaagcccccttatgctgacatccatcctatgcgcgcgatatttatgatccctactaacccccctcccacgtttagaaaacctgagctgtggtccgataattttacagacttcgtcaagcaatgcctcgtgaagagtccagagcagagggcaaccgctacgcaacttctgcagcacccctttgttcggtccgctaaaggggtaagtatcttaagggacctgatcaacgaagctatggacgtaaagcttaagcggcaggagtcacagcagagggaagtggaccaggacgatgaggagaattctgaagaagatgagatggactccggaaccatggttcgggcggtgggagatgaaatggggaccgtacgcgtggcaagcacaatgacagatggcgccaacactatgatcgagcatgatgacaccttaccgagccagctgggtaccatggttattaatgccgaagatgaagaggaagagggaaccatgaagaggagagatgaaacaatgcagccggctaaacctagctttctggaatacttcgaacaaaaggagaaagagaaccagatcaatagtttcggaaagtccgtccccggcccactcaaaaactcaagcgattggaagatcccccaagacggcgattacgaatttcttaaaagctggactgtcgaagatctgcagaaacgtctccttgccctggaccccatgatggagcaagaaatagaagaaatccggcagaaatatcagagtaagaggcagccaatcctcgatgcgatcgaagcaaagaaacgcagacagcagaacttctag

SEQ ID NO: 163483 - DNA, 1299 bp, Artificial Sequence
  derived and/or modified sequence
atggagaccgtgcagctgcggaaccccccccggcggcagctgaagaaactagacgaagatagcttaaccaaacagccagaggaagttttcgacgtcctggagaaactcggagagggatcctacggcagtgtgtataaagcaattcacaaggaaacaggccagatagttgccattaagcaggtccccgtagagtctgacctgcaggagatcatcaaggaaattagcatcatgcaacagtgcgacagtccccacgtggtgaagtattatggctcatatttcaaaaacactgacctgtggattgtgatggagtattgtggtgccggaagtgtgagtgatattatccgtctacggaacaagacggataccatggcgaaacgtaacacagtgatcgggactcctttttggatggcccctgaggtaatccaggagatcggatacaattgcgtggcagatatctggagcctggggatcacggctatcgaaatggccgagggcaagcccccttacgccgatatccatcctatgagggccatcttcatgattccaaccaatccacctcctacattcagaaagcccgagctttggagcgataactttacagacttcgtgaagcagtgcctcgtgaagagcccagaacagcgagccaccgctacgcagcttcttcagcacccttttgtccggtcagctaaaggggtgagtatcctccgggacctcatcaatgaggccatggacgtaaaattgaagcgacaggagtcgcagcagagagaagtcgaccaggatgacgaggaaaactcagaggaggatgagatggacagtggaacgatggttagagccgtaggcgatgagatgggcaccgtgcgcgtggcgtctacgatgaccgatggagctaatactatgatagagcacgatgataccttaccctcccaactgggcacaatggttattaacgccgaagatgaggaagaggaagggaccatgaagcgtcgcgacgagaccatgcagcctgctaagccgtctttcttggaatacttcgagcagaaggagaaggagaaccagatcaattcatttggcaagagcgtgccaggccctctcaaaaactcttctgactggaaaatccctcaggatggggattacgaatttctgaaaagctggactgtggaggacctgcagaagcgcctcctggctctggatccgatgatggagcaggaaatagaggaaatcaggcagaagtaccagtctaagagacagcccatcttggacgctattgaagctaaaaagagacgtcaacagaatttttag

SEQ ID NO: 163484 - DNA, 1464 bp, Artificial Sequence
  derived and/or modified sequence
atggaaacggtgcagttgcgaaatcctcctagacgccagctgaagaaactggatgaggatagcctaaccaagcaacccgaggaagtattcgatgttctggagaaactgggcgaaggtagttatgggtccgtctacaaagccatccataaagagacggggcagatagttgcaattaaacaggtgcccgtggagtccgatctgcaagagataatcaaggagatttccattatgcagcagtgtgatagtccgcatgtcgtcaagtactatgggtcatattttaaaaatactgatctgtggatcgtgatggagtactgcggggctgggagcgtctcagatattatcagattgaggaataaaacgctaactgaagacgagattgcaactattcttcaatcaactctgaagggattagagtaccttcactttatgcgaaagattcaccgtgatataaaggctggcaatattctgctcaatacagaagggcatgctaaactggcagactttggcgtggccggtcagttgaccgataccatggccaagcgaaacacagtcatcggcactcctttctggatggctccagaagttatccaggagattggctataattgcgtggctgatatatggtctttaggcatcaccgctattgaaatggcggagggaaaacccccttacgcagatatacatcccatgagagccatctttatgattccgacaaatcccccaccaaccttcaggaaaccggagctctggtctgacaatttcaccgattttgtgaagcaatgcctcgttaagagccctgaacagagagccaccgctactcagcttctccagcacccttttgttcggagtgcaaagggcgtaagcattctgcgggatctgatcaatgaagctatggacgtaaagctgaagcgtcaggagagccagcaacgggaagtggatcaagatgatgaagaaaactcagaggaggacgagatggacagtgggactatggtccgagccgtgggtgacgagatggggactgtcagagtcgcctccacaatgactgacggagccaatacaatgatagagcatgacgataccctgcctagccaactgggaacgatggttatcaatgcagaggatgaggaggaggagggtaccatgaagcgacgtgacgagacaatgcagcccgcaaagcccagtttcctcgaatactttgagcagaaggagaaggagaaccaaattaactcctttggcaaatccgttcccggtcctctcaagaactcgagtgattggaaaatccctcaggacggcgactatgaatttctgaaatcctggacagtcgaagacctgcagaagcgattgctggccctcgaccccatgatggagcaggagattgaagaaatcaggcagaagtaccagagcaaacggcaaccaattctcgatgctattgaggctaagaaacgaagacagcagaacttctag

SEQ ID NO: 163485 - DNA, 1299 bp, Artificial Sequence
  derived and/or modified sequence
atggaaaccgtgcagttgcgcaatccaccaaggcggcagttaaaaaagctggacgaggattccctaaccaagcagcccgaagaagtgttcgatgtcttggaaaagttgggcgagggctcatacggttccgtatacaaggccatccataaggaaaccggccagatcgttgcgatcaagcaagtcccagtggaatctgacctgcaagaaattatcaaagaaatcagtatcatgcagcagtgtgattcccctcacgtggtgaagtactatggctcctacttcaagaacacagacctatggatcgtcatggagtattgcggtgccggaagcgtcagcgacattattcgcctccgaaataaaaccgatacaatggcgaaacgaaacactgttatcggcacccctttctggatggcacccgaggtgattcaggagatcggatataactgtgtggcagatatctggagcttaggaatcactgcaattgaaatggcagagggcaaacccccttacgctgacatccatcccatgcgggctatcttcatgatcccaactaatcctcctcctacattccggaagcccgagctgtggtcagacaactttaccgattttgtgaaacagtgtctagttaaatcacctgaacagagagccacagctactcagctgctgcagcacccattcgttcgcagcgcaaagggcgtatccattctgcgggacctaataaatgaggccatggatgtgaagctcaagcggcaggagagccagcagcgcgaggttgatcaagacgacgaagagaattctgaggaagatgaaatggattcaggcaccatggtgagagctgtgggagacgaaatgggtacagtcagggttgccagcacgatgacggacggagctaatacaatgatcgaacatgacgatacgctgccttcacagttaggaaccatggtcatcaacgcggaagacgaggaggaggaagggacgatgaaacgcagggacgaaacgatgcagcccgctaaaccttcattcctggagtattttgaacagaaggagaaagaaaaccagatcaactctttcggaaagagcgttccgggacccctgaaaaactccagcgactggaaaattccccaagatggcgattatgaatttctaaagtcctggaccgtcgaagatctccagaagcgtctactcgccttggaccccatgatggagcaggaaatcgaagagatccgccagaagtaccagagtaagagacagcctatcctcgacgcaatcgaggccaaaaagcggaggcagcagaacttttag

SEQ ID NO: 163486 - DNA, 6342 bp, Artificial Sequence
  derived and/or modified sequence
ggaaagcggaagtgtgggagggtctgcggggcgggctcaggaggtccgcgggaggatggagcagtgagcgggtctgggcggctgctggcagcgccatggagacggtacagctgaggaacccgccgcgccggcagctgaaaaagttggatgaagatagtttaaccaaacaaccagaagaagtatttgatgtcttagagaaacttggagaagggtcctatggcagcgtatacaaagctattcataaagagaccggccagattgttgctattaagcaagttcctgtggaatcagacctccaggagataatcaaagaaatctctataatgcagcaatgtgacagccctcatgtagtcaaatattatggcagttattttaagaacacagacttatggatcgttatggagtactgtggggctggttctgtatctgatatcattcgattacgaaataaaacgttaacagaagatgaaatagctacaatattacaatcaactcttaagggacttgaataccttcattttatgagaaaaatacaccgagatatcaaggcaggaaatattttgctaaatacagaaggacatgcaaaacttgcagattttggggtagcaggtcaacttacagataccatggccaagcggaatacagtgataggaacaccattttggatggctccagaagtgattcaggaaattggatacaactgtgtagcagacatctggtccctgggaataactgccatagaaatggctgaaggaaagcccccttatgctgatatccatccaatgagggcaatcttcatgattcctacaaatcctcctcccacattccgaaaaccagagctatggtcagataactttacagattttgtgaaacagtgtcttgtaaagagccctgagcagagggccacagccactcagctcctgcagcacccatttgtcaggagtgccaaaggagtgtcaatactgcgagacttaattaatgaagccatggatgtgaaactgaaacgccaggaatcccagcagcgggaagtggaccaggacgatgaagaaaactcagaagaggatgaaatggattctggcacgatggttcgagcagtgggtgatgagatgggcactgtccgagtagccagcaccatgactgatggagccaatactatgattgagcacgatgacacgttgccatcacaactgggcaccatggtgatcaatgcagaggatgaggaagaggaaggaactatgaaaagaagggatgagaccatgcagcctgcgaaaccatcctttcttgaatattttgaacaaaaagaaaaggaaaaccagatcaacagctttggcaagagtgtacctggtccactgaaaaattcttcagattggaaaataccacaggatggagactacgagtttcttaagagttggacagtggaggaccttcagaagaggctcttggccctggaccccatgatggagcaggagattgaagagatccggcagaagtaccagtccaagcggcagcccatcctggatgccatagaggctaagaagagacggcaacaaaacttctgagcaaggccaggctgtgagggccccagctccacccaggctttgggtgaattctggatggcttgcctcatgtttgttagccagcacttctgctctgtcgtctctccacagcacctttgtgaactcaggaatgtgcgccagtgggaagggctctcttgacagtcagcgtgccatcttgatgtgtgtatgtacattggtcaggtatattatctcaaaggatttatattggcgcttttaactcagagttttaaaccccaggaacagagactcctagttgagtgatagctgggaaagttttacattgtctgtttttcttctcccaatagctttcaattgttctttctggaagacttttaaaaaaatataaatatgcatatatatatataaattataaatagattccccacgcagtgtggtggcatctctgtacaggtacagttttaaacggtttgcctcttttctgtaagattatggtactgtggaacatgagggcagaggacaccgggaggctgttagggggtcactgaatcccaggagccaacctccccctttgcagggctgcatttaaaaattaggtttgggacagttcttgtaccgtggtttcagccttgtgtggtcatcactggcttctggagctattggtgatgtccaagggaaagctttgagagtttatgtttactctttgagtcccaggagaagcctggcaccctctttgcaaattggcctttgctctttcaatgcctttcatccatctccactctctcaactgcctaaagtcacagcacagatactgcccagtgccttaagaggagacatgatctctaccagggactctcagcaaacacgggactgtgttcagtccacaaaggaaaagcgtttttgaagctctcattgttcatgtaaaaatcatacacgtggcatgttgctccacattccttacacacaggggtagaggggattgcttttgtgacccacgttcaaatatgtgactgttttcttttctcttttactgctaagcagcctggaaaggataaatgaatattagactaagatttgttttccaggaggctcaatctgaacacacagaatgtcagagctggaagggactatagagatcatctgatctgatcctcttgtacggatgatcgcaaaactgaggtgtagagaggggaatggccaaaatcacaaagcaagttagcgttaagagctgagactagaattcagggtcctcactcccaggccaccgaaccatgcagccccttctttgggggaagagacctgtgtcagtcttggttaattgttccagggaaccttgctaacagaaacttgctcttgccttggctcttcagtagatgacctggctgtaaagagattccctggacgagccagatcattcagtttcagcgagtccttgagctccacaacatctaccagatatagcagacaagcacccatggaggcaggtttcgggcctgaagcagatcagagggctttgcaaaagacagcatagagccatcttcctgcaactttacctctttccctcagatggggagccatgactgggttgcacctcaggatactgtaatttgactccataattgcttttgctcctgaaacctgggaatcaatggaaaggcagggaatgtgcctcttctgtggccagattctgttatttgcaattaaagcaagtttttaaaaaatgcaagaggcagttgttagtcttcagggcttggcaactgaaatagctatgtggcggatacggaaaacagaggacaatttgaggatcttgctggaataataaatgacagctaccatttgttgagcacctattatatatcaggcactgagctgggtaggctctaaacttcacaataaccctgtgacttaactactttatctccattttgtagttgaagaaataagttcagagagaaagattccttcccaaggtcatgcagctagtaaatgatagaatcaggattcatagcatcactatagggggtcaatatttacacaaaaaaggaaagtcacaagcctgtttaaaatgaagtgaccaccttttcttgcatagactaaataactcgaactggcatttttaggttggaaagacagctgaattagtagttaagtctgatagccaagtaagttttaaaaaccaaagcatccaggatgcacacccctgcaccatttgctgtgcgaattaatagttctgtctctctctctctttcttttttctttttattctttgagatggattttcgctcttgtcgcccaggctggagtacaatggcacgatcttggctcactgcaacctccgcctcccgggttcaagcgattcttctgctgggattacagcatatgccaccatgcccagattatttttttgtatttgtagtagagacggggtttcaccatgtcagtcaggctggtcttgaactcctgacctcaggtgatccacccgcctcagcctcccacactgctgggattacaggcatgagccaccgctcctggcctctctttcttttttaaacaaagaactttgcacttggccagagaggaggagaaagcccattttctcccttcctaagctagatccaaataaaagaaagttcagttttcccccataactattcttgggtcatgaactttgatctggagtttgttttgtttcaggaatgtgtgcacccagcttgctgatccaacaaagtctattgcttaccagtctagcttgatgaagccttttggccagaagtcaatttgttttggatcagagaaatttcctgacaaggtatatttgttttctagtgacagaaaggcaaaggaacaagtcctagttgttgttgttgttgttgaatactaaatttaagatatgtcagcttgctttcaatgagccttgggcttctgttattgcttgagcatttggaactcgagcttccagagaaatttgaggtcctcgcttgttctctgccttcaagaaacaatgacctgattctgtctttaaaaaaaaaaatctcagaattctttttttgtttgtgtttttttttttttttgagacagagtctcactctgttgcccaggctggagtgcagtggcgccatctcggctcactgcaacctccgcctcccaggttcaagcaattctcctgcctcagcctcccaggtagctgccactacaggtgctgcaccaccacgcccggctaatttttgtatttttagtagagacagggtttcaccatattagccaggtgggtcttgaactcctgaccttgtgatccacccgcctcggcctcccaaagtgctgggattacaggcgtgagccaccttgcctggccaaaaatctcagaattctttaagactgttttaattgctccatcagtaattttgaagcactttcctttttttttttttttcccctttttgtccctttccccaagccaccaattggatggatgaatgtttgacggggaagaggaagggtaggaggatgcatggatgagtggatgagtggatcgatggatgtattgataaatagatagaaccagtcatctgaagcaacttaagaattgtagccttgactccttgagactgtagatttcgatccaggaaacatttatttagcacctgccagatgccagaaatttataccatttaaaactcagtaagtcttttaaatatcaggaaggagagaagcgacatcatgatacatcctatgggtattaaaaagccaatagaatattatgaataattttatgctaataaatttaacaacttcaacatcataaacaaattccttgaaaaataaaaagtaccaaaattcattcaagaagaaatagataccagcctgagcaacatggcaaaatcccatctctacaaaacatcaaaaaaaaaaaaaattagtcgggcatggtggtgcacacctgtaatcccagcttgtcaggaggctgaagtgggaggatcacctgagcccagggaggtcaaggatgcagtgagccatggtctcaccactgcactctagcctgggtgacagaatgagaccccgtctcaaaaaaaaagaagaagtagataatctgaatagccctatatctatagaaacttaatagtgctgggagatataggtattattatcctcattttacagatgtgaaaattgaggctcagagaagtaaagtctattgctcaaggtcatgtggctagaatatggcagagccatgattcagatccaggtcttctgattcttattccagtgtcctttctagcataccatgttgcctctaaagattgcagctccttatttactagaaaattgttcctgcccaatctacatctccacctcaccccatcttttcttaagcactatgtttgtgtttttatcagtattatattcattgtctttggaatacatgttcttgtttgtgtttggaaaaaaaatctcttttaccagcttgcactcggaccaacttggaaaaaaaaaagcttaaatgtttttgctatgtacagtttaaaaatgtgaagtttgtagctttaactttttgtaagaaaatctaataacactggcttaagtgctgacttgaaatgctattttgtaaggtttggatgtaagtaatcaattgaggtcagcagtttgtatgagacatagcttcctccattgcccccactccttttttcttttttaagtttgagatgcttcctgtgtttttatgttagaattgttgttctccttcttttcttcttcctatacctcatcacgtttgttttaaataaactgtcctttggaccacaaaccctta

SEQ ID NO: 163487 - DNA, 5217 bp, Artificial Sequence
  derived and/or modified sequence
aggatggagcagtgagcgggtctgggcggctgctggcagcgccatggagacggtacagctgaggaacccgccgcgccggcagctgaaaaagttggatgaagatagtttaaccaaacaaccagaagaagtatttgatgtcttagagaaacttggagaagggtcctatggcagcgtatacaaagctattcataaagagaccggccagattgttgctattaagcaagttcctgtggaatcagacctccaggagataatcaaagaaatctctataatgcagcaatgtgacagccctcatgtagtcaaatattatggcagttattttaagaacacagacttatggatcgttatggagtactgtggggctggttctgtatctgatatcattcgattacgaaataaaacggataccatggccaagcggaatacagtgataggaacaccattttggatggctccagaagtgattcaggaaattggatacaactgtgtagcagacatctggtccctgggaataactgccatagaaatggctgaaggaaagcccccttatgctgatatccatccaatgagggcaatcttcatgattcctacaaatcctcctcccacattccgaaaaccagagctatggtcagataactttacagattttgtgaaacagtgtcttgtaaagagccctgagcagagggccacagccactcagctcctgcagcacccatttgtcaggagtgccaaaggagtgtcaatactgcgagacttaattaatgaagccatggatgtgaaactgaaacgccaggaatcccagcagcgggaagtggaccaggacgatgaagaaaactcagaagaggatgaaatggattctggcacgatggttcgagcagtgggtgatgagatgggcactgtccgagtagccagcaccatgactgatggagccaatactatgattgagcacgatgacacgttgccatcacaactgggcaccatggtgatcaatgcagaggatgaggaagaggaaggaactatgaaaagaagggatgagaccatgcagcctgcgaaaccatcctttcttgaatattttgaacaaaaagaaaaggaaaaccagatcaacagctttggcaagagtgtacctggtccactgaaaaattcttcagattggaaaataccacaggatggagactacgagtttcttaagagttggacagtggaggaccttcagaagaggctcttggccctggaccccatgatggagcaggagattgaagagatccggcagaagtaccagtccaagcggcagcccatcctggatgccatagaggctaagaagagacggcaacaaaacttctgagcaaggccaggctgtgagggccccagctccacccaggctttgggtgaattctggatggcttgcctcatgtttgttagccagcacttctgctctgtcgtctctccacagcacctttgtgaactcaggaatgtgcgccagtgggaagggctctcttgacagtcagcgtgccatcttgatgtgtgtatgtacattggtcaggtatattatctcaaaggatttatattggcgcttttaactcagagttttaaaccccaggaacagagactcctagttgagtgatagctgggaaagttttacattgtctgtttttcttctcccaatagctttcaattgttctttctggaagacttttaaaaaaatataaatatgcatatatatatataaattataaatagattccccacgcagtgtggtggcatctctgtacaggtacagttttaaacggtttgcctcttttctgtaagattatggtactgtggaacatgagggcagaggacaccgggaggctgttagggggtcactgaatcccaggagccaacctccccctttgcagggctgcatttaaaaattaggtttgggacagttcttgtaccgtggtttcagccttgtgtggtcatcactggcttctggagctattggtgatgtccaagggaaagctttgagagtttatgtttactctttgagtcccaggagaagcctggcaccctctttgcaaattggcctttgctctttcaatgcctttcatccatctccactctctcaactgcctaaagtcacagcacagatactgcccagtgccttaagaggagacatgatctctaccagggactctcagcaaacacgggactgtgttcagtccacaaaggaaaagcgtttttgaagctctcattgttcatgtaaaaatcatacacgtggcatgttgctccacattccttacacacaggggtagaggggattgcttttgtgacccacgttcaaatatgtgactgttttcttttctcttttactgctaagcagcctggaaaggataaatgaatattagactaagatttgttttccaggaggctcaatctgaacacacagaatgtcagagctggaagggactatagagatcatctgatctgatcctcttgtacggatgatcgcaaaactgaggtgtagagaggggaatggccaaaatcacaaagcaagttagcgttaagagctgagactagaattcagggtcctcactcccaggccaccgaaccatgcagccccttctttgggggaagagacctgtgtcagtcttggttaattgttccagggaaccttgctaacagaaacttgctcttgccttggctcttcagtagatgacctggctgtaaagagattccctggacgagccagatcattcagtttcagcgagtccttgagctccacaacatctaccagatatagcagacaagcacccatggaggcaggtttcgggcctgaagcagatcagagggctttgcaaaagacagcatagagccatcttcctgcaactttacctctttccctcagatggggagccatgactgggttgcacctcaggatactgtaatttgactccataattgcttttgctcctgaaacctgggaatcaatggaaaggcagggaatgtgcctcttctgtggccagattctgttatttgcaattaaagcaagtttttaaaaaatgcaagaggcagttgttagtcttcagggcttggcaactgaaatagctatgtggcggatacggaaaacagaggacaatttgaggatcttgctggaataataaatgacagctaccatttgttgagcacctattatatatcaggcactgagctgggtaggctctaaacttcacaataaccctgtgacttaactactttatctccattttgtagttgaagaaataagttcagagagaaagattccttcccaaggtcatgcagctagtaaatgatagaatcaggattcatagcatcactatagggggtcaatatttacacaaaaaaggaaagtcacaagcctgtttaaaatgaagtgaccaccttttcttgcatagactaaataactcgaactggcatttttaggttggaaagacagctgaattagtagttaagtctgatagccaagtaagttttaaaaaccaaagcatccaggatgcacacccctgcaccatttgctgtgcgaattaatagttctgtctctctctctctttcttttttctttttattctttgagatggattttcgctcttgtcgcccaggctggagtacaatggcacgatcttggctcactgcaacctccgcctcccgggttcaagcgattcttctgctgggattacagcatatgccaccatgcccagattatttttttgtatttgtagtagagacggggtttcaccatgtcagtcaggctggtcttgaactcctgacctcaggtgatccacccgcctcagcctcccacactgctgggattacaggcatgagccaccgctcctggcctctctttcttttttaaacaaagaactttgcacttggccagagaggaggagaaagcccattttctcccttcctaagctagatccaaataaaagaaagttcagttttcccccataactattcttgggtcatgaactttgatctggagtttgttttgtttcaggaatgtgtgcacccagcttgctgatccaacaaagtctattgcttaccagtctagcttgatgaagccttttggccagaagtcaatttgttttggatcagagaaatttcctgacaaggtatatttgttttctagtgacagaaaggcaaaggaacaagtcctagttgttgttgttgttgttgaatactaaatttaagatatgtcagcttgctttcaatgagccttgggcttctgttattgcttgagcatttggaactcgagcttccagagaaatttgaggtcctcgcttgttctctgccttcaagaaacaatgacctgattctgtctttaaaaaaaaaaatctcagaattctttttttgtttgtgtttttttttttttttgagacagagtctcactctgttgcccaggctggagtgcagtggcgccatctcggctcactgcaacctccgcctcccaggttcaagcaattctcctgcctcagcctcccaggtagctgccactacaggtgctgcaccaccacgcccggctaatttttgtatttttagtagagacagggtttcaccatattagccaggtgggtcttgaactcctgaccttgtgatccacccgcctcggcctcccaaagtgctgggattacaggcgtgagccaccttgcctggccaaaaatctcagaattctttaagactgttttaattgctccatcagtaattttgaagcactttcctttttttttttttttcccctttttgtccctttccccaagccaccaattggatggatgaatgtttgacggggaagaggaagggtaggaggatgcatggatgagtggatgagtggatcgatggatgtattgataaatagatagaaccagtcatctgaagcaacttaagaattgtagccttgactccttgagactgtagatttcgatccaggaaacatttatttagcacctgccagatgccagaaatttataccatttaaaactcagtaagtcttttaaatatcaggaaggagagaagcgacatcatgatacatcctatgggtattaaaaagccaatagaatattatgaataattttatgctaataaatttaacaacttcaacatcataaacaaattccttgaaaaataaaaagtaccaaaattcattcaagaagaaatagataccagcctgagcaacatggcaaaatcccatctctacaaaacatc

SEQ ID NO: 163488 - DNA, 1464 bp, Artificial Sequence
  derived and/or modified sequence
atggagaccgtgcagctgagaaacccccccagaagacagctgaagaagctggacgaggacagcctgaccaagcagcccgaggaggtgttcgacgtgctggagaagctgggcgagggcagctacggcagcgtgtacaaggccatccacaaggagaccggccagatcgtggccatcaagcaggtgcccgtggagagcgacctgcaggagatcatcaaggagatcagcatcatgcagcagtgcgacagcccccacgtggtgaagtactacggcagctacttcaagaacaccgacctgtggatcgtgatggagtactgcggcgccggcagcgtgagcgacatcatcagactgagaaacaagaccctgaccgaggacgagatcgccaccatcctgcagagcaccctgaagggcctggagtacctgcacttcatgagaaagatccacagagacatcaaggccggcaacatcctgctgaacaccgagggccacgccaagctggccgacttcggcgtggccggccagctgaccgacaccatggccaagagaaacaccgtgatcggcacccccttctggatggcccccgaggtgatccaggagatcggctacaactgcgtggccgacatctggagcctgggcatcaccgccatcgagatggccgagggcaagcccccctacgccgacatccaccccatgagagccatcttcatgatccccaccaaccccccccccaccttcagaaagcccgagctgtggagcgacaacttcaccgacttcgtgaagcagtgcctggtgaagagccccgagcagagagccaccgccacccagctgctgcagcaccccttcgtgagaagcgccaagggcgtgagcatcctgagagacctgatcaacgaggccatggacgtgaagctgaagagacaggagagccagcagagagaggtggaccaggacgacgaggagaacagcgaggaggacgagatggacagcggcaccatggtgagagccgtgggcgacgagatgggcaccgtgagagtggccagcaccatgaccgacggcgccaacaccatgatcgagcacgacgacaccctgcccagccagctgggcaccatggtgatcaacgccgaggacgaggaggaggagggcaccatgaagagaagagacgagaccatgcagcccgccaagcccagcttcctggagtacttcgagcagaaggagaaggagaaccagatcaacagcttcggcaagagcgtgcccggccccctgaagaacagcagcgactggaagatcccccaggacggcgactacgagttcctgaagagctggaccgtggaggacctgcagaagagactgctggccctggaccccatgatggagcaggagatcgaggagatcagacagaagtaccagagcaagagacagcccatcctggacgccatcgaggccaagaagagaagacagcagaacttctag

SEQ ID NO: 163489 - DNA, 1299 bp, Artificial Sequence
  derived and/or modified sequence
atggagaccgtgcagctgagaaacccccccagaagacagctgaagaagctggacgaggacagcctgaccaagcagcccgaggaggtgttcgacgtgctggagaagctgggcgagggcagctacggcagcgtgtacaaggccatccacaaggagaccggccagatcgtggccatcaagcaggtgcccgtggagagcgacctgcaggagatcatcaaggagatcagcatcatgcagcagtgcgacagcccccacgtggtgaagtactacggcagctacttcaagaacaccgacctgtggatcgtgatggagtactgcggcgccggcagcgtgagcgacatcatcagactgagaaacaagaccgacaccatggccaagagaaacaccgtgatcggcacccccttctggatggcccccgaggtgatccaggagatcggctacaactgcgtggccgacatctggagcctgggcatcaccgccatcgagatggccgagggcaagcccccctacgccgacatccaccccatgagagccatcttcatgatccccaccaaccccccccccaccttcagaaagcccgagctgtggagcgacaacttcaccgacttcgtgaagcagtgcctggtgaagagccccgagcagagagccaccgccacccagctgctgcagcaccccttcgtgagaagcgccaagggcgtgagcatcctgagagacctgatcaacgaggccatggacgtgaagctgaagagacaggagagccagcagagagaggtggaccaggacgacgaggagaacagcgaggaggacgagatggacagcggcaccatggtgagagccgtgggcgacgagatgggcaccgtgagagtggccagcaccatgaccgacggcgccaacaccatgatcgagcacgacgacaccctgcccagccagctgggcaccatggtgatcaacgccgaggacgaggaggaggagggcaccatgaagagaagagacgagaccatgcagcccgccaagcccagcttcctggagtacttcgagcagaaggagaaggagaaccagatcaacagcttcggcaagagcgtgcccggccccctgaagaacagcagcgactggaagatcccccaggacggcgactacgagttcctgaagagctggaccgtggaggacctgcagaagagactgctggccctggaccccatgatggagcaggagatcgaggagatcagacagaagtaccagagcaagagacagcccatcctggacgccatcgaggccaagaagagaagacagcagaacttctag

SEQ ID NO: 163490 - protein, 805 aa, Artificial Sequence
  derived and/or modified sequence
MAFSPWQILSPVQWAKWTWSAVRGGAAGEDEAGGPEGDPEEEDSQAETKSLSFSSDSEGNFETPEAETPIRSPFKESCDPSLGLAGPGAKSQESQEADEQLVAEVVEKCSSKTCSKPSENEVPQQAIDSHSVKNFREEPEHDFSKISIVRPFSIETKDSTDISAVLGTKAAHGCVTAVSGKALPSSPPDALQDEAMTEGSMGVTLEASAEADLKAGNSCPELVPSRRSKLRKPKPVPLRKKAIGGEFSDTNAAVEGTPLPKASYHFSPEELDENTSPLLGDARFQKSPPDLKETPGTLSSDTNDSGVELGEESRSSPLKLEFDFTEDTGNIEARKALPRKLGRKLGSTLTPKIQKDGISKSAGLEQPTDPVARDGPLSQTSSKPDPSQWESPSFNPFGSHSVLQNSPPLSSEGSYHFDPDNFDESMDPFKPTTTLTSSDFCSPTGNHVNEILESPKKAKSRLITSGCKVKKHETQSLALDACSRDEGAVISQISDISNRDGHATDEEKLASTSCGQKSAGAEVKGEPEEDLEYFECSNVPVSTINHAFSSSEAGIEKETCQKMEEDGSTVLGLLESSAEKAPVSVSCGGESPLDGICLSESDKTAVLTLIREEIITKEIEANEWKKKYEETRQEVLEMRKIVAEYEKTIAQMIEDEQRTSMTSQKSFQQLTMEKEQALADLNSVERSLSDLFRRYENLKGVLEGFKKNEEALKKCAQDYLARVKQEEQRYQALKIHAEEKLDKANEEIAQVRTKAKAESAALHAGLRKEQMKVESLERALQQKNQEIEELTKICDELIAKLGKTD

SEQ ID NO: 163491 - DNA, 2418 bp, Artificial Sequence
  derived and/or modified sequence
atggccttcagcccctggcagatcctgagccccgtgcagtgggccaagtggacctggagcgccgtgagaggcggcgccgccggcgaggacgaggccggcggccccgagggcgaccccgaggaggaggacagccaggccgagaccaagagcctgagcttcagcagcgacagcgagggcaacttcgagacccccgaggccgagacccccatcagaagccccttcaaggagagctgcgaccccagcctgggcctggccggccccggcgccaagagccaggagagccaggaggccgacgagcagctggtggccgaggtggtggagaagtgcagcagcaagacctgcagcaagcccagcgagaacgaggtgccccagcaggccatcgacagccacagcgtgaagaacttcagagaggagcccgagcacgacttcagcaagatcagcatcgtgagacccttcagcatcgagaccaaggacagcaccgacatcagcgccgtgctgggcaccaaggccgcccacggctgcgtgaccgccgtgagcggcaaggccctgcccagcagcccccccgacgccctgcaggacgaggccatgaccgagggcagcatgggcgtgaccctggaggccagcgccgaggccgacctgaaggccggcaacagctgccccgagctggtgcccagcagaagaagcaagctgagaaagcccaagcccgtgcccctgagaaagaaggccatcggcggcgagttcagcgacaccaacgccgccgtggagggcacccccctgcccaaggccagctaccacttcagccccgaggagctggacgagaacaccagccccctgctgggcgacgccagattccagaagagcccccccgacctgaaggagacccccggcaccctgagcagcgacaccaacgacagcggcgtggagctgggcgaggagagcagaagcagccccctgaagctggagttcgacttcaccgaggacaccggcaacatcgaggccagaaaggccctgcccagaaagctgggcagaaagctgggcagcaccctgacccccaagatccagaaggacggcatcagcaagagcgccggcctggagcagcccaccgaccccgtggccagagacggccccctgagccagaccagcagcaagcccgaccccagccagtgggagagccccagcttcaaccccttcggcagccacagcgtgctgcagaacagcccccccctgagcagcgagggcagctaccacttcgaccccgacaacttcgacgagagcatggaccccttcaagcccaccaccaccctgaccagcagcgacttctgcagccccaccggcaaccacgtgaacgagatcctggagagccccaagaaggccaagagcagactgatcaccagcggctgcaaggtgaagaagcacgagacccagagcctggccctggacgcctgcagcagagacgagggcgccgtgatcagccagatcagcgacatcagcaacagagacggccacgccaccgacgaggagaagctggccagcaccagctgcggccagaagagcgccggcgccgaggtgaagggcgagcccgaggaggacctggagtacttcgagtgcagcaacgtgcccgtgagcaccatcaaccacgccttcagcagcagcgaggccggcatcgagaaggagacctgccagaagatggaggaggacggcagcaccgtgctgggcctgctggagagcagcgccgagaaggcccccgtgagcgtgagctgcggcggcgagagccccctggacggcatctgcctgagcgagagcgacaagaccgccgtgctgaccctgatcagagaggagatcatcaccaaggagatcgaggccaacgagtggaagaagaagtacgaggagaccagacaggaggtgctggagatgagaaagatcgtggccgagtacgagaagaccatcgcccagatgatcgaggacgagcagagaaccagcatgaccagccagaagagcttccagcagctgaccatggagaaggagcaggccctggccgacctgaacagcgtggagagaagcctgagcgacctgttcagaagatacgagaacctgaagggcgtgctggagggcttcaagaagaacgaggaggccctgaagaagtgcgcccaggactacctggccagagtgaagcaggaggagcagagataccaggccctgaagatccacgccgaggagaagctggacaaggccaacgaggagatcgcccaggtgagaaccaaggccaaggccgagagcgccgccctgcacgccggcctgagaaaggagcagatgaaggtggagagcctggagagagccctgcagcagaagaaccaggagatcgaggagctgaccaagatctgcgacgagctgatcgccaagctgggcaagaccgactag

SEQ ID NO: 163492 - DNA, 1833 bp, Artificial Sequence
  derived and/or modified sequence
atgaccgagggcagcatgggcgtgaccctggaggccagcgccgaggccgacctgaaggccggcaacagctgccccgagctggtgcccagcagaagaagcaagctgagaaagcccaagcccgtgcccctgagaaagaaggccatcggcggcgagttcagcgacaccaacgccgccgtggagggcacccccctgcccaaggccagctaccacttcagccccgaggagctggacgagaacaccagccccctgctgggcgacgccagattccagaagagcccccccgacctgaaggagacccccggcaccctgagcagcgacaccaacgacagcggcgtggagctgggcgaggagagcagaagcagccccctgaagctggagttcgacttcaccgaggacaccggcaacatcgaggccagaaaggccctgcccagaaagctgggcagaaagctgggcagcaccctgacccccaagatccagaaggacggcatcagcaagagcgccggcctggagcagcccaccgaccccgtggccagagacggccccctgagccagaccagcagcaagcccgaccccagccagtgggagagccccagcttcaaccccttcggcagccacagcgtgctgcagaacagcccccccctgagcagcgagggcagctaccacttcgaccccgacaacttcgacgagagcatggaccccttcaagcccaccaccaccctgaccagcagcgacttctgcagccccaccggcaaccacgtgaacgagatcctggagagccccaagaaggccaagagcagactgatcaccagcggctgcaaggtgaagaagcacgagacccagagcctggccctggacgcctgcagcagagacgagggcgccgtgatcagccagatcagcgacatcagcaacagagacggccacgccaccgacgaggagaagctggccagcaccagctgcggccagaagagcgccggcgccgaggtgaagggcgagcccgaggaggacctggagtacttcgagtgcagcaacgtgcccgtgagcaccatcaaccacgccttcagcagcagcgaggccggcatcgagaaggagacctgccagaagatggaggaggacggcagcaccgtgctgggcctgctggagagcagcgccgagaaggcccccgtgagcgtgagctgcggcggcgagagccccctggacggcatctgcctgagcgagagcgacaagaccgccgtgctgaccctgatcagagaggagatcatcaccaaggagatcgaggccaacgagtggaagaagaagtacgaggagaccagacaggaggtgctggagatgagaaagatcgtggccgagtacgagaagaccatcgcccagatgatcgaggacgagcagagaaccagcatgaccagccagaagagcttccagcagctgaccatggagaaggagcaggccctggccgacctgaacagcgtggagagaagcctgagcgacctgttcagaagatacgagaacctgaagggcgtgctggagggcttcaagaagaacgaggaggccctgaagaagtgcgcccaggactacctggccagagtgaagcaggaggagcagagataccaggccctgaagatccacgccgaggagaagctggacaaggccaacgaggagatcgcccaggtgagaaccaaggccaaggccgagagcgccgccctgcacgccggcctgagaaaggagcagatgaaggtggagagcctggagagagccctgcagcagaagaaccaggagatcgaggagctgaccaagatctgcgacgagctgatcgccaagctgggcaagaccgactag

SEQ ID NO: 163493 - DNA, 2418 bp, Artificial Sequence
  derived and/or modified sequence
atggccttctccccctggcagatcctatctcccgtgcaatgggccaaatggacttggagcgcggttaggggcggcgcagccggcgaagacgaagcaggaggcccagagggagatccggaggaggaggatagccaggccgaaaccaaatccctctccttttcaagtgatagtgagggaaacttcgagacccctgaggccgagactcctattcgtagcccatttaaggagtcatgtgaccctagcctggggctggctggccctggagccaaatcccaagagtctcaggaggcagacgaacagctagtggccgaagttgtggagaagtgcagctctaaaacttgctcgaaaccttcagagaacgaagtgccccagcaggcgatagacagccattctgtaaagaactttcgagaggaaccagagcatgatttctccaagatcagcatcgtgagaccgttctccattgagaccaaggactcaacagatatatccgcagtgctcggcacaaaggccgcacatggatgtgttacagccgtgtccgggaaagcattgccttcctccccaccagacgccctgcaagacgaagcaatgactgaaggtagtatgggcgtgacacttgaggcgtctgctgaggcggatctgaaggcaggaaattcctgtcccgaactggttccatccagacgaagcaagcttcgcaagcccaagcccgttcccctcagaaaaaaggcaattggaggagaattttctgacacaaatgctgcggtggaaggaacaccactgcctaaggccagctaccacttctctccagaagagctggacgagaacaccagtccattactgggcgacgcaaggtttcagaaaagtccccctgacctcaaggagacacctgggacactaagctccgacacaaatgactccggcgtagagttgggggaagaatcgcgcagcagcccactcaaacttgagttcgattttaccgaggataccggtaatattgaggcccgaaaggccctgccaagaaagctcggtaggaagctagggtcaacattaactcctaagatccagaaggacgggatttctaagtctgccggactggagcagcctactgaccctgtcgctcgcgatgggccactcagtcagacaagttctaagcccgatcctagccagtgggagagtccttcatttaatccatttggttctcattctgttcttcagaactccccccccctgtccagtgaaggatcatatcatttcgatcccgataattttgacgagtccatggacccgtttaagcctactaccaccctcacctcgtccgatttttgctctccaactggaaaccacgtgaatgaaatcctggagagcccaaagaaagccaagagcagactgattacatcgggatgcaaggtgaaaaaacatgagacacaaagcctcgccttggatgcatgttcaagagatgagggcgcggtaatcagccaaatcagcgacatcagcaatcgcgatgggcacgcaactgatgaggaaaaactcgcttctacttcctgcggccagaaatccgccggagccgaggtcaagggagagcctgaggaggacttggagtatttcgaatgctctaatgtgccagtaagcactattaatcacgcattctcaagttctgaagctggtattgagaaggagacctgccagaagatggaagaagatgggagcactgttctcggtttgctcgagagctcagccgagaaggcccccgtctccgtttcatgtgggggtgagagtcctctggatggaatctgtctgagtgaatccgacaaaaccgcagtgctgacgctaatcagagaagaaattatcaccaaagaaattgaggccaatgaatggaagaagaaatacgaagagacgcggcaagaagtgctggagatgcggaagatcgtggccgagtatgagaaaaccatcgcccaaatgatcgaggatgagcagagaacatcgatgacttcacaaaagagctttcagcagctcactatggagaaggagcaggcccttgctgacctcaactcagtggagaggtcattgtcggacctgttccgaagatacgagaatctgaagggtgtgctggagggctttaagaaaaacgaggaggcactgaagaaatgtgcccaggattacctcgcccgggtgaagcaggaggagcagagataccaggccttaaagattcacgcagaggagaaactcgataaagctaatgaggaaatcgcccaagtccgcactaaggccaaagccgagtctgccgctcttcatgcgggtctacgaaaagagcagatgaaggtggaatctctcgagcgagctctgcaacaaaagaaccaggaaattgaggaactaaccaagatttgtgacgaactgattgctaaactaggaaagactgactag

SEQ ID NO: 163494 - DNA, 1833 bp, Artificial Sequence
  derived and/or modified sequence
atgactgagggcagcatgggcgtgaccctagaagccagcgcagaagcagacctcaaagctggcaactcatgtcccgagttggttccgtctaggcgaagcaaactgcgcaagccaaagccagtacctttaagaaagaaggccattggcggagaattttcggatacaaatgcggcagtggagggtacgccactgccaaaggccagctatcactttagtcctgaagaacttgacgaaaacacatctccacttcttggcgacgccagatttcagaagagcccgcctgacctgaaggagacaccaggtacacttagttcggataccaatgactccggggtagaactcggggaggagtctcgaagttctccgcttaaactcgaattcgatttcacagaagacactgggaatatcgaagcccgcaaggcccttcctcgaaaattgggccgaaagttggggtccacacttacacccaaaattcagaaggatggaatatcaaaaagcgcaggactggaacagccgactgatcccgtagccagggatggtcctctttctcagacttctagcaagccagatccttctcagtgggagtctcccagttttaacccatttggcagccacagcgtcctccagaacagtccccccctaagttccgaaggatcatatcactttgatccagacaattttgatgagagcatggatccatttaaacctaccaccactctcaccagctcagatttctgctcccccacagggaatcacgtcaatgaaatcctcgagagccccaagaaggctaaatcccgcctcattacctcagggtgcaaagtgaaaaagcatgaaacccagagtctagcgctggacgcctgctctcgggacgagggggccgttatcagccaaattagcgacataagcaatagagatgggcacgccaccgacgaagagaaactggccagcacctcatgtggccagaagagtgccggggcggaagttaaaggcgaacctgaggaggacctggagtacttcgaatgttccaacgtgcccgtgtccaccattaatcacgcctttagcagtagcgaggccgggatagagaaggaaacttgtcagaagatggaggaagatggttctaccgtgttaggattgctcgaaagtagtgccgagaaagctcctgtgtctgtgtcttgcgggggagagtcacctctggacggaatctgcctttccgagagcgacaagacggccgttcttacactgatccgggaagagattattacgaaagaaattgaggctaacgaatggaagaagaagtacgaagaaaccaggcaggaggtgttggaaatgaggaaaattgtcgctgaatacgaaaaaacaatcgcccagatgattgaagacgaacagcgcaccagcatgacttctcagaagtcttttcagcagctgaccatggagaaggagcaagcgctggctgacctgaactccgtggaacgctccctgagcgacctcttcagaagatacgagaatcttaagggggttctagagggattcaagaagaatgaggaagcactgaagaaatgcgcgcaagattacctggcccgagtgaagcaggaggaacagcgctaccaggcgctgaaaatccacgccgaggagaagctggataaggcgaacgaagagatcgcccaagtgagaacaaaggccaaagcagagtccgccgccctccatgccggattgcggaaagaacagatgaaagtggagagtctggaacgcgccctacaacagaaaaatcaggaaatcgaggagttgactaaaatctgtgacgagctgatcgccaagcttggcaagacagattag

SEQ ID NO: 163495 - DNA, 2418 bp, Artificial Sequence
  derived and/or modified sequence
atggccttcagcccctggcagatcctgagccctgtgcagtgggccaagtggacctggagcgctgtgcggggcggcgctgctggagaagatgaggccggcggccctgagggggaccctgaggaggaggacagccaggccgagaccaagagcctgtccttcagcagtgacagcgagggcaactttgagaccccagaggccgagacccccatccgcagccccttcaaggagagctgtgaccccagcctgggcctggccggccctggggccaagagccaggagagccaggaggctgatgagcagctggtggccgaggtggtggagaagtgcagcagcaagacctgcagcaagcccagtgaaaatgaggtgccccagcaggccatcgacagccacagcgtgaagaacttccgggaggagcctgagcatgacttcagcaagatcagcatcgtgcggcccttcagcattgagaccaaggacagcacagacatctctgctgtgctgggcaccaaggccgcccacggctgtgtgacagctgtgtctgggaaggccctgcccagcagccccccagatgccctgcaggatgaggccatgacagagggctccatgggcgtgaccctggaggccagcgctgaggccgacctgaaggccggcaacagctgcccagagctggtgcccagccgccgcagcaagctgaggaagcccaagcctgtgcccctgaggaagaaggccatcggcggggagttcagtgacaccaatgctgctgtggagggcacccccctgcccaaggccagctaccacttcagccctgaggagctggatgagaacaccagccccctgctgggagatgcccgcttccagaagagccccccagacctgaaggagaccccaggcaccctgagcagtgacaccaatgattctggagtggagctgggggaggagagccgcagcagccccctgaagctggagtttgacttcacagaggacaccggcaacatcgaggccaggaaggccctgcccaggaagctgggcaggaagctgggcagcaccctgacccccaagatccagaaggatggcatcagcaagtctgctggcctggagcagcccacagatcctgtggccagagatggccccctgagccagaccagcagcaagccagaccccagccagtgggagagccccagcttcaaccccttcggcagccacagcgtgctgcagaacagcccccccctgagcagcgagggcagctaccactttgatcctgacaactttgatgagagcatggaccccttcaagcccaccaccaccctgaccagcagtgacttctgcagccccaccggcaaccacgtgaatgagatcctggagagccccaagaaggccaagagccgcctcatcaccagcggctgcaaggtgaagaagcatgagacccagagcctggccctggatgcctgcagcagagatgaaggagctgtgatcagccagatcagtgacatcagcaacagagatggccacgccacagatgaggagaagctggccagcaccagctgtggccagaagtctgctggagctgaggtgaagggggagcctgaggaggacctggagtactttgaatgtagcaatgtgcctgtgtccaccatcaaccacgccttcagcagcagcgaggccggcatcgagaaggagacctgccagaagatggaggaggatggcagcacagtgctgggcctgctggagagcagcgctgagaaggcccctgtgtctgtgtcctgtggcggggagagccccctggatggcatctgcctgtctgagagtgacaagacagctgtgctgaccctcatccgggaggagatcatcaccaaggagattgaggccaatgagtggaagaagaagtatgaggagacccggcaggaggtgctggagatgaggaagatcgtggccgagtatgagaagaccatcgcccagatgattgaagatgagcagaggacctccatgaccagccagaagagcttccagcagctgaccatggagaaggagcaggccctggccgacctgaacagcgtggagaggagcctgagtgacctcttcagaagatatgagaacctgaagggcgtgctggagggcttcaagaagaatgaggaggccctgaagaagtgtgcccaggactacctggcccgggtgaagcaggaggagcagcgctaccaggccctgaagatccatgctgaggagaagctggacaaggccaatgaggagatcgcccaggtgaggaccaaggccaaggccgagagcgctgccctgcacgccggcctgaggaaggagcagatgaaggtggagagcctggagcgggccctgcagcagaagaaccaggagattgaggagctgaccaagatctgtgatgagctgattgccaagctgggcaagacagactag

SEQ ID NO: 163496 - DNA, 1833 bp, Artificial Sequence
  derived and/or modified sequence
atgacagagggctccatgggcgtgaccctggaggccagcgctgaggccgacctgaaggccggcaacagctgcccagagctggtgcccagcagaagaagcaagctgaggaagcccaagcctgtgcccctgaggaagaaggccatcggcggggagttcagtgacaccaatgctgctgtggagggcacccccctgcccaaggccagctaccacttcagccctgaggagctggatgagaacaccagccccctgctgggagatgcccgcttccagaagagccccccagacctgaaggagaccccaggcaccctgagcagtgacaccaatgacagcggcgtggagctgggggaggagagccgcagcagccccctgaagctggagtttgacttcacagaagatactggaaacatcgaggccaggaaggccctgcccaggaagctgggcaggaagctgggcagcaccctgacccccaagatccagaaggatggcatcagcaagtctgctggcctggagcagcccacagatcctgtggccagagatggccccctgagccagaccagcagcaagccagaccccagccagtgggagagccccagcttcaaccccttcggcagccacagcgtgctgcagaacagcccccccctgagcagcgagggcagctaccactttgatcctgacaactttgatgagagcatggaccccttcaagcccaccaccaccctgaccagcagtgacttctgcagccccactggaaaccacgtgaatgagatcctggagagccccaagaaggccaagagccgcctcatcaccagcggctgcaaggtgaagaagcatgagacccagagcctggccctggatgcctgcagcagagatgagggcgctgtgatcagccagatcagtgacatcagcaacagagatggccacgccacagatgaggagaagctggccagcaccagctgtggccagaagtctgctggagctgaggtgaagggggagcctgaggaggacctggagtactttgagtgcagcaatgtgcctgtgtccaccatcaaccacgccttcagcagcagcgaggccggcatcgagaaggagacctgccagaagatggaggaggatggcagcacagtgctgggcctgctggagagcagcgctgagaaggcccctgtgtctgtgtcctgtggcggggagagccccctggatggcatctgcctgtctgagagtgacaagacagctgtgctgaccctcatccgggaggagatcatcaccaaggagattgaggccaatgagtggaagaagaagtatgaggagacccggcaggaggtgctggagatgaggaagatcgtggccgagtatgagaagaccatcgcccagatgattgaagatgagcagaggacctccatgaccagccagaagagcttccagcagctgaccatggagaaggagcaggccctggccgacctgaacagcgtggagaggagcctgagtgacctcttccgccgctatgagaacctgaagggcgtgctggagggcttcaagaagaatgaggaggccctgaagaagtgtgcccaggactacctggcccgggtgaagcaggaggagcagcgctaccaggccctgaagatccacgccgaggagaagctggacaaggccaatgaggagatcgcccaggtgaggaccaaggccaaggccgagagcgctgccctgcatgctggcctgaggaaggagcagatgaaggtggagagcctggagcgggccctgcagcagaagaaccaggagattgaggagctgaccaagatctgtgatgagctgattgccaagctgggcaagacagactag

SEQ ID NO: 163497 - DNA, 2418 bp, Artificial Sequence
  derived and/or modified sequence
atggccttcagcccctggcagatcctgagccccgtgcagtgggccaagtggacatggtccgccgtccgaggcggagcagcaggggaggacgaagctggcgggccagaaggggatcccgaagaggaagactctcaggccgagaccaagtcgctctcattcagcagtgattctgaggggaacttcgagacccccgaagccgagactcctattaggtctccattcaaagagtcatgtgacccgtccctgggcctggcagggcctggcgctaagagccaggagtcccaggaagcagatgagcagctggtcgccgaagtcgtagagaagtgttcttccaagacctgctccaagcccagcgagaacgaagtcccccagcaagccatagattctcatagcgttaagaatttccgtgaagagccagaacatgacttcagcaaaatctcaatcgttaggcctttttctattgaaaccaaggattccacggacattagtgccgttctgggcactaaggccgcccatggatgcgtcacagcggtgtctgggaaggctctgccctcttcgccaccagacgctcttcaggacgaggcaatgaccgaaggatccatgggtgtcaccttagaagcctctgcagaagcagaccttaaggcaggcaactcttgtcccgagctggttcctagcaggcgttccaaattaaggaaacctaaacccgtgccactgcgcaagaaggcgatcggaggggagttctctgataccaatgctgcagtagagggaacacccttacctaaggcttcttaccacttcagtccagaagaattggatgaaaacacctcacccctgctgggtgatgcaagattccagaagagtccgccagatcttaaggaaactcctggcactctttcatctgataccaatgacagcggggtggaactgggggaggaatcccggagttcccccttgaagctggagttcgactttactgaagacaccgggaacatagaagctcgcaaagcgctgcccagaaagctcggaagaaagctgggcagcaccctgacccccaagatacagaaagatggaatctccaagtctgccggtctggagcagccgactgatcccgtcgctagggatgggcctctgagtcagacttccagcaagcctgatcctagccagtgggagtcacccagcttcaacccgttcggatcacattccgtcctccaaaactctcctccgcttagcagcgagggcagttaccacttcgatccagataatttcgacgagtctatggatccatttaaacctaccaccacgttaacctcctccgatttctgctccccgaccggcaatcacgttaacgagattcttgagagccctaagaaagctaagtccaggttgatcacgagcggctgtaaggtgaagaagcatgagacccagtccctcgcgctcgatgcgtgctctagggacgaaggcgctgtaatttctcaaataagcgacatctccaatagagacggccatgcaaccgacgaggagaagcttgctagtacatcatgcggacagaaaagtgccggcgccgaggtgaagggtgaaccggaggaggatctggagtatttcgagtgctccaatgtgcccgtgagcactatcaatcacgccttctcgtcaagtgaagcagggatcgagaaggagacctgccagaaaatggaggaggatggcagcaccgttcttggcctgttggaatcctcggcggaaaaggcaccggtatctgtgtcttgtggaggggaaagtcctctggatgggatttgcctgtctgaatctgacaagacggcagtgctgacactgatccgcgaggagattattaccaaggagattgaggccaatgagtggaagaagaaatatgaagaaaccagacaggaagtgctcgagatgcggaaaattgtagcagagtatgaaaaaactattgcccagatgattgaggatgagcagagaaccagtatgacatcacagaagtcttttcaacagctgacaatggagaaggagcaggcacttgctgatctaaactcagttgagcggtctctgagtgacctgtttaggcggtacgagaatctaaagggcgtacttgagggcttcaaaaaaaatgaggaggcattgaagaagtgtgcgcaagattacctggctcgggtcaaacaggaggaacagaggtaccaagcactgaagatacatgcggaagaaaagctggataaagctaatgaagaaattgcgcaagtgaggaccaaggctaaagcggagagcgccgcactgcacgccggcctgcgaaaggaacagatgaaagtggagtctctggaaagggcactgcagcaaaaaaatcaggagattgaagaactaactaagatctgcgatgagttgatagccaagctgggaaaaaccgactag

SEQ ID NO: 163498 - DNA, 1833 bp, Artificial Sequence
  derived and/or modified sequence
atgaccgagggcagcatgggcgtgaccctggaggccagcgccgaggccgacctaaaagccggtaatagctgtccagaactggtgccttcacgaaggtctaaacttaggaagccgaaaccagttcccttacgtaagaaggcgattggaggtgagtttagcgacaccaatgctgctgtggaaggaaccccccttcctaaagcttcataccatttctctcctgaggaattagatgagaacacaagtccactgttaggagacgccaggttccagaagtcaccccctgatctgaaggagactcccggaactctaagtagcgataccaatgattcaggagttgagctgggagaggagtccagaagctccccgctgaagctggaatttgacttcacggaggacacagggaatatcgaggccaggaaggctctcccacgcaagctagggagaaagctcggtagcacacttactcctaaaatccagaaggatggcatttcgaagtcagctgggctggaacagcccacagatcccgtggcccgcgatggcccactcagtcagaccagtagcaaaccggacccctctcagtgggaatcaccatcttttaacccattcggctctcacagtgttcttcaaaatagcccaccgctgtcctccgaaggaagttaccattttgaccctgataatttcgacgagtcaatggaccctttcaagccgacaacaactctcaccagctccgatttttgttcacctacaggaaaccacgtgaacgaaatcctagaaagcccaaagaaggcgaagtctcggctgatcacatcaggatgtaaagtgaaaaagcacgaaacacagagcctggccctcgatgcctgctccagagatgaaggagccgtgatctctcaaatctccgacatatccaacagggacggccacgccaccgatgaggagaaactggcctcaacatcctgtggtcagaagtctgccggagccgaggttaaaggagagcctgaggaggatttggagtacttcgagtgctctaatgtgcctgtctccactataaatcatgccttctcaagttccgaggctggtattgagaaagaaacgtgtcagaaaatggaggaggatggatccacagtacttggattgctcgagtcaagcgccgagaaggcgccagtgagcgtaagctgcggaggtgagagtcccctagacggcatctgtcttagcgagtcagacaagacagcagtgcttacactcattcgggaagagatcattaccaaggagatcgaggcaaacgagtggaaaaaaaagtatgaggagacaagacaagaggtgttggagatgcggaagatcgtagccgagtatgaaaagacgattgcacaaatgatcgaggacgagcagaggaccagcatgacatcgcagaagagctttcaacaactgaccatggagaaggaacaggctctagccgatctcaattccgtggagcggagcctctccgatttgttcaggcggtatgagaacctaaaaggagttctcgagggattcaagaaaaacgaggaggcacttaagaagtgcgcgcaagactatcttgcacgcgtaaaacaggaggaacaaagataccaggccctcaagattcatgcagaggagaagcttgataaggcaaacgaggagattgcccaggtgcgaaccaaagcgaaggccgagtccgctgcgttacacgctggcttacgaaaggaacaaatgaaagttgagtcgctcgaacgtgcacttcaacaaaaaaatcaagaaatcgaggagctgaccaaaatctgcgatgaactgattgccaagctcggaaaaacggactag

SEQ ID NO: 163499 - DNA, 2418 bp, Artificial Sequence
  derived and/or modified sequence
atggccttcagtccttggcagatcctctctcctgtgcagtgggcaaaatggacttggagtgccgtccgcggaggagcagcaggcgaggatgaggcaggagggccagagggcgatcctgaggaggaggattcccaggctgaaaccaaaagcctttcctttagcagcgacagcgagggcaattttgagacaccggaggcagaaacacctattcgctctcccttcaaggaaagctgtgaccctagcctgggccttgctggcccaggcgcaaaaagccaggagtcacaagaagcagatgagcagctcgtcgcagaggtggtggagaaatgtagctcaaaaacctgctccaaaccatccgagaacgaggtcccccagcaagctattgattctcactcagtcaaaaactttcgggaggaacccgaacacgacttcagcaagatttccatcgtgagacctttcagtatagagaccaaggactcgacagatataagcgccgtcctcgggaccaaggccgctcacggctgcgtcaccgccgtgtctggaaaggcccttccctcctcacctccagacgccctgcaggatgaggctatgactgagggctccatgggagtgacccttgaggcttcggctgaagcagatcttaaagccggtaactcctgccctgagctggtgcccagtcgacgaagcaagcttagaaaaccaaaacctgttcctctgcggaaaaaagctatcggcggagagttttcagacaccaatgcagcagtcgaggggacacctcttcccaaagctagttatcacttttcccctgaggagctggacgaaaatacaagcccactcctgggggacgcgcgtttccagaaatccccaccagaccttaaggaaacacctggcacactgtccagcgacacaaacgactctggcgtcgagctgggggaggaaagcagatcatctcctctaaagttggagtttgactttacagaggacactgggaacatagaggcaagaaaggcgcttccccgaaagttgggtagaaaactggggtccaccttgacgcccaagatccagaaggatggaatcagtaagagtgctggactggagcagcccacggaccctgttgccagggatggacctctgagtcagacaagttccaaacccgatcccagccagtgggagtccccatccttcaaccccttcggctcccattccgtgttacagaatagcccgccactgtccagcgaggggtcctatcatttcgaccccgacaactttgatgagtccatggaccccttcaagcctaccactaccctcacgagctctgacttttgcagcccaaccgggaaccatgtcaatgaaattctcgagagccccaaaaaggccaagagtcggttaatcacgtcaggctgtaaagtgaagaagcatgaaactcagagcctggctctcgatgcctgctccagggacgagggggcagttatcagtcagatttctgacatcagcaatcgggacggtcacgcaacagatgaggagaagttagcgagcacttcttgcgggcagaagagtgctggtgccgaagtgaaaggcgagcccgaagaggacctggaatatttcgagtgttctaacgtgccggtatccaccatcaatcacgccttctcttccagcgaggctgggatcgagaaagagacttgtcagaaaatggaggaagacggctcgacggtgctaggcctcctggagtcttccgcggaaaaggctcccgtgagtgtcagttgcggtggtgagtctcccctggatggcatctgcctaagcgagtctgacaagactgcggtgctgacactgatcagggaagaaattattacaaaagaaattgaggcaaacgaatggaagaagaaatatgaggaaacaaggcaggaagtgttagagatgagaaaaattgtcgccgagtacgagaaaacaatcgctcaaatgattgaggacgagcagcgcactagcatgacgtcccaaaagagcttccagcagctgactatggaaaaggagcaggcgcttgctgacctcaactcagtggagaggagcctgtctgacctctttcgcaggtatgagaatttaaagggcgttcttgagggatttaagaaaaatgaggaggccctgaagaagtgcgcccaggattacctggctagagtcaagcaggaggagcagaggtaccaggcactgaagatccatgctgaggagaaactcgataaggcaaacgaagagatcgcccaggtgaggactaaagctaaggccgaaagcgctgctttacatgccggattgcggaaggagcagatgaaagtagagtcgctcgagcgagctttgcagcagaagaatcaggagatcgaagaactgacaaaaatttgcgacgaactgatcgccaaattagggaagacagattag

SEQ ID NO: 163500 - DNA, 1833 bp, Artificial Sequence
  derived and/or modified sequence
atgacagaaggtagtatgggcgtgaccttagaggcatctgccgaggcagacctgaaggcaggaaatagctgcccagagctggtccccagccgtcggagcaagctgcggaagccgaaacccgtgccactgcgaaaaaaggctatcggaggtgagtttagcgatacaaatgccgctgtcgaaggaacgcccctgccgaaagcgagctaccacttttctcccgaggagcttgacgagaatacaagccctctgcttggagacgcaaggttccagaagtccccccctgacctcaaggaaacacctggcaccctgtcctccgatacaaacgactctggggtggaactgggagaagaatcaagatcatcaccactgaaactggagttcgacttcaccgaggacacggggaatatcgaagccaggaaggcactgcctcgaaaactggggagaaaactgggtagcacactcacacctaaaattcagaaagatggtatcagcaagagtgcgggactagagcaacccacagaccccgtggccagagatggtcctctgtcccagacaagctctaagccagacccctcccagtgggagtctccctcatttaacccattcggctctcattccgttctacagaacagccctcctctgtctagcgagggaagctatcacttcgatcccgacaacttcgacgagtctatggaccctttcaagccgaccaccactcttacgtcgagcgacttttgttctccgacagggaatcatgttaacgaaattctggaaagccccaaaaaagcaaagtcacgccttatcactagcggatgtaaagtaaagaagcatgaaacccagtcactggcgctcgacgcatgttccagagacgagggggcagtcataagccagatctccgacatctcaaacagggatggacatgccactgacgaagagaaactagctagtacatcttgtggccagaaatccgccggtgccgaagtgaagggggagcccgaagaggacctggaatatttcgagtgctccaacgtgcccgtcagtactatcaaccacgccttctctagtagcgaggccggtatcgagaaggaaacatgccagaagatggaagaggacggcagcacggtgctgggcctgctggagtcttctgccgagaaggctccggtcagcgtgtcatgcggcggagaaagcccactggatggaatctgtctctcagagtccgacaagaccgctgtactgacgttaatccgggaggaaatcattacgaaagaaatcgaggctaatgagtggaaaaagaaatacgaagagacaagacaggaagtgctggagatgcgcaaaatcgtggcggagtacgagaaaacaatcgcacagatgatcgaagacgaacaacggacctccatgacctcccagaaaagctttcaacagctgactatggagaaagagcaggccctcgccgatctaaattctgtcgaacggtcgcttagcgacctgtttcgcaggtacgaaaatctgaaaggggtcctggaaggatttaagaagaatgaggaggcccttaagaagtgtgcacaggactacttggctagagtgaagcaggaggaacagcggtaccaggcactgaagatccatgcagaggaaaaactagataaggcaaacgaagaaatcgcccaggtgcggacaaaggcaaaagcagaatccgccgctctgcacgccggacttaggaaggagcagatgaaggtggagagtctcgaacgggctctgcagcagaaaaatcaggagattgaggagctgaccaaaatttgtgacgaactcatagctaagttgggaaaaacagattag

SEQ ID NO: 163501 - DNA, 7802 bp, Artificial Sequence
  derived and/or modified sequence
agctgatgcgcgccccgccggccgggaggcgggagtccgcgagccgggagcgggagcagcagaggtctagcagccgggcgccgcgggccgggggcctgaggaggccacaggacgggcgtcttcccggctagtggagcccggcgcggggcccgctgcggccgcaccgtgaggggaggaggccgaggaggacgcagcgccggctgccggcgggaggaagcgctccaccagggcccccgacggcactcgtttaaccacatccgcgcctctgctggaaacgcttgctggcgcctgtcaccggttccctccattttgaaagggaaaaaggctctccccacccattcccctgcccctaggagctggagccggaggagccgcgctcatggcgttcagcccgtggcagatcctgtcccccgtgcagtgggcgaaatggacgtggtctgcggtacgcggcggggccgccggcgaggacgaggctggcgggcccgagggcgaccccgaggaggaggattcgcaagccgagaccaaatccttgagtttcagctcggattctgaaggtaattttgagactcctgaagctgaaaccccgatccgatcacctttcaaggagtcctgtgatccatcactcggattggcaggacctggggccaaaagccaagaatcacaagaagctgatgaacagcttgtagcagaagtggttgaaaaatgttcatctaagacttgttctaaaccttcagaaaatgaagtgccacagcaggccattgactctcactcagtcaagaatttcagagaagaacctgaacatgattttagcaaaatttccatcgtgaggccattttcaatagaaacgaaggattccacggatatctcggcagtcctcggaacaaaagcagctcatggctgtgtaactgcagtctcaggcaaggctctgccttccagcccgccagacgccctccaggacgaggcgatgacagaaggcagcatgggggtcaccctcgaggcctccgcagaagctgatctaaaagctggcaactcctgtccagagcttgtgcccagcagaagaagcaagctgagaaagcccaagcctgtccccctgaggaagaaagcaattggaggagagttctcagacaccaacgctgctgtggagggcacacctctccccaaggcatcctatcacttcagtcctgaagagttggatgagaacacaagtcctttgctaggagatgccaggttccagaagtctccccctgaccttaaagaaactcccggcactctcagtagtgacaccaacgactcaggggttgagctgggggaggagtcgaggagctcacctctcaagcttgagtttgatttcacagaagatacaggaaacatagaggccaggaaagcccttccaaggaagcttggcaggaaactgggtagcacactgactcccaagatacaaaaagatggcatcagtaagtcagcaggtttagaacagcctacagacccagtggcacgagacgggcctctctcccaaacatcttccaagccagatcctagtcagtgggaaagccccagcttcaacccctttgggagccactctgttctgcagaactccccacccctctcttctgagggctcctaccactttgacccagataactttgacgaatccatggatccctttaaaccaactacgaccttaacaagcagtgacttttgttctcccactggtaatcacgttaatgaaatcttagaatcacccaagaaggcaaagtcgcgtttaataacgagtggctgtaaggtgaagaagcatgaaactcagtctctcgccctggatgcatgttctcgggatgaaggggcagtgatctcccagatttcagacatttctaatagggatggccatgctactgatgaggagaaactggcatccacgtcatgtggtcagaaatcagctggtgccgaggtgaaaggtgagccagaggaagacctggagtactttgaatgttccaatgttcctgtgtctaccataaatcatgcgttttcatcctcagaagcaggcatagagaaggagacgtgccagaagatggaagaagacgggtccactgtgcttgggctgctggagtcctctgcagagaaggcccctgtgtcggtgtcctgtggaggtgagagccccctggatgggatctgcctcagcgaatcagacaagacagccgtgctcaccttaataagagaagagataattactaaagagattgaagcaaatgaatggaagaagaaatacgaagagacccggcaagaagttttggagatgaggaaaattgtagctgaatatgaaaagactattgctcaaatgattgaagatgaacaaaggacaagtatgacctctcagaagagcttccagcaactgaccatggagaaggaacaggccctggctgaccttaactctgtggaaaggtccctttctgatctcttcaggagatatgagaacctgaaaggtgttctggaagggttcaagaagaatgaagaagccttgaagaaatgtgctcaggattacttagccagagttaaacaagaggagcagcgataccaggccctgaaaatccacgcagaagagaaactggacaaagccaatgaagagattgctcaggttcgaacaaaagcaaaggctgagagtgcagctctccatgctggactccgcaaagagcagatgaaggtggagtccctggaaagggccctgcagcagaagaaccaagaaattgaagaactgacaaaaatctgtgatgagctgattgcaaagctgggaaagactgactgagacactccccctgttagctcaacagatctgcatttggctgcttctcttgtgaccacaattatcttgccttatccaggaataattgcccctttgcagagaaaaaaaaaaacttaaaaaaagcacatgcctactgctgcctgtcccgctttgctgccaatgcaacagccctggaagaaaccctagagggttgcatagtctagaaaggagtgtgacctgacagtgctggagcctcctagtttccccctatgaaggttcccttaggctgctgagtttgggtttgtgatttatctttagtttgttttaaagtcatctttactttcccaaatgtgttaaatttgtaactcctctttggggtcttctccaccacctgtctgatttttttgtgatctgtttaatcttttaattttttagtatcagtggttttatttaaggagacagtttggcctattgttacttccaatttataatcaagaaggggctctggatccccttttaaattacacacactctcacacacatacatgtatgtttatagatgctgctgctcttttccctgaagcatagtcaagtaagaactgctctacagaaggacatatttccttggatgtgagaccctattttgaaatagagtcctgactcagaacaccaacttaagaatttgggggattaaagatgtgaagaccacagtcttgggttttcatatctggagaagactatttgccatgacgttttgttgccctggtatttggacactcctcagctttaatgggtgtggcccctttagggttagtcctcagactaatgatagtgtctgctttctgcatgaacggcaatatgggactccctccaagctagggtttggcaagtctgccctagagtcatttactctcctctgcctccatttgttaatacagaatcaacatttagtcttcattatctttttttttttttttgagacagagtttcgatctattttaagtatgtgaagaaaatctacttgtaaaaggctcagatcttaattaaaaggtaattgtagcacattaccaattataaggtgaagaaatgtttttttcccaagtgtgatgcattgttcttcagatgttgaaaagaaagcaaaaaataccttctaacttaagacagaatttttaacaaaatgagcagtaaaagtcacatgaaccactccaaaaatcagtgcattttgcatatttttaaacaaagacagcttgttgaatactgagaagaggagtgcaaggagaaggtctgtactaacaaagccaaattcctcaagctcttactggactcagttcagagtggtgggccattaaccccaacatggaatttttccatataaatctcaatgaattccctttcatttgaataggcaaacccaaatccatgcaagtgttttaaagcactgtcctgtcttaatcttacatgctgaaagtcttcatggtgatatgcactatattcagtatacgtatgttttcctacttctcttgtaaaactgttgcatgatccaacttcagcaatgaattgtgcctagtggagaacctctatagatcttaaaaaatgaattattctttagcagtgtattactcacatgggtgcaatctttagccccagggaggtcaataatgtcttttaaagccagaagtcacattttaccaatatgcatttatcataattggtgcttaggctgtatattcaagcctgttgtcttaacattttgtataaaaaagaacaacagaaattatctgtcatttgagaagtggcttgacaatcatttgagctttgaaagcagtcactgtggtgtaatatgaatgctgtcctagtggtcatagtaccaagggcacgtgtctccccttggtataactgatttcctttttagtcctctactgctaaataagttaattttgcattttgcagaaagaaacattgattgctaaatctttttgctgctgtgttttggtgttttcatgtttacttgttttatattgatctgttttaagtatgagaggcttatagtgccctccattgtaaatccatagtcatctttttaagcttattgtgtttaagaaagtagctatgtgttaaacagaggtgatggcagcccttccctagcacactggtggaagagaccccttaagaacctgaccccagtgaatgaagctgatgcacagggagcaccaaaggaccttcgttaagtgataattgtcctggcctctcagccatgaccgttatgaggaaatatcccccattcgaacttaacagatgcctcctctccaaagagaattaaaatcgtagcttgtacagatcaagagaatatactgggcagaatgaagtatgtttgtttatttttctttaaaaataaaggattttggaactctggagagtaagaatatagtatagagtttgcctcaacacatgtgagggccaaataacctgctagctaggcagtaataaactctgttacagaagagaaaaagggccgggcacagtggcttattcctgtaatcccaacactgtggaaggccgaggcaggaggatcacttgagtccaggagtttgaaacctacctaggcaacatggtgaaaccttgtctctaccaaaataaaaattagctgggcatggtggcacgtgcctgtggtcccagctacttgggaggctgaggtgggagcctgggaggtcaaggctgcagtgagccatgatcatgccactgcactccatcctgggtgacagcaagatcttgtctcaaaaaaaaaaaaaaaaaaaaaaaaaccaggagtgaaaaaggaaagtagaaggcagctgctggcctagatgttggtttgggaatattaggtgatcctgttgagattctggatccagagcaatttctttagcttttgactttgccaaagtgtagatagcctttatccagcagtattttaagtggggaatgcaacgtgaggccaactgaacaattccccccgtggctgcccagatagtcacagtcaaggttggagagtctccttccagccagtgacctacccaaaccttttgttctgtaaaactgctctggaaataccgggaagcccagttttctcacgtggtttctagcttcttcagactcagcccaaattaggaagtgcagaagcacatgatggtgaaaaacctaggatttggcagccttccagaatggtatggaatctgagggaagatttatgtttcgttttggaggatagctcaagttgaattttctttccagccagttaccctttcaacctacccatactttgtacaactcttacacaaatacttagatatttattagatagccctgaattcactctaattataaacagggagtgtaaactgcccccagatgttcctgggctgggtaaaagcagctggagtgaagcactcattttccataaaggtaacaaagggcagctcagtggttactcaagctcaaaagggtttttttaagagcaagcattggttaagtctgtgtatactgagttggaagtgatttcagcacattcttttttagtggagtgaaagttctgaagcccccttttaacttcctcttggtttttcattataattggtagccatctcatgaactgtctctgactgttgtctctttgtggtcatgtgattgtgagcttgctttctgacttgcatttctgactttatcctgttgttaggaagatagaaactaggttttgaaagattacatgattcaagcgagggattttaaagtaaagatgtatttattctgaagaatctaaaagataacagattatttgcttatgaaagaacaatatagtctgggaatcccagaatgtcaagccaaaggtctaagaagtcatctccttcaaatactttaataaagaagtatttcgaggagatatctgtccaaaaaggtttgactggcctccagattccagttatttttaaaaagcaacttaccactaaatccttgagtctccatagagtaacagtaaagaaactgatgtaacagactctcctctcaaaggatctcctctggaagagactatcagcggcagcattctccagggaagacccatcccctagtgccagagcttgcatcctggagactaaagattgcacttttttgtagttttttgtccaaatgcaatcccatttctgtgcctcttagcatgcagttagatttggacaaacaagattcctaaggaatgactttattaactataatatggttacagctattatataaatatatattctggttatagttctaatatggagatgttgtgtgcaatgctggcctgtggtggtctgtgtaatgctttaacttgtatggaggaggccaggctcagagctgagatgtggcctgaaccttccctgtatcgatcctttaatttagaactgtcaagatgtcactttctccccctctgccttttagtggtatctgacatatactcaaaacagtaatttcctggtcacatcattaactgctaattctgtatttataaagaattttcagatggacatgtacaaatttgaactcaaaccatccccagtccagatacagggcagcgtgtaggtgaccacaccagagcctcagcctcggtccttctcagccgtcgggataggatccaggcatttcttttaaatctcagaggtagcagtaaacttttcagtattgctgttagcaagtgtgtgtttgccaatagatacccattatactaatgtgccaagtaaatgttcattgcacatctgcttccactgtgttcccacgggtgccatgaagtgtgtgaggagcccctcatctggagggatgagtgctgcgttgactactgctatcaggattgtgttgtgtggaatattcatctacataaattttatatgcacagtaatttccctttttatatgtcaagtaactatttgtaaaagttatactcacaaattattataatgattactaatatattttttccatgtttcattgcctgaataaaaactgtttaccactgtta

SEQ ID NO: 163502 - DNA, 2428 bp, Artificial Sequence
  derived and/or modified sequence
gagagatgcgaaatcagcggtagcaggtggcgcagaagggagaggggagcgaccctggggaccgactctggggaccctcgccgaagagaatcacaagaagctgatgaacagcttgtagcagaagtggttgaaaaatgttcatctaagacttgttctaaaccttcagaaaatgaagtgccacagcaggccattgactctcactcagtcaagaatttcagagaagaacctgaacatgattttagcaaaatttccatcgtgaggccattttcaatagaaacgaaggattccacggatatctcggcagtcctcggaacaaaagcagctcatggctgtgtaactgcagtctcaggcaaggctctgccttccagcccgccagacgccctccaggacgaggcgatgacagaaggcagcatgggggtcaccctcgaggcctccgcagaagctgatctaaaagctggcaactcctgtccagagcttgtgcccagcagaagaagcaagctgagaaagcccaagcctgtccccctgaggaagaaagcaattggaggagagttctcagacaccaacgctgctgtggagggcacacctctccccaaggcatcctatcacttcagtcctgaagagttggatgagaacacaagtcctttgctaggagatgccaggttccagaagtctccccctgaccttaaagaaactcccggcactctcagtagtgacaccaacgactcaggggttgagctgggggaggagtcgaggagctcacctctcaagcttgagtttgatttcacagaagatacaggaaacatagaggccaggaaagcccttccaaggaagcttggcaggaaactgggtagcacactgactcccaagatacaaaaagatggcatcagtaagtcagcaggtttagaacagcctacagacccagtggcacgagacgggcctctctcccaaacatcttccaagccagatcctagtcagtgggaaagccccagcttcaacccctttgggagccactctgttctgcagaactccccacccctctcttctgagggctcctaccactttgacccagataactttgacgaatccatggatccctttaaaccaactacgaccttaacaagcagtgacttttgttctcccactggtaatcacgttaatgaaatcttagaatcacccaagaaggcaaagtcgcgtttaataacgagtggctgtaaggtgaagaagcatgaaactcagtctctcgccctggatgcatgttctcgggatgaaggggcagtgatctcccagatttcagacatttctaatagggatggccatgctactgatgaggagaaactggcatccacgtcatgtggtcagaaatcagctggtgccgaggtgaaaggtgagccagaggaagacctggagtactttgaatgttccaatgttcctgtgtctaccataaatcatgcgttttcatcctcagaagcaggcatagagaaggagacgtgccagaagatggaagaagacgggtccactgtgcttgggctgctggagtcctctgcagagaaggcccctgtgtcggtgtcctgtggaggtgagagccccctggatgggatctgcctcagcgaatcagacaagacagccgtgctcaccttaataagagaagagataattactaaagagattgaagcaaatgaatggaagaagaaatactttaataaagaagtatttcgaggagatatctgtccaaaaaggtttggcctccagattccagttatttttaaaaagcaacttaccactaaatccttgagtctccatagagtaacagtaaagaaactgatgtaacagactctcctctcaaaggatctcctctggaagagactatcagcggcagcattctccagggaagacccatcccctagtgccagagcttgcatcctggagactaaagattgcacttttttgtagttttttgtccaaatgcaatcccatttctgtgcctcttagcatgcagttagatttggacaaacaagattcctaaggaatgactttattaactataatatggttacagctattatataaatatatattctggttatagttctaatatggagatgttgtgtgcaatgctggcctgtggtggtctgtgtaatgctttaacttgtatggaggaggccaggctcagagctgagatgtggcctgaaccttccctgtatcgatcctttaatttagaactgtcaagatgtcactttctccccctctgccttttagtggtatctgacatatactcaaaacagtaatttcctggtcacatcattaactgctaattctgtatttataaagaattttcagatggacatgtacaaatttgaactcaaaccatccccagtccagatacagggcagcgtgtaggtgaccacaccagagcctcagcctcggtcct

SEQ ID NO: 163503 - DNA, 5509 bp, Artificial Sequence
  derived and/or modified sequence
acaggatgtttctgagccaagttgaagcaaaagaaactttttccagcatgtcaggaacgaagctgacgttccattaagaaaaaaaaaaaaaaaaaaagaagtgctagaggaaggagtaagaggtgaaaaggcaccagaattcagacggagctttaaattccagacagggccagcgttgggagcacgtaggaggcgcccctcggaaaggagccggagacccagctgacttcgcacttgagctccagccccgtggacatttcctgttctgcctctggaaattcaagctgaaagttacaaaacatccttttccctggaaccaagtgcttggttgggagaccatgccctccccttccttcctcggaactcctccctgatcgccccgtggcttccccaggagagatgcgaaatcagcggtagcaggtggcgcagaagggagaggggagcgaccctggggaccgactctggggaccctcgccgaagagctcggattctgaaggtaattttgagactcctgaagctgaaaccccgatccgatcacctttcaaggagtcctgtgatccatcactcggattggcaggacctggggccaaaagccaagaatcacaagaagctgatgaacagcttgtagcagaagtggttgaaaaatgttcatctaagacttgttctaaaccttcagaaaatgaagtgccacagcaggccattgactctcactcagtcaagaatttcagagaagaacctgaacatgattttagcaaaatttccatcgtgaggccattttcaatagaaacgaaggattccacggatatctcggcagtcctcggaacaaaagcagctcatggctgtgtaactgcagtctcaggcaaggctctgccttccagcccgccagacgccctccaggacgaggcgatgacagaaggcagcatgggggtcaccctcgaggcctccgcagaagctgatctaaaagctggcaactcctgtccagagcttgtgcccagcagaagaagcaagctgagaaagcccaagcctgtccccctgaggaagaaagcaattggaggagagttctcagacaccaacgctgctgtggagggcacacctctccccaaggcatcctatcacttcagtcctgaagagttggatgagaacacaagtcctttgctaggagatgccaggttccagaagtctccccctgaccttaaagaaactcccggcactctcagtagtgacaccaacgactcaggggttgagctgggggaggagtcgaggagctcacctctcaagcttgagtttgatttcacagaagatacaggaaacatagaggccaggaaagcccttccaaggaagcttggcaggaaactgggtagcacactgactcccaagatacaaaaagatggcatcagtaagtcagcaggtttagaacagcctacagacccagtggcacgagacgggcctctctcccaaacatcttccaagccagatcctagtcagtgggaaagccccagcttcaacccctttgggagccactctgttctgcagaactccccacccctctcttctgagggctcctaccactttgacccagataactttgacgaatccatggatccctttaaaccaactacgaccttaacaagcagtgacttttgttctcccactggtaatcacgttaatgaaatcttagaatcacccaagaaggcaaagtcgcgtttaataacgagtggctgtaaggtgaagaagcatgaaactcagtctctcgccctggatgcatgttctcgggatgaaggggcagtgatctcccagatttcagacatttctaatagggatggccatgctactgatgaggagaaactggcatccacgtcatgtggtcagaaatcagctggtgccgaggtgaaaggtgagccagaggaagacctggagtactttgaatgttccaatgttcctgtgtctaccataaatcatgcgttttcatcctcagaagcaggcatagagaaggagacgtgccagaagatggaagaagacgggtccactgtgcttgggctgctggagtcctctgcagagaaggcccctgtgtcggtgtcctgtggaggtgagagccccctggatgggatctgcctcagcgaatcagacaagacagccgtgctcaccttaataagagaagagataattactaaagagattgaagcaaatgaatggaagaagaaatacgaagagacccggcaagaagttttggagatgaggaaaattgtagctgaatatgaaaagactattgctcaaatgattgaagatgaacaaaggacaagtatgacctctcagaagagcttccagcaactgaccatggagaaggaacaggccctggctgaccttaactctgtggaaaggtccctttctgatctcttcaggagatatgagaacctgaaaggtgttctggaagggttcaagaagaatgaagaagccttgaagaaatgtgctcaggattacttagccagagttaaacaagaggagcagcgataccaggccctgaaaatccacgcagaagagaaactggacaaagccaatgaagagattgctcaggttcgaacaaaagcaaaggctgagagtgcagctctccatgctggactccgcaaagagcagatgaaggtggagtccctggaaagggccctgcagcagaagaaccaagaaattgaagaactgacaaaaatctgtgatgagctgattgcaaagctgggaaagactgactgagacactccccctgttagctcaacagatctgcatttggctgcttctcttgtgaccacaattatcttgccttatccaggaataattgcccctttgcagagaaaaaaaaaaacttaaaaaaagcacatgcctactgctgcctgtcccgctttgctgccaatgcaacagccctggaagaaaccctagagggttgcatagtctagaaaggagtgtgacctgacagtgctggagcctcctagtttccccctatgaaggttcccttaggctgctgagtttgggtttgtgatttatctttagtttgttttaaagtcatctttactttcccaaatgtgttaaatttgtaactcctctttggggtcttctccaccacctgtctgatttttttgtgatctgtttaatcttttaattttttagtatcagtggttttatttaaggagacagtttggcctattgttacttccaatttataatcaagaaggggctctggatccccttttaaattacacacactctcacacacatacatgtatgtttatagatgctgctgctcttttccctgaagcatagtcaagtaagaactgctctacagaaggacatatttccttggatgtgagaccctattttgaaatagagtcctgactcagaacaccaacttaagaatttgggggattaaagatgtgaagaccacagtcttgggttttcatatctggagaagactatttgccatgacgttttgttgccctggtatttggacactcctcagctttaatgggtgtggcccctttagggttagtcctcagactaatgatagtgtctgctttctgcatgaacggcaatatgggactccctccaagctagggtttggcaagtctgccctagagtcatttactctcctctgcctccatttgttaatacagaatcaacatttagtcttcattatctttttttttttttttgagacagagtttcgatctattttaagtatgtgaagaaaatctacttgtaaaaggctcagatcttaattaaaaggtaattgtagcacattaccaattataaggtgaagaaatgtttttttcccaagtgtgatgcattgttcttcagatgttgaaaagaaagcaaaaaataccttctaacttaagacagaatttttaacaaaatgagcagtaaaagtcacatgaaccactccaaaaatcagtgcattttgcatatttttaaacaaagacagcttgttgaatactgagaagaggagtgcaaggagaaggtctgtactaacaaagccaaattcctcaagctcttactggactcagttcagagtggtgggccattaaccccaacatggaatttttccatataaatctcaatgaattccctttcatttgaataggcaaacccaaatccatgcaagtgttttaaagcactgtcctgtcttaatcttacatgctgaaagtcttcatggtgatatgcactatattcagtatacgtatgttttcctacttctcttgtaaaactgttgcatgatccaacttcagcaatgaattgtgcctagtggagaacctctatagatcttaaaaaatgaattattctttagcagtgtattactcacatgggtgcaatctttagccccagggaggtcaataatgtcttttaaagccagaagtcacattttaccaatatgcatttatcataattggtgcttaggctgtatattcaagcctgttgtcttaacattttgtataaaaaagaacaacagaaattatctgtcatttgagaagtggcttgacaatcatttgagctttgaaagcagtcactgtggtgtaatatgaatgctgtcctagtggtcatagtaccaagggcacgtgtctccccttggtataactgatttcctttttagtcctctactgctaaataagttaattttgcattttgcagaaagaaacattgattgctaaatctttttgctgctgtgttttggtgttttcatgtttacttgttttatattgatctgttttaagtatgagaggcttatagtgccctccattgtaaatccatagtcatctttttaagcttattgtgtttaagaaagtagctatgtgttaaacagaggtgatggcagcccttccctagcacactggtggaagagaccccttaagaacctgaccccagtgaatgaagctgatgcacagggagcaccaaaggaccttcgttaagtgataattgtcctggcctctcagccatgaccgttatgaggaaatatcccccattcgaacttaacagatgcctcctctccaaagagaattaaaatcgtagcttgtacagatcaagagaatatactgggcagaatgaagtatgtttgtttatttttctttaaaaataaaggattttggaactctggagagtaagaatatagtatagagtttgcctcaacacatgtgagggccaaataacctgctagctaggcagtaataaactctgttacagaagagaaaaagggccgggcacagtggcttattcctgtaatcccaacactgtggaaggccgaggcaggaggatcacttgagtccaggagtttgaaacctacctaggcaacatggtgaaaccttgtctctaccaaaataaaaattagctgggcatggtggcacgtgcctgtggtcccagctacttgggaggctgaggtgggagcctgggaggtcaaggctgcagtgagccatgatcatgccactgcactccatcctgggtgacagcaagatcttgtctcaaaaaaaaaaaaaaaaaa

SEQ ID NO: 163504 - protein, 304 aa, Artificial Sequence
  derived and/or modified sequence
MIYTMKKVHALWASVCLLLNLAPAPLNADSEEDEEHTIITDTELPPLKLMHSFCAFKADDGPCKAIMKRFFFNIFTRQCEEFIYGGCEGNQNRFESLEECKKMCTRDNANRIIKTTLQQEKPDFCFLEEDPGICRGYITRYFYNNQTKQCERFKYGGCLGNMNNFETLEECKNICEDGPNGFQVDNYGTQLNAVNNSLTPQSTKVPSLFEFHGPSWCLTPADRGLCRANENRFYYNSVIGKCRPFKYSGCGGNENNFTSKQECLRACKKGFIQRISKGGLIKTKRKRKKQRVKIAYEEIFVKNM

SEQ ID NO: 163505 - protein, 76 aa, Artificial Sequence
  derived and/or modified sequence
MIYTMKKVHALWASVCLLLNLAPAPLNADSEEDEEHTIITDTELPPLKLMHSFCAFKADDGPCKAIMKRFFFNIFT

SEQ ID NO: 163506 - protein, 61 aa, Artificial Sequence
  derived and/or modified sequence
MIYTMKKVHALWASVCLLLNLAPAPLNADSEEDEEHTIITDTELPPLKLMHSFCAFKADDG

SEQ ID NO: 163507 - protein, 288 aa, Artificial Sequence
  derived and/or modified sequence
MIYTMKKVHALWASVCLLLNLAPAPLNADSEEDEEHTIITDTELPPLKLMHSFCAFKADDGPCKAIMKRFFFNIFTRQCEEFIYGGCEGNQNRFESLEECKKMCTRDNANRIIKTTLQQEKPDFCFLEEDPGICRGYITRYFYNNQTKQCERFKYGGCLGNMNNFETLEECKNICEDGPNGFQVDNYGTQLNAVNNSLTPQSTKVPSLFEFHGPSWCLTPADRGLCRANENRFYYNSVIGKCRPFKYSGCGGNENNFTSKQECLRACKKGFIQRISKGGLIKTKRKRK

SEQ ID NO: 163508 - protein, 105 aa, Artificial Sequence
  derived and/or modified sequence
MIYTMKKVHALWASVCLLLNLAPAPLNADSEEDEEHTIITDTELPPLKLMHSFCAFKADDGPCKAIMKRFFFNIFTRQCEEFIYGGCEGNQNRFESLEECKKMCT

SEQ ID NO: 163509 - DNA, 867 bp, Artificial Sequence
  derived and/or modified sequence
atgatctacaccatgaagaaggtgcacgccctgtgggccagcgtgtgcctgctgctgaacctggcccccgcccccctgaacgccgacagcgaggaggacgaggagcacaccatcatcaccgacaccgagctgccccccctgaagctgatgcacagcttctgcgccttcaaggccgacgacggcccctgcaaggccatcatgaagagattcttcttcaacatcttcaccagacagtgcgaggagttcatctacggcggctgcgagggcaaccagaacagattcgagagcctggaggagtgcaagaagatgtgcaccagagacaacgccaacagaatcatcaagaccaccctgcagcaggagaagcccgacttctgcttcctggaggaggaccccggcatctgcagaggctacatcaccagatacttctacaacaaccagaccaagcagtgcgagagattcaagtacggcggctgcctgggcaacatgaacaacttcgagaccctggaggagtgcaagaacatctgcgaggacggccccaacggcttccaggtggacaactacggcacccagctgaacgccgtgaacaacagcctgaccccccagagcaccaaggtgcccagcctgttcgagttccacggccccagctggtgcctgacccccgccgacagaggcctgtgcagagccaacgagaacagattctactacaacagcgtgatcggcaagtgcagacccttcaagtacagcggctgcggcggcaacgagaacaacttcaccagcaagcaggagtgcctgagagcctgcaagaagggcttcatccagagaatcagcaagggcggcctgatcaagaccaagagaaagagaaagtag

SEQ ID NO: 163510 - DNA, 915 bp, Artificial Sequence
  derived and/or modified sequence
atgatctacacaatgaaaaaggtccatgccctctgggcaagcgtttgtctacttctcaacctcgcccctgcccctttgaacgccgacagcgaagaggacgaagagcataccataatcaccgacaccgagcttcctcctctcaaactgatgcatagcttttgtgcattcaaagctgatgatgggccatgcaaggctataatgaagcgctttttttttaatatctttactcggcaatgcgaggagtttatttatggaggatgcgaaggcaatcaaaatcgctttgagtcactcgaggagtgcaagaagatgtgtaccagggataatgctaaccgaatcatcaaaaccacgctgcagcaagagaagcctgatttttgtttcctggaggaagaccctggcatttgccgcgggtacattacgcgatatttctacaacaatcaaaccaaacagtgcgagaggttcaagtacggtggatgtctgggcaacatgaacaatttcgagaccctcgaggagtgcaaaaatatctgtgaagacgggccaaacgggttccaggttgacaattatggcactcagctcaacgctgtgaataactctttgaccccacaaagtactaaagtcccatccttattcgaatttcacgggccgtcctggtgcttaactcccgcagatcggggcctctgtagggccaatgagaaccgcttctactacaacagtgttataggtaagtgtcggccattcaagtactccggatgcggaggcaacgagaacaacttcacgtccaagcaagaatgtttgcgcgcctgcaagaaggggttcatacagaggatctctaagggaggactgatcaagactaaacgtaagagaaagaaacagcgcgttaagattgcgtacgaagaaatcttcgtcaaaaacatgtag

SEQ ID NO: 163511 - DNA, 915 bp, Artificial Sequence
  derived and/or modified sequence
atgatttatactatgaagaaagttcatgccctgtgggcttccgtgtgtttgctcctgaacctggcccctgcccctctgaacgctgattctgaagaggatgaagagcatacaattatcaccgacacagagcttccccctctcaagctcatgcactccttctgcgcatttaaagctgacgacggcccatgtaaagctatcatgaaaaggttcttttttaacatctttaccaggcagtgtgaggagttcatttacggagggtgcgaggggaatcagaatcggtttgaatctctggaggagtgcaaaaaaatgtgtacacgcgacaacgctaacaggattattaaaacgacccttcagcaagagaagcccgacttttgtttcctcgaggaggatccggggatctgtcgagggtacattacccggtatttttacaacaaccaaacaaaacagtgtgagcgctttaagtatggtggttgcctcggaaacatgaataacttcgagaccctggaagaatgtaagaacatttgtgaggacggtccaaatggctttcaggtcgataattacggaacacagttaaatgccgttaacaacagtctcacaccacaaagcaccaaggtgccatccttatttgagttccacgggccttcttggtgcctgactccagctgacagagggctttgtagagctaatgaaaacaggttctactacaatagcgtcatcggcaagtgccggcctttcaaatattccgggtgtggagggaatgaaaataatttcaccagtaaacaagagtgcctgagggcctgtaagaaaggctttatccagaggatctcaaagggggggctcattaagacaaagagaaaaagaaaaaagcagagagtaaaaatcgcttacgaagaaatcttcgtgaaaaacatgtag

SEQ ID NO: 163512 - DNA, 867 bp, Artificial Sequence
  derived and/or modified sequence
atgatctacacgatgaagaaggttcatgccctgtgggcatccgtgtgtctgttgttgaacctcgctcctgccccattgaatgctgattcggaggaggacgaggaacacactattatcacagataccgaactgccaccattgaaactcatgcatagtttttgtgcattcaaagccgatgacggtccctgcaaagctatcatgaaaagattcttctttaatatcttcacccggcagtgtgaggagttcatctatggcgggtgtgaaggcaatcagaaccgattcgaatccttagaagaatgtaaaaaaatgtgcacccgcgataacgctaataggattatcaagaccaccttacaacaggagaaaccggatttctgtttcttagaggaagacccaggcatatgccgtggatacatcacccggtacttttataataatcagaccaagcagtgtgagaggtttaagtatggcggctgtctgggtaacatgaataattttgaaactctggaagagtgcaagaacatctgtgaggatggacctaatggctttcaggtggacaactacgggacccaacttaatgcggtgaacaattccctgactcctcaatcaacgaaagtaccgtctctgttcgaatttcacggcccctcttggtgtctcacaccagccgaccgcggattgtgtagggccaatgaaaacagattctattataactccgtgatcggcaaatgtcgcccctttaaatattcagggtgtggaggtaatgagaacaactttacttcaaagcaagaatgcttgcgggcatgcaaaaaaggcttcatccaacgcatctctaaaggagggcttatcaaaactaagcgaaagcgtaaatag

SEQ ID NO: 163513 - DNA, 915 bp, Artificial Sequence
  derived and/or modified sequence
atgatctacaccatgaagaaggtgcacgccctgtgggcctctgtgtgcctgctgctgaacctggccccagcccccctgaatgctgacagcgaggaggatgaggagcacaccatcatcacagacacagagctgccccccctgaagctgatgcacagcttctgtgccttcaaggcagatgatggcccctgcaaggccatcatgaagcgcttcttcttcaacatcttcacccggcagtgtgaggagttcatctacggcggctgtgagggcaaccagaacagatttgagagcctggaggagtgcaagaagatgtgcacccgggacaatgccaaccgcatcatcaagaccaccctgcagcaggagaagccagacttctgcttcctggaggaggaccccggcatctgccggggctacatcacccgctacttctacaacaaccagaccaagcagtgtgagcgcttcaagtatggaggctgcctgggcaacatgaacaactttgagaccctggaggagtgcaagaacatctgtgaagatggccccaacggcttccaggtggacaactacggcacccagctgaatgctgtgaacaacagcctgaccccccagagcaccaaggtgcccagcctgtttgagttccacggccccagctggtgcctgaccccagctgaccggggcctgtgccgggccaatgaaaatcgcttctactacaacagcgtgattggaaaatgtcggcccttcaagtacagcggctgcggcggcaatgaaaacaacttcaccagcaagcaggagtgcctgcgggcctgcaagaagggcttcatccagaggatcagcaaaggaggcctcatcaagaccaagaggaagaggaagaagcagagggtgaagatcgcctatgaggagatctttgtgaagaacatgtag

SEQ ID NO: 163514 - DNA, 867 bp, Artificial Sequence
  derived and/or modified sequence
atgatctacaccatgaagaaggtgcacgccctgtgggcctctgtgtgcctgctgctgaacctggccccagcccccctgaatgctgacagcgaggaggatgaggagcacaccatcatcacagacacagagctgccccccctgaagctgatgcacagcttctgtgccttcaaggcagatgatggcccctgcaaggccatcatgaagcgcttcttcttcaacatcttcacccggcagtgtgaggagttcatctacggcggctgtgagggcaaccagaacagatttgagagcctggaggagtgcaagaagatgtgcacccgggacaatgccaaccgcatcatcaagaccaccctgcagcaggagaagccagacttctgcttcctggaggaggaccccggcatctgccggggctacatcacccgctacttctacaacaaccagaccaagcagtgtgagcgcttcaagtatggaggctgcctgggcaacatgaacaactttgagaccctggaggagtgcaagaacatctgtgaagatggccccaacggcttccaggtggacaactacggcacccagctgaatgctgtgaacaacagcctgaccccccagagcaccaaggtgcccagcctgtttgagttccacggccccagctggtgcctgaccccagctgaccggggcctgtgccgggccaatgaaaatcgcttctactacaacagcgtgattggaaaatgtcggcccttcaagtacagcggctgcggcggcaatgaaaacaacttcaccagcaagcaggagtgcctgcgggcctgcaagaagggcttcatccagaggatcagcaaaggaggcctcatcaagaccaagaggaagaggaagtag

SEQ ID NO: 163515 - DNA, 915 bp, Artificial Sequence
  derived and/or modified sequence
atgatctacaccatgaagaaggtgcacgccctgtgggccagcgtgtgcctccttctgaatctggctcctgctccgctgaatgctgactctgaggaggacgaagaacatacaataataacagatacggagctgcctcccctgaagctgatgcacagcttttgcgcctttaaggccgatgacggcccatgcaaagccattatgaagagattcttcttcaacatcttcacacggcagtgtgaggaatttatttatggaggctgtgaaggaaatcagaacagatttgagagcctggaggagtgtaaaaagatgtgcacccgcgacaacgctaatagaattatcaagaccaccctgcagcaggagaaacccgacttctgttttctggaagaagatcctggaatctgccgggggtacatcacccgatatttctataataaccaaacaaaacagtgcgagaggtttaagtacgggggatgtctcggaaatatgaacaatttcgagaccttggaggaatgcaagaacatttgtgaggacggtccaaacggttttcaggtggacaactatggaacacaattgaacgcagtgaataatagcctgactccccagtctaccaaagtcccttccctttttgagtttcatggaccttcgtggtgccttaccccagctgacagagggttgtgccgggctaacgagaatcggttctactataactccgtgattggcaagtgcagaccattcaaatactccggctgcgggggcaacgaaaacaacttcacatcaaaacaggagtgccttcgggcctgcaagaagggctttattcagaggatctccaagggcggtcttatcaagaccaaaaggaagcggaagaagcagcgcgttaagatagcctacgaggaaatttttgtgaagaacatgtag

SEQ ID NO: 163516 - DNA, 915 bp, Artificial Sequence
  derived and/or modified sequence
atgatctacaccatgaagaaggtgcacgccctgtgggccagcgtgtgcctcttactgaatctggccccagctcctttgaatgcagattccgaagaggacgaggagcacaccatcattacagacacagagttaccccctctgaagctgatgcactctttctgtgctttcaaggccgatgacggaccttgcaaggcgatcatgaaaaggtttttttttaatatatttacaagacagtgcgaggagttcatctatggtgggtgcgaaggaaaccaaaatcggtttgagtctttagaggagtgtaagaagatgtgtacccgcgacaatgccaatcggattattaagactaccttgcagcaggagaaacctgatttctgtttccttgaagaggaccccggaatctgcaggggctacattacacggtacttctacaataatcagacaaaacagtgtgagaggttcaagtatgggggatgtctcggtaatatgaataactttgagactctcgaggaatgtaaaaacatttgcgaggatgggcctaatggctttcaggtagataactacggcacacagcttaatgcggtgaataattccttgaccccgcagtcaacaaaagtgccgagcctgttcgaatttcatggtccctcctggtgcctaacacccgctgatcgggggctctgccgggccaatgaaaatcgtttttactacaatagtgtaatcggcaagtgccggcctttcaaatattccgggtgtggagggaatgagaataattttacgagcaagcaggaatgcttacgagcatgcaagaaggggttcattcagaggataagcaaggggggacttatcaaaaccaagcgcaagcgtaagaagcagcgagtgaaaattgcctatgaggagattttcgtgaagaacatgtag

SEQ ID NO: 163517 - DNA, 867 bp, Artificial Sequence
  derived and/or modified sequence
atgatctacaccatgaagaaggtgcacgccctgtgggccagcgtgtgtctcctactcaatctagcccctgccccccttaacgctgacagcgaggaggatgaggaacatacaattatcactgacactgagcttccacccctgaaactaatgcatagtttctgcgcttttaaggctgacgatggcccctgcaaggcgattatgaagagatttttcttcaacatcttcacccggcagtgcgaggaattcatttacggcgggtgcgagggtaatcaaaatcgatttgagagtttggaggaatgcaagaagatgtgcacacgcgacaacgctaataggattattaaaaccacccttcagcaggagaaaccggacttttgtttcctggaggaggatccgggaatctgcaggggctatatcacaaggtatttttacaataaccagactaaacagtgcgagcggttcaagtacggaggttgtctgggcaatatgaacaatttcgaaactttggaggaatgcaagaacatttgcgaagatggccccaatggctttcaagttgataattacgggacacagctcaacgcagtgaacaactctctgacaccacagtccaccaaggttccgtctctattcgagtttcatgggccatcttggtgtctgacacccgcagatcgaggtctgtgtagggctaacgagaaccgtttttattacaattcagtgattggcaagtgtcggcccttcaaatacagtggatgtggaggtaatgaaaataactttacatccaaacaggaatgcttaagggcatgcaaaaagggattcattcagcgaatatcaaaaggagggctgattaagaccaagcggaaacgtaagtag

SEQ ID NO: 163518 - DNA, 915 bp, Artificial Sequence
  derived and/or modified sequence
atgatctacaccatgaagaaggtccatgctctatgggcatcagtttgtctcctgttgaatctggccccagcacccctgaatgctgacagtgaagaggatgaagagcatactattataacagacaccgaattaccgcctctgaaactgatgcacagcttctgtgccttcaaagccgatgatggcccttgcaaggccatcatgaagagattctttttcaacatctttacaagacaatgtgaggaattcatctacgggggatgcgagggcaaccagaacaggtttgaatctcttgaagagtgcaagaaaatgtgtacgcgagacaacgcaaatcgcatcatcaaaacaactctgcagcaggagaaacctgatttctgctttctcgaagaagatccgggaatttgccgcggatacattaccaggtatttctataacaaccagactaaacagtgcgagcggtttaaatatggtggctgcctggggaatatgaataacttcgaaaccctcgaagagtgtaagaacatttgcgaggacgggccaaatggcttccaagtcgataactacggcacccagctgaacgcagtcaataattcgctgaccccccagtcaactaaggtgccgagtctgttcgaatttcacggcccatcctggtgcttaacccctgcggaccgcggattgtgtagggctaacgaaaatcgtttttattacaattctgtgattggaaagtgcaggccctttaagtactcaggatgcgggggtaacgaaaacaacttcacgtcaaagcaagaatgcctgcgggcttgtaagaaggggttcatccaaaggattagtaaagggggtctaatcaaaacaaagaggaagcgcaaaaagcagcgcgtcaaaatcgcctatgaggaaatcttcgtcaagaacatgtag

SEQ ID NO: 163519 - DNA, 915 bp, Artificial Sequence
  derived and/or modified sequence
atgatttacactatgaagaaggtccacgcgctctgggccagcgtgtgcctgctgttgaatttggcccctgccccactcaacgcggattctgaggaagatgaagaacacacaattatcacagatactgagttgccgccacttaaacttatgcactccttctgtgccttcaaagccgatgacggcccttgcaaagccatcatgaaaagattcttctttaacattttcacccggcagtgcgaagaattcatttacgggggatgtgaaggcaatcagaatcggtttgaatctttggaagagtgtaagaagatgtgcaccagggataacgcgaatagaatcattaaaactacactccagcaggaaaagccagatttttgttttctcgaggaagacccaggaatatgccggggatacatcacacggtatttctataataaccagacaaaacagtgcgagcgctttaaatatggcggatgcttggggaacatgaataattttgaaactcttgaggaatgcaagaatatttgcgaggatggaccaaatggttttcaggtggacaattacggcactcagcttaacgccgtaaacaattcacttacaccacagtcaaccaaggtgccatccctctttgagtttcacgggccatcatggtgtcttactccagccgatcgcggactctgtcgggctaacgagaaccggttctattacaactccgtgatcgggaaatgcagaccctttaagtattctgggtgtggagggaatgagaataattttacctcaaaacaagagtgtctgcgagcgtgcaaaaaagggttcatccagcgcatctctaagggcggactcatcaaaaccaaacgtaaacgtaagaagcaaagagtgaagatcgcttatgaagagatattcgtcaagaatatgtag

SEQ ID NO: 163520 - DNA, 867 bp, Artificial Sequence
  derived and/or modified sequence
atgatatatacaatgaaaaaggtgcatgcattgtgggctagcgtctgcctgctattgaatttagcgcctgctccattaaatgcagatagcgaagaggacgaggaacacaccattatcacggacaccgaactcccacctcttaaacttatgcactccttttgtgctttcaaggcagacgatggaccctgcaaggccatcatgaagaggttctttttcaatatctttaccaggcagtgtgaggaatttatctacgggggttgtgagggcaatcagaacaggttcgagagcctcgaggagtgcaaaaaaatgtgcacccgtgacaatgcgaatcgtatcatcaagactacactgcagcaggagaagccagacttttgttttttagaggaggaccccggaatttgtcgcggttatattacccgttacttttacaacaatcaaacgaaacagtgcgaacgcttcaaatacggcggatgccttggtaacatgaataactttgagactctggaggagtgtaaaaacatctgtgaagacggcccaaacggtttccaagtggacaattacggaacacagctaaatgccgtcaacaattccttaacacctcagtcaaccaaggtgccttccctgttcgaatttcacggacctagctggtgtctcacacctgctgacagggggctctgtcgggcaaatgagaatcgcttttactataactcagttataggcaaatgcaggccttttaagtactctggctgtggaggaaacgaaaacaatttcactagtaagcaagaatgcctcagagcatgcaaaaaaggattcattcagcggatctctaaggggggtctaatcaaaacgaagcgcaagcgcaagtag

SEQ ID NO: 163521 - DNA, 3913 bp, Artificial Sequence
  derived and/or modified sequence
attcccaactgccagtgatctctgaagccgactctgaggctccctctttgctctaacagacagcagcgactttaggctggataatagtcaaattcttacctcgctctttcactgctagtaagatcagattgcgtttctttcagttactcttcaatcgccagtttcttgatctgcttctaaaagaagaagtagagaagataaatcctgtcttcaatacctggaaggaaaaacaaaataacctcaactccgttttgaaaaaaacattccaagaactttcatcagagattttacttagatgatttacacaatgaagaaagtacatgcactttgggcttctgtatgcctgctgcttaatcttgcccctgcccctcttaatgctgattctgaggaagatgaagaacacacaattatcacagatacggagttgccaccactgaaacttatgcattcattttgtgcattcaaggcggatgatggcccatgtaaagcaatcatgaaaagatttttcttcaatattttcactcgacagtgcgaagaatttatatatgggggatgtgaaggaaatcagaatcgatttgaaagtctggaagagtgcaaaaaaatgtgtacaagagataatgcaaacaggattataaagacaacattgcaacaagaaaagccagatttctgctttttggaagaagatcctggaatatgtcgaggttatattaccaggtatttttataacaatcagacaaaacagtgtgaacgtttcaagtatggtggatgcctgggcaatatgaacaattttgagacactggaagaatgcaagaacatttgtgaagatggtccgaatggtttccaggtggataattatggaacccagctcaatgctgtgaataactccctgactccgcaatcaaccaaggttcccagcctttttgaatttcacggtccctcatggtgtctcactccagcagacagaggattgtgtcgtgccaatgagaacagattctactacaattcagtcattgggaaatgccgcccatttaagtacagtggatgtgggggaaatgaaaacaattttacttccaaacaagaatgtctgagggcatgtaaaaaaggtttcatccaaagaatatcaaaaggaggcctaattaaaaccaaaagaaaaagaaagaagcagagagtgaaaatagcatatgaagaaatttttgttaaaaatatgtgaatttgttatagcaatgtaacattaattctactaaatattttatatgaaatgtttcactatgattttctatttttcttctaaaatgcttttaattaatatgttcattaaattttctatgcttattgtacttgttatcaacacgtttgtatcagagttgcttttctaatcttgttaaattgcttattctaggtctgtaatttattaactggctactgggaaattacttattttctggatctatctgtattttcatttaactacaaattatcatactaccggctacatcaaatcagtcctttgattccatttggtgaccatctgtttgagaatatgatcatgtaaatgattatctcctttatagcctgtaaccagattaaggaatacagctcttaaaaaatcaagaacttcctgagtttcacatataaaatggtgacaaacacctgcttctgataaagtttatccaattttgtatttatagtattctattgtaataatagaattctattatgtgcttccctccttagacatagtttttctccttttgtactaaccagtacttccatctatattgagctaaactgtctttgaacagtcaactctgcatcatgtgcctgcctgatttggattggtttcacttttttttttgtttgaccatagcccattctatcagtcaagatgactgaataattgtgtgttaaatacaactcatgataaggagaacctttatggaaacaagaagttttatggcaatcgagagggaattatttatatgtacttcttaatactatgcttcccaatattttttcttactaaaaataacaaaaatatttaaaccttctgaaatctattcagttatcattaggatttgcacacaatgcaactaataattcatgctttaaaaagtaggttatttctgttgaagagaaaattatcagcagggaagagtctactagaaaattcatgtgctagtcattcttggggatttaatattttgctggagttaattcactatatccagacctgtatctttcatttattgctgagccatgtgcagtctggcatctcaacaacctcaacaacctcaacaacctccaagacatgtcagtttctgtagtgttcacctcaaatctgacactggaattggaactgatttagaaacaaccatttcattcatttggtatgactagcttcatgactagcttcatgaatagcttcatgaatagcttcatgacttctcgctaacaatgatagtataattctgcctgttcttcaggattgaaattttgaactcaatttagatttcctgttttccctcatataccacatctaaacagtctccaaatctttatgcttttttttttttttttcgaaaaagttcacccaatccctaggctttttacttttttctttttcttttcttttttcttgtttttttttttttttcattttgttttgttttgttatgtttttttagacagggtcccactctgtcacccaggctggagtgcagtggtgcaatcacaggacactgaaacctcccacctagctgggactagaggtgcaggccaccacaccagctaatttatgtaatttttgtagagacgagtttcaccacgttacctaggcttgtcttgaacacctgggctcaagcaatcttccagccccagcctcccaaagtgctgggattacaggtataaaccacaatgcccccgtttttactctttactgcatccttcccatcagtattaattcctcagaaatttagtacattcctccaccatttcaaaatgctcccagaactcacactagttggtacttaactacaaccttcaacctcaccatttaattttgatgtatgtttttggatttaccaacagtactttctttcatgactactttgatttagttaagaatgctcactgtacactgaatgttaattactcagctaattcacactgatttcctgtttaaaaatatgatcccctccaggccattcatgtgaagtcagggtacagctgatgccagctacagaatcactatgtttcaatatggaatatgaaaagtcctaacacataattgcaaatcattttctactatggtatacaaattttatcattacaaaatagtatcagcttttttcacttaaggaaaataatacatcttcattcaaatattcagtgcataaataattgccttaaattgagtctttgctgtggaatttgagagttttggaaatcaaaggcccttgtgaaacatttcctgttgccatttatttatagatagcaatagcttcaaatgagtgggaaagtctacttaggtgaagtggtaaatagtcactaagattgtataaatagcgcattgatgagttgcctaattgttttctccaacaataaccactggtccattggttcactacttactcaagaaagacatatactgagatggcttgaaatgtttaatgcatgtgaacgttatttttaccgtgttttggaaaaagatcttgatgttattgtcttcctttattttccacaattaagtgcatctaactgtgaattgtatatggaattacattattcagcatatacatatatttacctgctttgttcattctctgtattcaaaattaacagatcatgctgaaaaccactcaaacgattatattttttacattataagaagtaaaatatattattctgaataatg

SEQ ID NO: 163522 - DNA, 3649 bp, Artificial Sequence
  derived and/or modified sequence
gcagtctcagcggttagcagcacaagagatgatttacacaatgaagaaagtacatgcactttgggcttctgtatgcctgctgcttaatcttgcccctgcccctcttaatgctgattctgaggaagatgaagaacacacaattatcacagatacggagttgccaccactgaaacttatgcattcattttgtgcattcaaggcggatgatggcccatgtaaagcaatcatgaaaagatttttcttcaatattttcactcgacagtgcgaagaatttatatatgggggatgtgaaggaaatcagaatcgatttgaaagtctggaagagtgcaaaaaaatgtgtacaagagataatgcaaacaggattataaagacaacattgcaacaagaaaagccagatttctgctttttggaagaagatcctggaatatgtcgaggttatattaccaggtatttttataacaatcagacaaaacagtgtgaacgtttcaagtatggtggatgcctgggcaatatgaacaattttgagacactggaagaatgcaagaacatttgtgaagatggtccgaatggtttccaggtggataattatggaacccagctcaatgctgtgaataactccctgactccgcaatcaaccaaggttcccagcctttttgaatttcacggtccctcatggtgtctcactccagcagacagaggattgtgtcgtgccaatgagaacagattctactacaattcagtcattgggaaatgccgcccatttaagtacagtggatgtgggggaaatgaaaacaattttacttccaaacaagaatgtctgagggcatgtaaaaaaggtttcatccaaagaatatcaaaaggaggcctaattaaaaccaaaagaaaaagaaagaagcagagagtgaaaatagcatatgaagaaatttttgttaaaaatatgtgaatttgttatagcaatgtaacattaattctactaaatattttatatgaaatgtttcactatgattttctatttttcttctaaaatgcttttaattaatatgttcattaaattttctatgcttattgtacttgttatcaacacgtttgtatcagagttgcttttctaatcttgttaaattgcttattctaggtctgtaatttattaactggctactgggaaattacttattttctggatctatctgtattttcatttaactacaaattatcatactaccggctacatcaaatcagtcctttgattccatttggtgaccatctgtttgagaatatgatcatgtaaatgattatctcctttatagcctgtaaccagattaaggaatacagctcttaaaaaatcaagaacttcctgagtttcacatataaaatggtgacaaacacctgcttctgataaagtttatccaattttgtatttatagtattctattgtaataatagaattctattatgtgcttccctccttagacatagtttttctccttttgtactaaccagtacttccatctatattgagctaaactgtctttgaacagtcaactctgcatcatgtgcctgcctgatttggattggtttcacttttttttttgtttgaccatagcccattctatcagtcaagatgactgaataattgtgtgttaaatacaactcatgataaggagaacctttatggaaacaagaagttttatggcaatcgagagggaattatttatatgtacttcttaatactatgcttcccaatattttttcttactaaaaataacaaaaatatttaaaccttctgaaatctattcagttatcattaggatttgcacacaatgcaactaataattcatgctttaaaaagtaggttatttctgttgaagagaaaattatcagcagggaagagtctactagaaaattcatgtgctagtcattcttggggatttaatattttgctggagttaattcactatatccagacctgtatctttcatttattgctgagccatgtgcagtctggcatctcaacaacctcaacaacctcaacaacctccaagacatgtcagtttctgtagtgttcacctcaaatctgacactggaattggaactgatttagaaacaaccatttcattcatttggtatgactagcttcatgactagcttcatgaatagcttcatgaatagcttcatgacttctcgctaacaatgatagtataattctgcctgttcttcaggattgaaattttgaactcaatttagatttcctgttttccctcatataccacatctaaacagtctccaaatctttatgcttttttttttttttttcgaaaaagttcacccaatccctaggctttttacttttttctttttcttttcttttttcttgtttttttttttttttcattttgttttgttttgttatgtttttttagacagggtcccactctgtcacccaggctggagtgcagtggtgcaatcacaggacactgaaacctcccacctagctgggactagaggtgcaggccaccacaccagctaatttatgtaatttttgtagagacgagtttcaccacgttacctaggcttgtcttgaacacctgggctcaagcaatcttccagccccagcctcccaaagtgctgggattacaggtataaaccacaatgcccccgtttttactctttactgcatccttcccatcagtattaattcctcagaaatttagtacattcctccaccatttcaaaatgctcccagaactcacactagttggtacttaactacaaccttcaacctcaccatttaattttgatgtatgtttttggatttaccaacagtactttctttcatgactactttgatttagttaagaatgctcactgtacactgaatgttaattactcagctaattcacactgatttcctgtttaaaaatatgatcccctccaggccattcatgtgaagtcagggtacagctgatgccagctacagaatcactatgtttcaatatggaatatgaaaagtcctaacacataattgcaaatcattttctactatggtatacaaattttatcattacaaaatagtatcagcttttttcacttaaggaaaataatacatcttcattcaaatattcagtgcataaataattgccttaaattgagtctttgctgtggaatttgagagttttggaaatcaaaggcccttgtgaaacatttcctgttgccatttatttatagatagcaatagcttcaaatgagtgggaaagtctacttaggtgaagtggtaaatagtcactaagattgtataaatagcgcattgatgagttgcctaattgttttctccaacaataaccactggtccattggttcactacttactcaagaaagacatatactgagatggcttgaaatgtttaatgcatgtgaacgttatttttaccgtgttttggaaaaagatcttgatgttattgtcttcctttattttccacaattaagtgcatctaactgtgaattgtatatggaattacattattcagcatatacatatatttacctgctttgttcattctctgtattcaaaattaacagatcatgctgaaaaccactcaaacgattatattttttacattataagaagtaaaatatattattctgaataatgaaa

SEQ ID NO: 163523 - DNA, 1161 bp, Artificial Sequence
  derived and/or modified sequence
attcccaactgccagtgatctctgaagccgactctgaggctccctctttgctctaacagacagcagcgactttaggctggataatagtcaaattcttacctcgctctttcactgctagtaagatcagattgcgtttctttcagttactcttcaatcgccagtttcttgatctgcttctaaaagaagaagtagagaagataaatcctgtcttcaatacctggaaggaaaaacaaaataacctcaactccgttttgaaaaaaacattccaagaactttcatcagagattttacttagatgatttacacaatgaagaaagtacatgcactttgggcttctgtatgcctgctgcttaatcttgcccctgcccctcttaatgctgattctgaggaagatgaagaacacacaattatcacagatacggagttgccaccactgaaacttatgcattcattttgtgcattcaaggcggatgatggcccatgtaaagcaatcatgaaaagatttttcttcaatattttcactcgacagtgcgaagaatttatatatgggggatgtgaaggaaatcagaatcgatttgaaagtctggaagagtgcaaaaaaatgtgtacaagagataatgcaaacaggattataaagacaacattgcaacaagaaaagccagatttctgctttttggaagaagatcctggaatatgtcgaggttatattaccaggtatttttataacaatcagacaaaacagtgtgaacgtttcaagtatggtggatgcctgggcaatatgaacaattttgagacactggaagaatgcaagaacatttgtgaagatggtccgaatggtttccaggtggataattatggaacccagctcaatgctgtgaataactccctgactccgcaatcaaccaaggttcccagcctttttgaatttcacggtccctcatggtgtctcactccagcagacagaggattgtgtcgtgccaatgagaacagattctactacaattcagtcattgggaaatgccgcccatttaagtacagtggatgtgggggaaatgaaaacaattttacttccaaacaagaatgtctgagggcatgtaaaaaaggtttcatccaaagaatatcaaaaggaggcctaattaaaaccaaaagaaaaagaaagaa

SEQ ID NO: 163524 - DNA, 915 bp, Artificial Sequence
  derived and/or modified sequence
atgatctacaccatgaagaaggtgcacgccctgtgggccagcgtgtgcctgctgctgaacctggcccccgcccccctgaacgccgacagcgaggaggacgaggagcacaccatcatcaccgacaccgagctgccccccctgaagctgatgcacagcttctgcgccttcaaggccgacgacggcccctgcaaggccatcatgaagagattcttcttcaacatcttcaccagacagtgcgaggagttcatctacggcggctgcgagggcaaccagaacagattcgagagcctggaggagtgcaagaagatgtgcaccagagacaacgccaacagaatcatcaagaccaccctgcagcaggagaagcccgacttctgcttcctggaggaggaccccggcatctgcagaggctacatcaccagatacttctacaacaaccagaccaagcagtgcgagagattcaagtacggcggctgcctgggcaacatgaacaacttcgagaccctggaggagtgcaagaacatctgcgaggacggccccaacggcttccaggtggacaactacggcacccagctgaacgccgtgaacaacagcctgaccccccagagcaccaaggtgcccagcctgttcgagttccacggccccagctggtgcctgacccccgccgacagaggcctgtgcagagccaacgagaacagattctactacaacagcgtgatcggcaagtgcagacccttcaagtacagcggctgcggcggcaacgagaacaacttcaccagcaagcaggagtgcctgagagcctgcaagaagggcttcatccagagaatcagcaagggcggcctgatcaagaccaagagaaagagaaagaagcagagagtgaagatcgcctacgaggagatcttcgtgaagaacatgtag

SEQ ID NO: 163525 - protein, 2541 aa, Artificial Sequence
  derived and/or modified sequence
MVALSLKISIGNVVKTMQFEPSTMVYDACRIIRERIPEAPAGPPSDFGLFLSDDDPKKGIWLEAGKALDYYMLRNGDTMEYRKKQRPLKIRMLDGTVKTIMVDDSKTVTDMLMTICARIGITNHDEYSLVRELMEEKKEEITGTLRKDKTLLRDEKKMEKLKQKLHTDDELNWLDHGRTLREQGVEEHETLLLRRKFFYSDQNVDSRDPVQLNLLYVQARDDILNGSHPVSFDKACEFAGFQCQIQFGPHNEQKHKAGFLDLKDFLPKEYVKQKGERKIFQAHKNCGQMSEIEAKVRYVKLARSLKTYGVSFFLVKEKMKGKNKLVPRLLGITKECVMRVDEKTKEVIQEWNLTNIKRWAASPKSFTLDFGDYQDGYYSVQTTEGEQIAQLIAGYIDIILKKKKSKDHFGLEGDEESTMLEDSVSPKKSTVLQQQYNRVGKVEHGSVALPAIMRSGASGPENFQVGSMPPAQQQITSGQMHRGHMPPLTSAQQALTGTINSSMQAVQAAQATLDDFDTLPPLGQDAASKAWRKNKMDESKHEIHSQVDAITAGTASVVNLTAGDPAETDYTAVGCAVTTISSNLTEMSRGVKLLAALLEDEGGSGRPLLQAAKGLAGAVSELLRSAQPASAEPRQNLLQAAGNVGQASGELLQQIGESDTDPHFQDALMQLAKAVASAAAALVLKAKSVAQRTEDSGLQTQVIAAATQCALSTSQLVACTKVVAPTISSPVCQEQLVEAGRLVAKAVEGCVSASQAATEDGQLLRGVGAAATAVTQALNELLQHVKAHATGAGPAGRYDQATDTILTVTENIFSSMGDAGEMVRQARILAQATSDLVNAIKADAEGESDLENSRKLLSAAKILADATAKMVEAAKGAAAHPDSEEQQQRLREAAEGLRMATNAAAQNAIKKKLVQRLEHAAKQAAASATQTIAAAQHAASTPKASAGPQPLLVQSCKAVAEQIPLLVQGVRGSQAQPDSPSAQLALIAASQSFLQPGGKMVAAAKASVPTIQDQASAMQLSQCAKNLGTALAELRTAAQKAQEACGPLEMDSALSVVQNLEKDLQEVKAAARDGKLKPLPGETMEKCTQDLGNSTKAVSSAIAQLLGEVAQGNENYAGIAARDVAGGLRSLAQAARGVAALTSDPAVQAIVLDTASDVLDKASSLIEEAKKAAGHPGDPESQQRLAQVAKAVTQALNRCVSCLPGQRDVDNALRAVGDASKRLLSDSLPPSTGTFQEAQSRLNEAAAGLNQAATELVQASRGTPQDLARASGRFGQDFSTFLEAGVEMAGQAPSQEDRAQVVSNLKGISMSSSKLLLAAKALSTDPAAPNLKSQLAAAARAVTDSINQLITMCTQQAPGQKECDNALRELETVRELLENPVQPINDMSYFGCLDSVMENSKVLGEAMTGISQNAKNGNLPEFGDAISTASKALCGFTEAAAQAAYLVGVSDPNSQAGQQGLVEPTQFARANQAIQMACQSLGEPGCTQAQVLSAATIVAKHTSALCNSCRLASARTTNPTAKRQFVQSAKEVANSTANLVKTIKALDGAFTEENRAQCRAATAPLLEAVDNLSAFASNPEFSSIPAQISPEGRAAMEPIVISAKTMLESAGGLIQTARALAVNPRDPPSWSVLAGHSRTVSDSIKKLITSMRDKAPGQLECETAIAALNSCLRDLDQASLAAVSQQLAPREGISQEALHTQMLTAVQEISHLIEPLANAARAEASQLGHKVSQMAQYFEPLTLAAVGAASKTLSHPQQMALLDQTKTLAESALQLLYTAKEAGGNPKQAAHTQEALEEAVQMMTEAVEDLTTTLNEAASAAGVVGGMVDSITQAINQLDEGPMGEPEGSFVDYQTTMVRTAKAIAVTVQEMVTKSNTSPEELGPLANQLTSDYGRLASEAKPAAVAAENEEIGSHIKHRVQELGHGCAALVTKAGALQCSPSDAYTKKELIECARRVSEKVSHVLAALQAGNRGTQACITAASAVSGIIADLDTTIMFATAGTLNREGTETFADHREGILKTAKVLVEDTKVLVQNAAGSQEKLAQAAQSSVATITRLADVVKLGAASLGAEDPETQVVLINAVKDVAKALGDLISATKAAAGKVGDDPAVWQLKNSAKVMVTNVTSLLKTVKAVEDEATKGTRALEATTEHIRQELAVFCSPEPPAKTSTPEDFIRMTKGITMATAKAVAAGNSCRQEDVIATANLSRRAIADMLRACKEAAYHPEVAPDVRLRALHYGRECANGYLELLDHVLLTLQKPSPELKQQLTGHSKRVAGSVTELIQAAEAMKGTEWVDPEDPTVIAENELLGAAAAIEAAAKKLEQLKPRAKPKEADESLNFEEQILEAAKSIAAATSALVKAASAAQRELVAQGKVGAIPANALDDGQWSQGLISAARMVAAATNNLCEAANAAVQGHASQEKLISSAKQVAASTAQLLVACKVKADQDSEAMKRLQAAGNAVKRASDNLVKAAQKAAAFEEQENETVVVKEKMVGGIAQIIAAQEEMLRKERELEEARKKLAQIRQQQYKFLPSELRDEH

SEQ ID NO: 163526 - protein, 2429 aa, Artificial Sequence
  derived and/or modified sequence
MVALSLKISIGNVVKTMQFEPSTMVYDACRIIRERIPEAPAGPPSDFGLFLSDDDPKKGIWLEAGKALDYYMLRNGDTMEYRKKQRPLKIRMLDGTVKTIMVDDSKTVTDMLMTICARIGITNHDEYSLVRELMEEKKEEITGTLRKDKTLLRDEKKMEKLKQKLHTDDELNWLDHGRTLREQGVEEHETLLLRRKFFYSDQNVDSRDPVQLNLLYVQARDDILNGSHPVSFDKACEFAGFQCQIQFGPHNEQKHKAGFLDLKDFLPKEYVKQKGERKIFQAHKNCGQMSEIEAKVRYVKLARSLKTYGVSFFLVKEKMKGKNKLVPRLLGITKECVMRVDEKTKEVIQEWNLTNIKRWAASPKSFTLDFGDYQDGYYSVQTTEGEQIAQLIAGYIDIILKKKKSKDHFGLEGDEESTMLEDSVSPKKSTVLQQQYNRVGKVEHGSVALPAIMRSGASGPENFQVGSMPPAQQQITSGQMHRGHMPPLTSAQQALTGTINSSMQAVQAAQATLDDFDTLPPLGQDAASKAWRKNKMDESKHEIHSQVDAITAGTASVVNLTAGDPAETDYTAVGCAVTTISSNLTEMSRGVKLLAALLEDEGGSGRPLLQAAKGLAGAVSELLRSAQPASAEPRQNLLQAAGNVGQASGELLQQIGESDTDPHFQDALMQLAKAVASAAAALVLKAKSVAQRTEDSGLQTQVIAAATQCALSTSQLVACTKVVAPTISSPVCQEQLVEAGRLVAKAVEGCVSASQAATEDGQLLRGVGAAATAVTQALNELLQHVKAHATGAGPAGRYDQATDTILTVTENIFSSMGDAGEMVRQARILAQATSDLVNAIKADAEGESDLENSRKLLSAAKILADATAKMVEAAKGAAAHPDSEEQQQRLREAAEGLRMATNAAAQNAIKKKLVQRLEHAAKQAAASATQTIAAAQHAASTPKASAGPQPLLVQSCKAVAEQIPLLVQGVRGSQAQPDSPSAQLALIAASQSFLQPGGKMVAAAKASVPTIQDQASAMQLSQCAKNLGTALAELRTAAQKAQEACGPLEMDSALSVVQNLEKDLQEVKAAARDGKLKPLPGETMEKCTQDLGNSTKAVSSAIAQLLGEVAQGNENYAGIAARDVAGGLRSLAQAARGVAALTSDPAVQAIVLDTASDVLDKASSLIEEAKKAAGHPGDPESQQRLAQVAKAVTQALNRCVSCLPGQRDVDNALRAVGDASKRLLSDSLPPSTGTFQEAQSRLNEAAAGLNQAATELVQASRGTPQDLARASGRFGQDFSTFLEAGVEMAGQAPSQEDRAQVVSNLKGISMSSSKLLLAAKALSTDPAAPNLKSQLAAAARAVTDSINQLITMCTQQAPGQKECDNALRELETVRELLENPVQPINDMSYFGCLDSVMENSKVLGEAMTGISQNAKNGNLPEFGDAISTASKALCGFTEAAAQAAYLVGVSDPNSQAGQQGLVEPTQFARANQAIQMACQSLGEPGCTQAQVLSAATIVAKHTSALCNSCRLASARTTNPTAKRQFVQSAKEVANSTANLVKTIKALDGAFTEENRAQCRAATAPLLEAVDNLSAFASNPEFSSIPAQISPEGRAAMEPIVISAKTMLESAGGLIQTARALAVNPRDPPSWSVLAGHSRTVSDSIKKLITSMRDKAPGQLECETAIAALNSCLRDLDQASLAAVSQQLAPLQEISHLIEPLANAARAEASQLGHKVSQMAQYFEPLTLAAVGAASKTLSHPQQMALLDQTKTLAESALQLLYTAKEAGGNPKLDEGPMGEPEGSFVDYQTTMVRTAKAIAVTVQEMIGSHIKHRVQELGHGCAALVTKAGALQCSPSDAYTKKELIECARRVSEKVSHVLAALQAGNRGTQACITAASAVSGIIADLDTTIMFATAGTLNREGTETFADHREGILKTAKVLVEDTKVLVQNAAGSQEKLAQAAQSSVATITRLADVVKLGAASLGAEDPETQVVLINAVKDVAKALGDLISATKAAAGKVGDDPAVWQLKNSAKVMVTNVTSLLKTVKAVEDEATKGTRALEATTEHIRQELAPPAKTSTPEDFIRMTKGITMATAKAVAAGNSCRQEDVIATANLSRRAIADMLRACKEAAYHPEVAPDVRLRALHYGRECANGYLELLDHVLLTLQKPSPELKQQLTGHSKRVAGSVTELIQAAEAMKGTEWVDPEDPTVIAENELLGAAAAIEAAAKKLEQLKPRAKPKEADESLNFEEQILEAAKSIAAATSALVKAASAAQRELVAQGKVGAIPANALDDGQWSQGLISAARMVAAATNNLCEAANAAVQGHASQEKLISSAKQVAASTAQLLVACKVKADQDSEAMKRLQAAGNAVKRASDNLVKAAQKAAAFEEQENETVVVKEKMVGGIAQIIAAQEEMLRKERELEEARKKLAQIRQQQYKFLPSELRDEH

SEQ ID NO: 163527 - DNA, 7626 bp, Artificial Sequence
  derived and/or modified sequence
atggtggccctgagcctgaagatcagcatcggcaacgtggtgaagaccatgcagttcgagcccagcaccatggtgtacgacgcctgcagaatcatcagagagagaatccccgaggcccccgccggcccccccagcgacttcggcctgttcctgagcgacgacgaccccaagaagggcatctggctggaggccggcaaggccctggactactacatgctgagaaacggcgacaccatggagtacagaaagaagcagagacccctgaagatcagaatgctggacggcaccgtgaagaccatcatggtggacgacagcaagaccgtgaccgacatgctgatgaccatctgcgccagaatcggcatcaccaaccacgacgagtacagcctggtgagagagctgatggaggagaagaaggaggagatcaccggcaccctgagaaaggacaagaccctgctgagagacgagaagaagatggagaagctgaagcagaagctgcacaccgacgacgagctgaactggctggaccacggcagaaccctgagagagcagggcgtggaggagcacgagaccctgctgctgagaagaaagttcttctacagcgaccagaacgtggacagcagagaccccgtgcagctgaacctgctgtacgtgcaggccagagacgacatcctgaacggcagccaccccgtgagcttcgacaaggcctgcgagttcgccggcttccagtgccagatccagttcggcccccacaacgagcagaagcacaaggccggcttcctggacctgaaggacttcctgcccaaggagtacgtgaagcagaagggcgagagaaagatcttccaggcccacaagaactgcggccagatgagcgagatcgaggccaaggtgagatacgtgaagctggccagaagcctgaagacctacggcgtgagcttcttcctggtgaaggagaagatgaagggcaagaacaagctggtgcccagactgctgggcatcaccaaggagtgcgtgatgagagtggacgagaagaccaaggaggtgatccaggagtggaacctgaccaacatcaagagatgggccgccagccccaagagcttcaccctggacttcggcgactaccaggacggctactacagcgtgcagaccaccgagggcgagcagatcgcccagctgatcgccggctacatcgacatcatcctgaagaagaagaagagcaaggaccacttcggcctggagggcgacgaggagagcaccatgctggaggacagcgtgagccccaagaagagcaccgtgctgcagcagcagtacaacagagtgggcaaggtggagcacggcagcgtggccctgcccgccatcatgagaagcggcgccagcggccccgagaacttccaggtgggcagcatgccccccgcccagcagcagatcaccagcggccagatgcacagaggccacatgccccccctgaccagcgcccagcaggccctgaccggcaccatcaacagcagcatgcaggccgtgcaggccgcccaggccaccctggacgacttcgacaccctgccccccctgggccaggacgccgccagcaaggcctggagaaagaacaagatggacgagagcaagcacgagatccacagccaggtggacgccatcaccgccggcaccgccagcgtggtgaacctgaccgccggcgaccccgccgagaccgactacaccgccgtgggctgcgccgtgaccaccatcagcagcaacctgaccgagatgagcagaggcgtgaagctgctggccgccctgctggaggacgagggcggcagcggcagacccctgctgcaggccgccaagggcctggccggcgccgtgagcgagctgctgagaagcgcccagcccgccagcgccgagcccagacagaacctgctgcaggccgccggcaacgtgggccaggccagcggcgagctgctgcagcagatcggcgagagcgacaccgacccccacttccaggacgccctgatgcagctggccaaggccgtggccagcgccgccgccgccctggtgctgaaggccaagagcgtggcccagagaaccgaggacagcggcctgcagacccaggtgatcgccgccgccacccagtgcgccctgagcaccagccagctggtggcctgcaccaaggtggtggcccccaccatcagcagccccgtgtgccaggagcagctggtggaggccggcagactggtggccaaggccgtggagggctgcgtgagcgccagccaggccgccaccgaggacggccagctgctgagaggcgtgggcgccgccgccaccgccgtgacccaggccctgaacgagctgctgcagcacgtgaaggcccacgccaccggcgccggccccgccggcagatacgaccaggccaccgacaccatcctgaccgtgaccgagaacatcttcagcagcatgggcgacgccggcgagatggtgagacaggccagaatcctggcccaggccaccagcgacctggtgaacgccatcaaggccgacgccgagggcgagagcgacctggagaacagcagaaagctgctgagcgccgccaagatcctggccgacgccaccgccaagatggtggaggccgccaagggcgccgccgcccaccccgacagcgaggagcagcagcagagactgagagaggccgccgagggcctgagaatggccaccaacgccgccgcccagaacgccatcaagaagaagctggtgcagagactggagcacgccgccaagcaggccgccgccagcgccacccagaccatcgccgccgcccagcacgccgccagcacccccaaggccagcgccggcccccagcccctgctggtgcagagctgcaaggccgtggccgagcagatccccctgctggtgcagggcgtgagaggcagccaggcccagcccgacagccccagcgcccagctggccctgatcgccgccagccagagcttcctgcagcccggcggcaagatggtggccgccgccaaggccagcgtgcccaccatccaggaccaggccagcgccatgcagctgagccagtgcgccaagaacctgggcaccgccctggccgagctgagaaccgccgcccagaaggcccaggaggcctgcggccccctggagatggacagcgccctgagcgtggtgcagaacctggagaaggacctgcaggaggtgaaggccgccgccagagacggcaagctgaagcccctgcccggcgagaccatggagaagtgcacccaggacctgggcaacagcaccaaggccgtgagcagcgccatcgcccagctgctgggcgaggtggcccagggcaacgagaactacgccggcatcgccgccagagacgtggccggcggcctgagaagcctggcccaggccgccagaggcgtggccgccctgaccagcgaccccgccgtgcaggccatcgtgctggacaccgccagcgacgtgctggacaaggccagcagcctgatcgaggaggccaagaaggccgccggccaccccggcgaccccgagagccagcagagactggcccaggtggccaaggccgtgacccaggccctgaacagatgcgtgagctgcctgcccggccagagagacgtggacaacgccctgagagccgtgggcgacgccagcaagagactgctgagcgacagcctgccccccagcaccggcaccttccaggaggcccagagcagactgaacgaggccgccgccggcctgaaccaggccgccaccgagctggtgcaggccagcagaggcaccccccaggacctggccagagccagcggcagattcggccaggacttcagcaccttcctggaggccggcgtggagatggccggccaggcccccagccaggaggacagagcccaggtggtgagcaacctgaagggcatcagcatgagcagcagcaagctgctgctggccgccaaggccctgagcaccgaccccgccgcccccaacctgaagagccagctggccgccgccgccagagccgtgaccgacagcatcaaccagctgatcaccatgtgcacccagcaggcccccggccagaaggagtgcgacaacgccctgagagagctggagaccgtgagagagctgctggagaaccccgtgcagcccatcaacgacatgagctacttcggctgcctggacagcgtgatggagaacagcaaggtgctgggcgaggccatgaccggcatcagccagaacgccaagaacggcaacctgcccgagttcggcgacgccatcagcaccgccagcaaggccctgtgcggcttcaccgaggccgccgcccaggccgcctacctggtgggcgtgagcgaccccaacagccaggccggccagcagggcctggtggagcccacccagttcgccagagccaaccaggccatccagatggcctgccagagcctgggcgagcccggctgcacccaggcccaggtgctgagcgccgccaccatcgtggccaagcacaccagcgccctgtgcaacagctgcagactggccagcgccagaaccaccaaccccaccgccaagagacagttcgtgcagagcgccaaggaggtggccaacagcaccgccaacctggtgaagaccatcaaggccctggacggcgccttcaccgaggagaacagagcccagtgcagagccgccaccgcccccctgctggaggccgtggacaacctgagcgccttcgccagcaaccccgagttcagcagcatccccgcccagatcagccccgagggcagagccgccatggagcccatcgtgatcagcgccaagaccatgctggagagcgccggcggcctgatccagaccgccagagccctggccgtgaaccccagagacccccccagctggagcgtgctggccggccacagcagaaccgtgagcgacagcatcaagaagctgatcaccagcatgagagacaaggcccccggccagctggagtgcgagaccgccatcgccgccctgaacagctgcctgagagacctggaccaggccagcctggccgccgtgagccagcagctggcccccagagagggcatcagccaggaggccctgcacacccagatgctgaccgccgtgcaggagatcagccacctgatcgagcccctggccaacgccgccagagccgaggccagccagctgggccacaaggtgagccagatggcccagtacttcgagcccctgaccctggccgccgtgggcgccgccagcaagaccctgagccacccccagcagatggccctgctggaccagaccaagaccctggccgagagcgccctgcagctgctgtacaccgccaaggaggccggcggcaaccccaagcaggccgcccacacccaggaggccctggaggaggccgtgcagatgatgaccgaggccgtggaggacctgaccaccaccctgaacgaggccgccagcgccgccggcgtggtgggcggcatggtggacagcatcacccaggccatcaaccagctggacgagggccccatgggcgagcccgagggcagcttcgtggactaccagaccaccatggtgagaaccgccaaggccatcgccgtgaccgtgcaggagatggtgaccaagagcaacaccagccccgaggagctgggccccctggccaaccagctgaccagcgactacggcagactggccagcgaggccaagcccgccgccgtggccgccgagaacgaggagatcggcagccacatcaagcacagagtgcaggagctgggccacggctgcgccgccctggtgaccaaggccggcgccctgcagtgcagccccagcgacgcctacaccaagaaggagctgatcgagtgcgccagaagagtgagcgagaaggtgagccacgtgctggccgccctgcaggccggcaacagaggcacccaggcctgcatcaccgccgccagcgccgtgagcggcatcatcgccgacctggacaccaccatcatgttcgccaccgccggcaccctgaacagagagggcaccgagaccttcgccgaccacagagagggcatcctgaagaccgccaaggtgctggtggaggacaccaaggtgctggtgcagaacgccgccggcagccaggagaagctggcccaggccgcccagagcagcgtggccaccatcaccagactggccgacgtggtgaagctgggcgccgccagcctgggcgccgaggaccccgagacccaggtggtgctgatcaacgccgtgaaggacgtggccaaggccctgggcgacctgatcagcgccaccaaggccgccgccggcaaggtgggcgacgaccccgccgtgtggcagctgaagaacagcgccaaggtgatggtgaccaacgtgaccagcctgctgaagaccgtgaaggccgtggaggacgaggccaccaagggcaccagagccctggaggccaccaccgagcacatcagacaggagctggccgtgttctgcagccccgagccccccgccaagaccagcacccccgaggacttcatcagaatgaccaagggcatcaccatggccaccgccaaggccgtggccgccggcaacagctgcagacaggaggacgtgatcgccaccgccaacctgagcagaagagccatcgccgacatgctgagagcctgcaaggaggccgcctaccaccccgaggtggcccccgacgtgagactgagagccctgcactacggcagagagtgcgccaacggctacctggagctgctggaccacgtgctgctgaccctgcagaagcccagccccgagctgaagcagcagctgaccggccacagcaagagagtggccggcagcgtgaccgagctgatccaggccgccgaggccatgaagggcaccgagtgggtggaccccgaggaccccaccgtgatcgccgagaacgagctgctgggcgccgccgccgccatcgaggccgccgccaagaagctggagcagctgaagcccagagccaagcccaaggaggccgacgagagcctgaacttcgaggagcagatcctggaggccgccaagagcatcgccgccgccaccagcgccctggtgaaggccgccagcgccgcccagagagagctggtggcccagggcaaggtgggcgccatccccgccaacgccctggacgacggccagtggagccagggcctgatcagcgccgccagaatggtggccgccgccaccaacaacctgtgcgaggccgccaacgccgccgtgcagggccacgccagccaggagaagctgatcagcagcgccaagcaggtggccgccagcaccgcccagctgctggtggcctgcaaggtgaaggccgaccaggacagcgaggccatgaagagactgcaggccgccggcaacgccgtgaagagagccagcgacaacctggtgaaggccgcccagaaggccgccgccttcgaggagcaggagaacgagaccgtggtggtgaaggagaagatggtgggcggcatcgcccagatcatcgccgcccaggaggagatgctgagaaaggagagagagctggaggaggccagaaagaagctggcccagatcagacagcagcagtacaagttcctgcccagcgagctgagagacgagcactag

SEQ ID NO: 163528 - DNA, 7290 bp, Artificial Sequence
  derived and/or modified sequence
atggtggccctgagcctgaagatcagcatcggcaacgtggtgaagaccatgcagttcgagcccagcaccatggtgtacgacgcctgcagaatcatcagagagagaatccccgaggcccccgccggcccccccagcgacttcggcctgttcctgagcgacgacgaccccaagaagggcatctggctggaggccggcaaggccctggactactacatgctgagaaacggcgacaccatggagtacagaaagaagcagagacccctgaagatcagaatgctggacggcaccgtgaagaccatcatggtggacgacagcaagaccgtgaccgacatgctgatgaccatctgcgccagaatcggcatcaccaaccacgacgagtacagcctggtgagagagctgatggaggagaagaaggaggagatcaccggcaccctgagaaaggacaagaccctgctgagagacgagaagaagatggagaagctgaagcagaagctgcacaccgacgacgagctgaactggctggaccacggcagaaccctgagagagcagggcgtggaggagcacgagaccctgctgctgagaagaaagttcttctacagcgaccagaacgtggacagcagagaccccgtgcagctgaacctgctgtacgtgcaggccagagacgacatcctgaacggcagccaccccgtgagcttcgacaaggcctgcgagttcgccggcttccagtgccagatccagttcggcccccacaacgagcagaagcacaaggccggcttcctggacctgaaggacttcctgcccaaggagtacgtgaagcagaagggcgagagaaagatcttccaggcccacaagaactgcggccagatgagcgagatcgaggccaaggtgagatacgtgaagctggccagaagcctgaagacctacggcgtgagcttcttcctggtgaaggagaagatgaagggcaagaacaagctggtgcccagactgctgggcatcaccaaggagtgcgtgatgagagtggacgagaagaccaaggaggtgatccaggagtggaacctgaccaacatcaagagatgggccgccagccccaagagcttcaccctggacttcggcgactaccaggacggctactacagcgtgcagaccaccgagggcgagcagatcgcccagctgatcgccggctacatcgacatcatcctgaagaagaagaagagcaaggaccacttcggcctggagggcgacgaggagagcaccatgctggaggacagcgtgagccccaagaagagcaccgtgctgcagcagcagtacaacagagtgggcaaggtggagcacggcagcgtggccctgcccgccatcatgagaagcggcgccagcggccccgagaacttccaggtgggcagcatgccccccgcccagcagcagatcaccagcggccagatgcacagaggccacatgccccccctgaccagcgcccagcaggccctgaccggcaccatcaacagcagcatgcaggccgtgcaggccgcccaggccaccctggacgacttcgacaccctgccccccctgggccaggacgccgccagcaaggcctggagaaagaacaagatggacgagagcaagcacgagatccacagccaggtggacgccatcaccgccggcaccgccagcgtggtgaacctgaccgccggcgaccccgccgagaccgactacaccgccgtgggctgcgccgtgaccaccatcagcagcaacctgaccgagatgagcagaggcgtgaagctgctggccgccctgctggaggacgagggcggcagcggcagacccctgctgcaggccgccaagggcctggccggcgccgtgagcgagctgctgagaagcgcccagcccgccagcgccgagcccagacagaacctgctgcaggccgccggcaacgtgggccaggccagcggcgagctgctgcagcagatcggcgagagcgacaccgacccccacttccaggacgccctgatgcagctggccaaggccgtggccagcgccgccgccgccctggtgctgaaggccaagagcgtggcccagagaaccgaggacagcggcctgcagacccaggtgatcgccgccgccacccagtgcgccctgagcaccagccagctggtggcctgcaccaaggtggtggcccccaccatcagcagccccgtgtgccaggagcagctggtggaggccggcagactggtggccaaggccgtggagggctgcgtgagcgccagccaggccgccaccgaggacggccagctgctgagaggcgtgggcgccgccgccaccgccgtgacccaggccctgaacgagctgctgcagcacgtgaaggcccacgccaccggcgccggccccgccggcagatacgaccaggccaccgacaccatcctgaccgtgaccgagaacatcttcagcagcatgggcgacgccggcgagatggtgagacaggccagaatcctggcccaggccaccagcgacctggtgaacgccatcaaggccgacgccgagggcgagagcgacctggagaacagcagaaagctgctgagcgccgccaagatcctggccgacgccaccgccaagatggtggaggccgccaagggcgccgccgcccaccccgacagcgaggagcagcagcagagactgagagaggccgccgagggcctgagaatggccaccaacgccgccgcccagaacgccatcaagaagaagctggtgcagagactggagcacgccgccaagcaggccgccgccagcgccacccagaccatcgccgccgcccagcacgccgccagcacccccaaggccagcgccggcccccagcccctgctggtgcagagctgcaaggccgtggccgagcagatccccctgctggtgcagggcgtgagaggcagccaggcccagcccgacagccccagcgcccagctggccctgatcgccgccagccagagcttcctgcagcccggcggcaagatggtggccgccgccaaggccagcgtgcccaccatccaggaccaggccagcgccatgcagctgagccagtgcgccaagaacctgggcaccgccctggccgagctgagaaccgccgcccagaaggcccaggaggcctgcggccccctggagatggacagcgccctgagcgtggtgcagaacctggagaaggacctgcaggaggtgaaggccgccgccagagacggcaagctgaagcccctgcccggcgagaccatggagaagtgcacccaggacctgggcaacagcaccaaggccgtgagcagcgccatcgcccagctgctgggcgaggtggcccagggcaacgagaactacgccggcatcgccgccagagacgtggccggcggcctgagaagcctggcccaggccgccagaggcgtggccgccctgaccagcgaccccgccgtgcaggccatcgtgctggacaccgccagcgacgtgctggacaaggccagcagcctgatcgaggaggccaagaaggccgccggccaccccggcgaccccgagagccagcagagactggcccaggtggccaaggccgtgacccaggccctgaacagatgcgtgagctgcctgcccggccagagagacgtggacaacgccctgagagccgtgggcgacgccagcaagagactgctgagcgacagcctgccccccagcaccggcaccttccaggaggcccagagcagactgaacgaggccgccgccggcctgaaccaggccgccaccgagctggtgcaggccagcagaggcaccccccaggacctggccagagccagcggcagattcggccaggacttcagcaccttcctggaggccggcgtggagatggccggccaggcccccagccaggaggacagagcccaggtggtgagcaacctgaagggcatcagcatgagcagcagcaagctgctgctggccgccaaggccctgagcaccgaccccgccgcccccaacctgaagagccagctggccgccgccgccagagccgtgaccgacagcatcaaccagctgatcaccatgtgcacccagcaggcccccggccagaaggagtgcgacaacgccctgagagagctggagaccgtgagagagctgctggagaaccccgtgcagcccatcaacgacatgagctacttcggctgcctggacagcgtgatggagaacagcaaggtgctgggcgaggccatgaccggcatcagccagaacgccaagaacggcaacctgcccgagttcggcgacgccatcagcaccgccagcaaggccctgtgcggcttcaccgaggccgccgcccaggccgcctacctggtgggcgtgagcgaccccaacagccaggccggccagcagggcctggtggagcccacccagttcgccagagccaaccaggccatccagatggcctgccagagcctgggcgagcccggctgcacccaggcccaggtgctgagcgccgccaccatcgtggccaagcacaccagcgccctgtgcaacagctgcagactggccagcgccagaaccaccaaccccaccgccaagagacagttcgtgcagagcgccaaggaggtggccaacagcaccgccaacctggtgaagaccatcaaggccctggacggcgccttcaccgaggagaacagagcccagtgcagagccgccaccgcccccctgctggaggccgtggacaacctgagcgccttcgccagcaaccccgagttcagcagcatccccgcccagatcagccccgagggcagagccgccatggagcccatcgtgatcagcgccaagaccatgctggagagcgccggcggcctgatccagaccgccagagccctggccgtgaaccccagagacccccccagctggagcgtgctggccggccacagcagaaccgtgagcgacagcatcaagaagctgatcaccagcatgagagacaaggcccccggccagctggagtgcgagaccgccatcgccgccctgaacagctgcctgagagacctggaccaggccagcctggccgccgtgagccagcagctggcccccctgcaggagatcagccacctgatcgagcccctggccaacgccgccagagccgaggccagccagctgggccacaaggtgagccagatggcccagtacttcgagcccctgaccctggccgccgtgggcgccgccagcaagaccctgagccacccccagcagatggccctgctggaccagaccaagaccctggccgagagcgccctgcagctgctgtacaccgccaaggaggccggcggcaaccccaagctggacgagggccccatgggcgagcccgagggcagcttcgtggactaccagaccaccatggtgagaaccgccaaggccatcgccgtgaccgtgcaggagatgatcggcagccacatcaagcacagagtgcaggagctgggccacggctgcgccgccctggtgaccaaggccggcgccctgcagtgcagccccagcgacgcctacaccaagaaggagctgatcgagtgcgccagaagagtgagcgagaaggtgagccacgtgctggccgccctgcaggccggcaacagaggcacccaggcctgcatcaccgccgccagcgccgtgagcggcatcatcgccgacctggacaccaccatcatgttcgccaccgccggcaccctgaacagagagggcaccgagaccttcgccgaccacagagagggcatcctgaagaccgccaaggtgctggtggaggacaccaaggtgctggtgcagaacgccgccggcagccaggagaagctggcccaggccgcccagagcagcgtggccaccatcaccagactggccgacgtggtgaagctgggcgccgccagcctgggcgccgaggaccccgagacccaggtggtgctgatcaacgccgtgaaggacgtggccaaggccctgggcgacctgatcagcgccaccaaggccgccgccggcaaggtgggcgacgaccccgccgtgtggcagctgaagaacagcgccaaggtgatggtgaccaacgtgaccagcctgctgaagaccgtgaaggccgtggaggacgaggccaccaagggcaccagagccctggaggccaccaccgagcacatcagacaggagctggccccccccgccaagaccagcacccccgaggacttcatcagaatgaccaagggcatcaccatggccaccgccaaggccgtggccgccggcaacagctgcagacaggaggacgtgatcgccaccgccaacctgagcagaagagccatcgccgacatgctgagagcctgcaaggaggccgcctaccaccccgaggtggcccccgacgtgagactgagagccctgcactacggcagagagtgcgccaacggctacctggagctgctggaccacgtgctgctgaccctgcagaagcccagccccgagctgaagcagcagctgaccggccacagcaagagagtggccggcagcgtgaccgagctgatccaggccgccgaggccatgaagggcaccgagtgggtggaccccgaggaccccaccgtgatcgccgagaacgagctgctgggcgccgccgccgccatcgaggccgccgccaagaagctggagcagctgaagcccagagccaagcccaaggaggccgacgagagcctgaacttcgaggagcagatcctggaggccgccaagagcatcgccgccgccaccagcgccctggtgaaggccgccagcgccgcccagagagagctggtggcccagggcaaggtgggcgccatccccgccaacgccctggacgacggccagtggagccagggcctgatcagcgccgccagaatggtggccgccgccaccaacaacctgtgcgaggccgccaacgccgccgtgcagggccacgccagccaggagaagctgatcagcagcgccaagcaggtggccgccagcaccgcccagctgctggtggcctgcaaggtgaaggccgaccaggacagcgaggccatgaagagactgcaggccgccggcaacgccgtgaagagagccagcgacaacctggtgaaggccgcccagaaggccgccgccttcgaggagcaggagaacgagaccgtggtggtgaaggagaagatggtgggcggcatcgcccagatcatcgccgcccaggaggagatgctgagaaaggagagagagctggaggaggccagaaagaagctggcccagatcagacagcagcagtacaagttcctgcccagcgagctgagagacgagcactag

SEQ ID NO: 163529 - DNA, 7626 bp, Artificial Sequence
  derived and/or modified sequence
atggtggctcttagtttaaagatcagcatcgggaacgttgtcaagactatgcagtttgaaccttctaccatggtgtacgatgcctgtcgcatcatccgggaaagaattccagaggcccctgccggcccaccttcggatttcgggttatttctctctgatgatgatccgaaaaagggcatctggctggaggccggcaaagccctcgattactacatgttgaggaatggcgacaccatggagtatcgaaaaaagcagaggccccttaagattcgaatgctagacggcactgtcaaaactatcatggtggacgattcaaagaccgtaacagatatgctcatgaccatctgcgccagaatcgggattaccaatcacgacgagtactctctggtgagggaactgatggaagaaaaaaaagaggaaatcaccggaacccttagaaaagacaagaccttactgagggatgagaaaaaaatggagaagctgaaacagaaactccataccgatgacgagctgaattggctggatcacggcagaacgctgcgggaacagggggtggaagagcacgaaaccctgcttctacggcgtaagtttttttattctgaccaaaacgtggacagccgagatccagtgcagttgaatctgttatatgtgcaggcgcgcgatgatatcttaaatggaagccaccccgtcagctttgataaggcttgcgagtttgccggttttcaatgtcagattcagttcggacctcataacgagcagaagcacaaggcagggtttttggacctgaaggacttcctcccaaaagagtacgtcaagcagaaaggtgagcggaaaatcttccaggctcacaagaactgcgggcagatgtccgaaattgaggccaaagtccgatacgtaaagctggctcgatccctcaagacttatggggtcagcttctttttggtaaaggagaagatgaagggaaaaaataaactcgtgcctagactgcttggcatcaccaaagagtgtgtcatgcgggtggatgagaagacaaaagaagttatccaggagtggaacctcaccaacatcaagagatgggccgcgtcacccaagagcttcaccctcgactttggtgactaccaggacgggtactattccgtccagacgactgaaggggagcagattgctcaacttattgcaggttatatcgatattatcctgaaaaagaaaaagtccaaggaccatttcggtctagagggcgatgaggagtctaccatgctggaagattccgtgtcgccgaaaaagagtacagttctccagcagcagtacaatcgggtaggcaaagttgaacacggtagtgtcgctctgcctgccatcatgcgctctggcgcctccggacctgagaactttcaggtaggaagcatgcctcctgctcagcagcagatcacaagcgggcaaatgcacaggggtcacatgccaccgctcacatcagctcagcaagcccttaccgggactataaattcctctatgcaggccgtgcaggccgcacaggctactcttgatgatttcgacaccctaccgcccctcggccaggatgcggcgagcaaggcctggagaaaaaataaaatggacgagagcaagcacgagatccacagccaggtcgatgctatcacggccggcacggcttccgtagtgaatctgactgccggggaccccgctgaaacagattacacagcagtggggtgcgccgtgaccaccatttctagtaatttaactgaaatgtcgcgcggcgtgaagctgctggcagccctgttagaagacgaggggggctccggtcgcccgttgctccaggccgccaagggtctggccggtgccgtatccgagctgttacgatccgcacagcccgctagcgcggagcccaggcagaacctcctccaggccgccggcaatgtggggcaagcctccggcgaactgttgcagcagatcggcgagagtgacacagatcctcacttccaggacgccctgatgcaactggccaaggccgtggcgagcgctgccgcggcactggtgctcaaggccaaaagcgtggcccagagaacagaggattcaggcctgcagacacaggtgatcgcagctgctactcaatgtgcactctctacatctcagctcgtcgcctgcactaaggtcgtggcaccgacaatctcttcgccagtgtgccaagagcaactggtcgaggctggaagactcgtggcgaaggcagtcgaaggctgcgtttccgcttcacaggcagccactgaggacggtcaacttctaaggggcgtgggcgccgctgctaccgctgtgactcaggcattaaatgagcttctccagcacgtcaaggcacacgccaccggtgccggaccagccggacggtatgatcaggcgactgacaccattctgacagtgacagagaacatcttctcatccatgggggatgctggagaaatggtgcgacaggcaaggatactagctcaggctaccagtgacctggtaaatgcgatcaaagcggatgccgaaggggaaagcgatctggaaaatagcaggaaactgttgtctgctgctaaaatcctggcggacgccaccgcgaaaatggtcgaggccgctaagggcgccgctgcacaccctgattcggaagaacaacaacagcgtttgagggaagccgcggagggtctgcggatggcaactaatgctgcagcacagaacgcgatcaaaaagaaactggtgcaaagactggagcacgccgcaaagcaggcagctgcctccgctactcagaccatcgctgccgcgcagcacgctgcctccactccaaaggcctcagccggcccccagcccctcctagtgcaaagctgcaaggccgtggcagaacagatcccgctgcttgtgcagggcgttcgcggctctcaggctcagccagacagcccctcagcccaattagccctcattgctgcttcacagtcctttctgcagcccggaggcaagatggtggcagcggctaaggcaagtgtcccaacaattcaggaccaggccagtgccatgcagctctctcagtgtgctaagaacctcggaactgctctcgcagagttacgtaccgctgcccagaaagcccaagaagcgtgtggacctctcgagatggactccgcactgagcgtcgtgcagaacctcgagaaggacctgcaggaggtcaaggcggccgctagagacggaaagcttaaacccctcccgggagaaactatggagaagtgtacgcaggatctgggcaactcaacaaaggcggttagcagcgcgatcgcccaactactgggagaagtagctcaggggaatgagaactacgccggaatcgcagctagagacgtggccggaggattgcgctctctggcccaggccgcccgaggcgtggctgccctcaccagcgacccagccgttcaggccatcgtcctcgacaccgcttccgacgtcctggacaaagcttcaagcctgatcgaagaggctaaaaaagcggccggccaccccggcgatcccgagagtcagcagcgactggctcaagtggctaaagccgtcacacaggccttgaacagatgcgtctcttgcctcccaggccaacgggatgtagacaatgcgctgagagcggtcggagacgctagcaagagattactcagcgattcattacctcctagcactggtaccttccaggaggctcaaagcagactgaacgaggccgccgccggcctcaaccaagccgccactgaacttgtccaggcttcaagagggacaccacaagacctcgctcgcgcatccggtcgcttcgggcaggactttagcacatttttggaggctggagtggagatggctggtcaggctccctcccaggaggatagagcccaagtcgtgtccaatcttaaggggatctccatgtccagcagcaagctgctgcttgctgcaaaggcgctatccaccgaccccgcggcaccaaatctcaaatcccagcttgccgctgccgctcgcgcagtgacggatagcattaaccaactcattactatgtgcactcagcaggccccgggccaaaaagaatgtgataatgcactgcgcgagcttgagacagtcagagagctgctggaaaaccccgtacaacccattaatgatatgtcttattttggttgtttggactccgtcatggaaaacagcaaagtgctgggggaggcaatgaccggaatcagccaaaacgcaaaaaacggcaatcttccagaatttggtgacgccatctcaaccgcctcaaaggccctatgcggattcaccgaggcagccgcacaggcagcttacctggttggggtaagtgatcctaactcccaggcagggcagcagggactcgtagagccaacacagttcgctcgcgcaaatcaggcgatccaaatggcatgtcaatctctgggtgagcctgggtgcactcaggcccaggtgctatccgctgccacgattgttgctaagcacacttccgccctttgtaacagctgcagactcgcgtctgcaagaacaacgaacccgaccgccaagcggcagttcgtgcagagcgccaaagaggtggcaaattccactgccaatctcgtcaagacgattaaggccctggacggggcctttactgaagagaatagagcacagtgcagagccgccacagcaccattgttggaggcggttgataacctgtctgctttcgcaagcaatcctgaatttagttccatacctgctcagatttctccagagggcagggcagcaatggagcccatagtcatcagcgccaagacgatgctggaaagtgccggaggtttgattcagacggcaagagcactggctgttaacccacgcgaccccccttcatggtccgtgctagccggtcactccaggaccgtgagcgacagcattaaaaagcttataacctctatgcgggacaaggcacccggccagctggaatgcgagacagccatagccgctttgaacagctgtctcagagaccttgatcaagcgtccctagccgccgtgagccaacagttggcccctcgcgaagggatctctcaggaggccctccatacacagatgctcacagctgttcaagagataagccacctgatcgagcccctggctaacgcagctagagccgaagcctcccaactgggccacaaagtgagccagatggcgcagtatttcgaacccctcacactggctgcggtcggagctgccagcaaaaccttgtcccaccctcaacagatggcccttctggaccagaccaaaacactggcagagagtgccttgcagctgctctataccgccaaggaagcaggcggaaatcccaagcaggcagctcacactcaggaggcccttgaggaagccgtccagatgatgactgaagcagttgaagacctgacaaccacactcaatgaggcggctagtgctgcaggcgtcgtcggcggcatggttgactccattacacaggccataaatcagttggacgagggacccatgggggagcctgaaggcagtttcgtggattaccaaaccactatggtcagaaccgccaaggctatcgcggtgacggtgcaggaaatggtgacaaaatctaatacctctcctgaggagctcggccccctggctaatcagctgacttccgattacggaagactcgcatcagaggccaaacccgctgctgttgcagctgaaaacgaggagattggctcccacatcaagcaccgcgtgcaggagttagggcatgggtgcgctgctcttgtgactaaagcaggcgccctccagtgcagcccgtctgacgcttatacgaagaaggagctgattgagtgtgctcgtcgagtgtccgagaaggtgtctcatgtgctagccgccctccaagcaggaaatcgcggtactcaggcctgcatcacagcggctagtgccgtgagtgggattatcgctgacctggacactaccataatgttcgccaccgctgggaccctcaaccgtgaggggaccgaaacatttgccgaccatcgagagggaattctgaaaactgctaaggtgttggttgaggatacaaaagtgctggttcagaacgcggcaggctcccaggagaaactcgctcaagcagcacagagctctgtcgctacaattacccgattagcagatgtagttaaattgggcgctgcaagtctaggtgccgaggaccccgagacgcaggttgtgctcataaatgcagtaaaagatgtggccaaagccctgggggacctgatatctgcaaccaaggcagcggctggcaaagttggcgacgatccggctgtttggcaactcaaaaacagtgcaaaggtgatggtgacaaacgtaactagtcttctgaagaccgtgaaagcagtcgaggatgaagccactaaaggcacaagagccctggaggctaccacagaacacatcaggcaggagctggccgtcttctgttcccctgagccaccagccaagaccagcacgcccgaggacttcattaggatgaccaaaggcattaccatggccacagccaaggctgtcgctgcgggcaactcctgtcgccaagaggacgtaattgccacggctaacctgtcacgacgggctattgccgatatgctccgagcctgtaaagaagcagcgtaccaccctgaagtcgccccagacgtgaggctgcgcgcacttcactacggtcgagagtgcgccaacggctacctggaactgctcgatcatgtgctccttactctgcagaaacccagcccagaactcaaacaacagctgacaggccacagcaagagggtggcaggttcggtgaccgagctgatccaggctgcggaagccatgaaagggaccgaatgggtggatcctgaggaccccacagtgattgccgaaaatgagctcctgggagccgcagccgccatcgaggctgctgctaagaaactcgagcaactcaaaccacgggccaaacctaaagaagcagatgaaagcttgaacttcgaggagcagattctagaggctgctaagagcattgcagcggccaccagcgccctggtgaaggccgcaagcgcagcccagagggaattggttgcacagggaaaggtgggggccattccggccaatgcacttgacgacggccagtggtcacaggggctaatctctgcagctaggatggtggctgctgcgaccaataatctgtgcgaagccgccaatgcagcagtgcaaggccacgcctctcaggagaagctgatttcttccgccaaacaggtggcagctagtacggcacagttgctggtggcatgcaaggtcaaagccgaccaggacagcgaagcaatgaagcgactgcaggctgcaggcaatgccgtaaaacgggcaagcgacaacctggtgaaggcggcccagaaagctgcagcgttcgaggagcaagaaaatgaaacagtagttgtgaaagagaagatggtgggaggcattgcccagattattgccgcgcaagaagagatgctgcggaaggaacgcgagttggaagaggcacgaaagaaactggcccagataagacagcaacagtacaaatttttgccttccgaattaagggatgagcactag

SEQ ID NO: 163530 - DNA, 7290 bp, Artificial Sequence
  derived and/or modified sequence
atggtcgctctgtccctcaagatcagcatcggaaacgtggtaaagactatgcagttcgaacctagcacaatggtctatgatgcgtgcaggatcatcagagagaggatcccagaggctccagccggtcctccctctgattttggactttttctctcagacgatgacccgaagaagggaatatggctggaagctggcaaggccctagattattatatgttgagaaacggcgatacaatggagtacaggaagaagcagaggccccttaagatacggatgctggacggaacagtgaagactattatggtggacgacagtaagacggtgacagacatgctgatgacaatttgtgcccggattggtattacaaaccacgacgagtactccctcgtccgagagctgatggaagagaagaaagaggagataaccggcaccctgaggaaagacaagaccctgcttcgggatgagaaaaaaatggaaaaacttaaacagaagctccacaccgatgatgagttgaactggctggatcacggcagaacgctacgggaacagggagtggaggagcatgaaaccctcctgctccgcaggaaattcttctattcagaccaaaacgtggactccagggatcctgtgcagttgaatctcctgtacgtgcaggcaagggatgacattcttaatggttcccaccccgtgtcctttgataaggcctgcgaatttgcagggttccagtgtcagattcagtttgggcctcacaacgagcagaaacacaaggccgggttcctcgaccttaaggacttcctgcctaaagaatacgttaaacagaaaggcgagcgaaagattttccaagcacacaagaactgcggtcagatgtcagaaatagaggctaaggtccggtacgtgaaattagctcgctctcttaagacatatggcgtgagcttctttctggtgaaagaaaagatgaaagggaagaacaagctcgtgccaaggctgctgggcatcaccaaagagtgcgtcatgcgggtcgatgagaagaccaaggaggtgattcaggaatggaacctgaccaacattaaaaggtgggcagcaagcccaaaatcctttaccctcgattttggagattaccaagacggatattattctgttcagactacagagggcgaacagatagcccagctgattgctgggtacatagacatcatcttgaaaaagaagaagtccaaggaccattttggcctcgagggggacgaagaaagcacaatgctcgaggacagcgtgtccccgaaaaagagtaccgttctccaacaacagtacaatagagtgggaaaggtagagcacgggtccgtggcactccctgcgatcatgagatctggagccagcggaccagagaacttccaggtgggtagcatgcctcctgcccagcagcaaatcacatctgggcagatgcataggggacacatgccacccctgacatccgctcagcaggctctgaccggaacaatcaactcaagcatgcaagctgtgcaggcagctcaggctacattggacgacttcgacaccctgccacctctcggtcaggacgcagcctccaaggcctggcgaaagaataagatggacgagtcaaaacacgagatccactcacaggtggatgccattaccgcgggaactgccagcgtggtgaatctgaccgccggagatcccgccgaaactgattataccgccgtggggtgtgcagtgaccacgatctccagcaacctcaccgagatgagccgcggtgtgaagttgcttgcggcgctgcttgaggacgaaggaggatctggtcggccattgttgcaggctgcaaagggtcttgcaggggccgtgtcagaacttctgcgctctgcccagcccgcctcagccgagccgcgtcagaacctgctacaagcggcgggcaacgtaggacaagccagcggcgagctgttgcagcagatcggggaaagcgacacggatccacacttccaagatgcactaatgcagttagcaaaggcagtcgcctcggcagcggctgctctggtactaaaggcaaagtcggtggcgcagcgcaccgaggattcgggtttgcagacacaggtcatcgccgctgcaacccagtgcgctctgtctaccagccagctggtggcctgtaccaaagtggtcgcccctacgatctcatccccggtgtgccaagagcagttggtcgaggccggccggctggtcgctaaagcggtggaagggtgcgtcagcgcaagccaggccgctaccgaagatgggcagttgctccgcggggtgggtgcagccgctaccgctgtgacccaggccctgaacgaactgctgcaacacgttaaggcccacgctacaggggcaggtccagctggtcgatacgaccaagctaccgatacaatcctgaccgttacagaaaacattttttcctctatgggcgacgcgggagaaatggtgagacaggccaggatactcgcccaggcaacctctgacttagttaatgccatcaaagctgatgccgagggggaaagtgacctggaaaattctcgaaagctgttaagcgccgccaagattctggccgatgctactgctaaaatggtcgaggctgctaagggtgctgcggcccaccccgacagcgaagagcagcagcagagacttagagaggccgccgaaggcttgcgcatggccactaacgccgcagctcagaacgctataaagaagaagctcgtgcagcggctggagcatgctgctaagcaggccgcagcgagtgcaacccagactattgccgcagcacagcatgctgccagcacaccaaaggcctctgcgggccctcagcccctcctggtgcagtcttgtaaagcggttgcagagcagattcccctgttggtccagggagtccgtgggtcacaggctcaaccagacagcccctctgcacaattagctctgatcgctgcatcccagagttttctccagccagggggcaaaatggttgccgccgcaaaagcttccgtcccaactattcaagaccaggcgtcagcgatgcagctcagtcaatgcgccaagaacctcggtactgccctcgctgaattacggactgctgcccagaaagctcaggaggcatgtggccccttggagatggattctgcactatcggtggtgcagaatttggagaaggacttacaagaggtaaaggcagccgcacgggacgggaaactaaagccactgcccggcgaaaccatggaaaagtgtacccaggatctcggcaacagcacaaaagccgtcagctctgccattgcgcagttactgggagaagttgcacaagggaacgagaattacgcaggcatagccgccagagacgtggctgggggactgcgctccctcgctcaggctgctaggggagtggccgccctgacctctgatcccgctgtacaggccatcgtacttgacacagcctcagatgtgctcgacaaggctagttccctgatcgaagaggccaaaaaagctgcaggccatcccggggaccctgagtctcagcagcgacttgcccaggtcgccaaagcagtgacccaggctctgaaccgctgcgtatcttgtctccccggacagagggatgtggacaatgcattacgtgcagtaggtgatgcctctaaaagactgcttagtgacagccttcctccttccacgggaacatttcaggaggcccagagcagattgaacgaggccgcagccggactcaatcaggccgctacagagctggtgcaggcatcaagagggacgcctcaggaccttgccagagcatccgggagatttgggcaggacttcagtacctttctcgaggctggtgtcgagatggcaggccaggcccccagccaggaagaccgggcacaggtcgtgtctaatctcaaggggatttcaatgagcagcagtaagctgttactggccgccaaggcactgagcactgaccccgctgcacccaacttaaagagtcaactggccgccgcagccagggcggtgaccgacagtataaatcagctcatcacgatgtgtacacagcaggctccaggtcagaaagaatgtgacaatgcgctccgcgagctagaaacggtacgcgaactactagagaatccagtccaacctataaacgatatgtcatactttggatgcctggatagcgtaatggaaaacagcaaggtcctgggggaagcaatgacaggcatatcccagaatgcaaagaacggcaatttaccagagttcggagacgccatttctactgcttcaaaggccctatgtgggtttaccgaggcagcagcccaggctgcctacctggtgggcgtgtccgaccctaattctcaggccggacagcagggcctggtggaaccaactcaatttgcccgcgctaatcaagcaatccaaatggcctgtcagagtctgggggagccgggatgcactcaggcccaggtgctctccgctgcaaccattgtggctaaacacacatccgccctgtgcaactcatgtcgactggcttccgcacgaaccactaatcccactgcaaaaagacagttcgtgcagagtgcgaaggaagtggctaactccaccgccaacctggtaaaaacaataaaagccttggacggggcttttactgaggaaaatagggcacagtgccgggcagccacggcccccctgctggaagcagtagataacctttcagcttttgcctcaaaccccgagttctcctcaatccccgcacagatcagccctgaaggcagagccgccatggagcctatcgttatatccgccaagaccatgcttgaaagcgccggtggcctcatccaaacggcgcgggctctggcagtgaacccaagggacccacctagctggagtgtgctggcaggacactcacgaactgtgtctgatagcataaagaaactgataacatcgatgcgcgacaaagctccaggccagctggagtgcgagacagcaatcgccgctttaaacagctgtcttcgagatctggaccaggccagcctggctgcagtttcccagcagttggcccccctgcaagaaatctcccaccttatcgaaccactggccaacgctgctcgagccgaagcgtcccagctgggccacaaggtttctcagatggctcagtattttgagcctctgacgctggcggccgttggtgcagctagtaagaccttaagccacccccaacaaatggctttgctggaccagacaaagacactggctgaaagtgctcttcagctgctgtacactgccaaggaggccggcggtaaccccaaattggatgaaggcccaatgggcgagcctgaggggagcttcgtggactaccagaccactatggtgagaaccgctaaggccatcgccgttaccgttcaggaaatgataggctcccacatcaagcatagggtccaggagcttggtcatggctgcgccgctctggttacgaaggctggggccctgcagtgttctcccagtgacgcttacacaaaaaaagagctgattgaatgcgctaggcgggtctctgaaaaggtgagccatgtgcttgcagccctgcaggctggcaatcggggcactcaggcctgcattacggccgcatcggccgtgtccggtattatcgctgatctggatacaaccattatgttcgcgactgctgggaccttaaaccgggagggaacagaaaccttcgctgatcatcgggaggggatcctaaagacggcaaaagtgctagtggaggacacgaaggtgctggtgcagaacgcggctggaagccaggaaaagctcgcccaggccgcgcagagcagtgtggctaccataactcgcctagctgatgtcgtcaagctcggggcagcttcactgggagccgaggatccggagacccaggtggtgctgattaatgccgtgaaggacgtggcaaaagccctgggagacctcataagcgctacaaaggctgcagctggcaaagtaggcgatgatcctgcagtctggcagttgaagaactccgcgaaagtgatggtgacaaacgtgacctctctgctaaagaccgtgaaagccgtggaagatgaggctaccaagggcactcgcgcccttgaagccacaaccgagcacatccgccaagaacttgccccccctgcaaagacttcaactccagaagattttattcggatgaccaagggcatcacaatggctactgccaaagctgtggccgccgggaactcctgccggcaggaagatgtcatcgccaccgcaaacctgagccggcgcgcaattgccgacatgctgcgcgcgtgtaaggaagcggcttatcaccctgaggtggctccggacgtgcgcctgagagcacttcactatggtcgagagtgcgctaatgggtacctggagttattagatcatgtgctgttgacgctgcagaagcctagcccggagttgaaacagcagttgaccggacactccaagagagtcgccggaagcgtcactgagctgatccaggctgccgaagcaatgaaagggaccgaatgggtcgatcccgaggacccaacagtgatcgctgaaaatgagctgctgggtgctgcggccgctatcgaagccgccgcaaaaaaactcgagcaattgaagccccgggcaaagccaaaggaagcagacgaaagcctcaacttcgaggagcagatactggaggccgccaagagcatagcggcagcaacctctgctttggtcaaggccgctagcgcggcccagcgggagttggttgcccagggcaaggtaggggctatccctgcgaatgcactggacgatggccagtggagtcagggtctgataagtgcagcacggatggtggcagctgctaccaacaacctctgcgaggccgccaacgccgcggtgcagggacacgcaagccaggaaaagctgatatcttcggcaaagcaggttgctgccagcactgcccagttgctcgttgcctgtaaggtgaaggccgaccaggattctgaagctatgaagcgccttcaggccgctggaaatgccgtgaagcgagcatctgacaacctcgtcaaagcagcccagaaagccgccgcattcgaggagcaggagaacgagacagttgttgtgaaggaaaaaatggtcggaggaatcgcgcaaatcatcgccgcgcaggaggaaatgctgcgaaaggagagagagctggaggaagctaggaagaagctcgcacagattagacagcagcagtacaagttcctcccatccgagttgagagacgaacactag

SEQ ID NO: 163531 - DNA, 7626 bp, Artificial Sequence
  derived and/or modified sequence
atggtggccctgagcctgaagatcagcattggaaatgtggtgaagaccatgcagtttgagcccagcaccatggtgtatgatgcctgccgcatcatccgggagcgcatccctgaggccccagctggccccccaagtgactttggcctcttcctgagtgatgatgaccccaagaagggcatctggctggaggccggcaaggccctggactactacatgctgagaaatggagacaccatggagtacaggaagaagcagaggcccctgaagatccgcatgctggatggcaccgtgaagaccatcatggtggatgacagcaagacagtgacagacatgctgatgaccatctgtgccagaattggcatcaccaaccatgatgagtacagcctggtgcgggagctgatggaggagaagaaggaggagatcaccggcaccctgaggaaggacaagaccctgctgagagatgagaagaagatggagaagctgaagcagaagctgcacacagatgatgagctgaactggctggaccacggccgcaccctgcgggagcagggcgtggaggagcacgagaccctgctgctgcggaggaagttcttctacagcgaccagaatgtggacagccgggaccctgtgcagctgaacctgctgtatgtgcaggccagagatgacatcctgaatggcagccaccctgtgtcctttgacaaggcctgtgaatttgctggcttccagtgccagatccagtttggcccccacaatgagcagaagcacaaggccggcttcctggacctgaaggacttcctgcccaaggagtatgtgaagcagaagggggagaggaagatcttccaggcccacaagaactgtggccagatgtctgaaattgaggccaaggtgcgctacgtgaagctggcccggagcctgaagacctacggcgtgtccttcttcctggtgaaggagaagatgaagggcaagaacaagctggtgccccggctgctgggcatcaccaaggaatgtgtgatgagggtggatgagaagaccaaggaggtgatccaggagtggaacctgaccaacatcaagcgctgggccgccagccccaagagcttcaccctggactttggagactaccaggacggctactacagcgtgcagaccacagaaggagagcagatcgcccagctgattgctggctacatcgacatcatcctgaagaagaagaagagcaaggaccacttcggcctggagggagatgaggagagcaccatgctggaggacagcgtgagccccaagaagagcacagtgctgcagcagcagtacaacagagtgggcaaggtggagcacggctctgtggccctgcctgccatcatgaggtctggggccagcggccctgagaacttccaggtgggctccatgcccccagcccagcagcagatcaccagcggccagatgcaccggggccacatgccacccctgaccagcgcccagcaggccctgaccggcaccatcaacagctccatgcaggccgtgcaggccgcccaggccaccctggatgactttgacaccctgccccccctgggccaggatgctgccagcaaggcctggaggaagaacaagatggatgagagcaagcatgagatccacagccaggtggatgccatcacagctggaacagcctctgtggtgaacctgacagctggggaccctgctgagacagactacacagctgtgggctgtgctgtgaccaccatcagcagcaacctgacagagatgagccggggcgtgaagctgctggccgccctgctggaggatgagggcggcagcggccggcccctgctgcaggccgccaagggcctggccggggctgtgtctgagctgctgcggagcgcccagcctgccagcgctgagccccggcagaacctgctgcaggccgctggaaatgtgggccaggccagcggggagctgctgcagcagattggagagagtgacacagacccccacttccaggatgccctgatgcagctggccaaggctgtggccagcgctgctgctgccctggtgctgaaggccaagtctgtggcccagaggacagaggacagcggcctgcagacccaggtgattgctgctgccacccagtgtgccctgagcaccagccagctggtggcctgcaccaaggtggtggcccccaccatcagcagccctgtgtgccaggagcagctggtggaggccggccgcctggtggccaaggctgtggagggctgtgtgtctgccagccaggccgccacagaagatggccagctgctgcggggcgtgggcgccgccgccacagctgtgacccaggccctgaatgagctgctgcagcacgtgaaggcccacgccaccggggccggccctgctggccgctatgaccaggccacagacaccatcctgactgtgacagagaacatcttcagctccatgggagatgctggggagatggtgcggcaggcccgcatcctggcccaggccaccagtgacctggtgaatgccatcaaggcagatgctgagggggagagtgacctggagaacagcaggaagctgctgtctgctgccaagatcctggctgatgccacagccaagatggtggaggccgccaagggagctgctgcccacccagattctgaggagcagcagcagaggctgcgggaggccgctgagggcctgaggatggccaccaatgctgctgcccagaatgccatcaagaagaagctggtgcagaggctggagcacgccgccaagcaggccgccgccagcgccacccagaccatcgccgccgcccagcacgccgccagcacccccaaggccagcgctggcccccagcccctgctggtgcagagctgcaaggctgtggccgagcagatccccctgctggtgcagggcgtgcggggcagccaggcccagcctgacagccccagcgcccagctggccctgattgctgccagccagagcttcctgcagcccggcggcaagatggtggccgccgccaaggcctctgtgcccaccatccaggaccaggccagcgccatgcagctgagccagtgtgccaagaacctgggcacagccctggccgagctgaggacagctgcccagaaggcccaggaggcctgtggccccctggagatggacagcgccctgtctgtggtgcagaacctggagaaggacctgcaggaggtgaaggccgccgccagagatggcaagctgaagcccctgcccggggagaccatggagaagtgcacccaggacctgggcaacagcaccaaggctgtgagcagcgccatcgcccagctgctgggggaggtggcccagggcaatgaaaattatgccggcattgctgccagagatgtggccggcggcctgcggagcctggcccaggccgcccggggcgtggccgccctgaccagtgaccctgctgtgcaggccatcgtgctggacacagccagtgatgtgctggacaaggccagcagcctcatcgaggaggccaagaaggctgctggccaccctggggaccctgagagccagcagaggctggcccaggtggccaaggctgtgacccaggccctgaacagatgtgtgtcctgcctgcccggccagagagatgtggacaatgccctgcgggctgtgggagatgccagcaagaggctgctgagtgacagcctgccccccagcacaggcaccttccaggaggcccagagccggctgaatgaagctgctgctggcctgaaccaggccgccacagagctggtgcaggccagccggggcaccccccaggacctggcccgggccagcggccgcttcggccaggacttcagcaccttcctggaggccggcgtggagatggccggccaggcccccagccaggaggaccgggcccaggtggtgagcaacctgaagggcatctccatgagcagcagcaagctgctgctggccgccaaggccctgagcacagatcctgctgcccccaacctgaagagccagctggccgccgccgcccgggctgtgacagacagcatcaaccagctgatcaccatgtgcacccagcaggcccctggccagaaggaatgtgacaatgccctgcgggagctggagaccgtgcgggagctgctggagaaccctgtgcagcccatcaatgacatgagctacttcggctgcctggacagcgtgatggagaacagcaaggtgctgggggaggccatgacaggcatcagccagaatgccaagaatggaaacctgcctgagtttggagatgccatcagcacagccagcaaggccctgtgtggcttcacagaagctgctgcccaggccgcctacctggtgggcgtgtctgaccccaacagccaggccggccagcagggcctggtggagcccacccagtttgcccgggccaaccaggccatccagatggcctgccagagcctgggggagcccggctgcacccaggcccaggtgctgtctgctgccaccatcgtggccaagcacaccagcgccctgtgcaacagctgccgcctggccagcgcccggaccaccaaccccacagccaagaggcagtttgtgcagagcgccaaggaggtggccaacagcacagccaacctggtgaagaccatcaaggccctggatggagccttcacagaagaaaatagagcccagtgccgggccgccacagcccccctgctggaggccgtggacaacctgagcgcctttgccagcaaccctgagttcagcagcatcccagcccagatcagccctgagggccgggccgccatggagcccatcgtcatcagcgccaagaccatgctggagagcgctgggggcctcatccagacagcccgggccctggccgtgaacccccgggaccccccatcctggagcgtgctggccggccacagcaggacagtgtctgacagcatcaagaagctgatcacctccatgagggacaaggcccctggccagctggagtgtgaaacagccatcgccgccctgaacagctgcctgcgggacctggaccaggccagcctggccgctgtgtcccagcagctggccccccgggagggcatcagccaggaggccctgcacacccagatgctgacagctgtgcaggagatcagccacctgattgagcccctggccaatgctgcccgggcagaggccagccagctgggccacaaggtgtcccagatggcccagtactttgagcccctgaccctggccgctgtgggcgccgccagcaagaccctgagccacccccagcagatggccctgctggaccagaccaagaccctggccgagagcgccctgcagctgctgtacacagccaaggaggccggcggcaaccccaagcaggccgcccacacccaggaggccctggaggaggccgtgcagatgatgacagaggccgtggaggacctgaccaccaccctgaatgaagctgccagcgctgctggggtggtgggcggcatggtggacagcatcacccaggccatcaaccagctggatgagggccccatgggagagcctgagggcagctttgtggactaccagaccaccatggtgaggacagccaaggccatcgctgtgacagtgcaggagatggtgaccaagagcaacaccagccctgaggagctgggccccctggccaaccagctgaccagtgactatggccgcctggccagcgaggccaagccagctgctgtggccgcagaaaatgaggagatcggcagccacatcaagcaccgggtgcaggagctgggccacggctgtgccgccctggtgaccaaggccggggccctgcagtgcagccccagtgatgcctacaccaagaaggagctgattgaatgtgccaggagagtgtctgagaaggtgagccacgtgctggccgccctgcaggccggcaacagaggcacccaggcctgcatcacagctgccagcgctgtgtctggcatcatcgctgacctggacaccaccatcatgtttgccacagctggcaccctgaaccgggagggcacagagacctttgctgaccaccgggagggcatcctgaagacagccaaggtgctggtggaggacaccaaggtgctggtgcagaatgctgctggcagccaggagaagctggcccaggccgcccagagctctgtggccaccatcacccggctggctgatgtggtgaagctgggcgccgccagcctgggcgctgaggaccctgagacccaggtggtgctgatcaatgctgtgaaggatgtggccaaggccctgggggacctgatcagcgccaccaaggctgctgctgggaaggtgggagatgatcctgctgtgtggcagctgaagaacagcgccaaggtgatggtgaccaacgtgaccagcctgctgaagacagtgaaggctgtggaggatgaggccaccaagggcacccgggccctggaggccaccacagagcacatccggcaggagctggccgtgttctgcagccctgagcccccagccaagaccagcaccccagaggacttcatccgcatgaccaagggcatcaccatggccacagccaaggctgtggccgccggcaacagctgccggcaggaggatgtgattgccacagccaacctgagcagaagagccatcgctgacatgctgcgggcctgcaaggaggccgcctaccaccctgaggtggccccagatgtgcggctgcgggccctgcactacggccgggagtgtgccaacggctacctggagctgctggaccacgtgctgctgaccctgcagaagcccagccctgagctgaagcagcagctgaccggccacagcaagagggtggccggctctgtgacagagctgatccaggccgctgaggccatgaagggcacagagtgggtggaccctgaggaccccaccgtgattgctgaaaatgagctgctgggcgctgctgctgccatcgaggccgccgccaagaagctggagcagctgaagccccgggccaagcccaaggaggctgatgagagcctgaactttgaggagcagatcctggaggccgccaagagcattgctgctgccaccagcgccctggtgaaggccgccagcgctgcccagcgggagctggtggcccagggcaaggtgggcgccatcccagccaatgccctggatgatggccagtggagccagggcctcatctctgctgccaggatggtggccgccgccaccaacaacctgtgtgaggccgccaatgctgctgtgcagggccacgccagccaggagaagctgatcagcagcgccaagcaggtggccgccagcacagcccagctgctggtggcctgcaaggtgaaggctgaccaggacagcgaggccatgaagaggctgcaggccgctggaaatgctgtgaagagggccagtgacaacctggtgaaggccgcccagaaggccgccgcctttgaggagcaggagaatgaaacagtggtggtgaaggagaagatggtgggcggcatcgcccagatcatcgccgcccaggaggagatgctgaggaaggagcgggagctggaggaggccaggaagaagctggcccagatccggcagcagcagtacaagttcctgcccagcgagctgagagatgagcactag

SEQ ID NO: 163532 - DNA, 7290 bp, Artificial Sequence
  derived and/or modified sequence
atggtggccctgagcctgaagatcagcattggaaatgtggtgaagaccatgcagtttgagcccagcaccatggtgtatgatgcctgccgcatcatccgggagcgcatccctgaggccccagctggccccccaagtgactttggcctcttcctgagtgatgatgaccccaagaagggcatctggctggaggccggcaaggccctggactactacatgctgagaaatggagacaccatggagtacaggaagaagcagaggcccctgaagatccgcatgctggatggcaccgtgaagaccatcatggtggatgacagcaagacagtgacagacatgctgatgaccatctgtgccagaattggcatcaccaaccatgatgagtacagcctggtgcgggagctgatggaggagaagaaggaggagatcaccggcaccctgaggaaggacaagaccctgctgagagatgagaagaagatggagaagctgaagcagaagctgcacacagatgatgagctgaactggctggaccacggccgcaccctgcgggagcagggcgtggaggagcacgagaccctgctgctgcggaggaagttcttctacagcgaccagaatgtggacagccgggaccctgtgcagctgaacctgctgtatgtgcaggccagagatgacatcctgaatggcagccaccctgtgtcctttgacaaggcctgtgaatttgctggcttccagtgccagatccagtttggcccccacaatgagcagaagcacaaggccggcttcctggacctgaaggacttcctgcccaaggagtatgtgaagcagaagggggagaggaagatcttccaggcccacaagaactgtggccagatgtctgaaattgaggccaaggtgcgctacgtgaagctggcccggagcctgaagacctacggcgtgtccttcttcctggtgaaggagaagatgaagggcaagaacaagctggtgccccggctgctgggcatcaccaaggaatgtgtgatgagggtggatgagaagaccaaggaggtgatccaggagtggaacctgaccaacatcaagcgctgggccgccagccccaagagcttcaccctggactttggagactaccaggacggctactacagcgtgcagaccacagaaggagagcagatcgcccagctgattgctggctacatcgacatcatcctgaagaagaagaagagcaaggaccacttcggcctggagggagatgaggagagcaccatgctggaggacagcgtgagccccaagaagagcacagtgctgcagcagcagtacaacagagtgggcaaggtggagcacggctctgtggccctgcctgccatcatgaggtctggggccagcggccctgagaacttccaggtgggctccatgcccccagcccagcagcagatcaccagcggccagatgcaccggggccacatgccacccctgaccagcgcccagcaggccctgaccggcaccatcaacagctccatgcaggccgtgcaggccgcccaggccaccctggatgactttgacaccctgccccccctgggccaggatgctgccagcaaggcctggaggaagaacaagatggatgagagcaagcatgagatccacagccaggtggatgccatcacagctggaacagcctctgtggtgaacctgacagctggggaccctgctgagacagactacacagctgtgggctgtgctgtgaccaccatcagcagcaacctgacagagatgagccggggcgtgaagctgctggccgccctgctggaggatgagggcggcagcggccggcccctgctgcaggccgccaagggcctggccggggctgtgtctgagctgctgcggagcgcccagcctgccagcgctgagccccggcagaacctgctgcaggccgctggaaatgtgggccaggccagcggggagctgctgcagcagattggagagagtgacacagacccccacttccaggatgccctgatgcagctggccaaggctgtggccagcgctgctgctgccctggtgctgaaggccaagtctgtggcccagaggacagaggacagcggcctgcagacccaggtgattgctgctgccacccagtgtgccctgagcaccagccagctggtggcctgcaccaaggtggtggcccccaccatcagcagccctgtgtgccaggagcagctggtggaggccggccgcctggtggccaaggctgtggagggctgtgtgtctgccagccaggccgccacagaagatggccagctgctgcggggcgtgggcgccgccgccacagctgtgacccaggccctgaatgagctgctgcagcacgtgaaggcccacgccaccggggccggccctgctggccgctatgaccaggccacagacaccatcctgactgtgacagagaacatcttcagctccatgggagatgctggggagatggtgcggcaggcccgcatcctggcccaggccaccagtgacctggtgaatgccatcaaggcagatgctgagggggagagtgacctggagaacagcaggaagctgctgtctgctgccaagatcctggctgatgccacagccaagatggtggaggccgccaagggagctgctgcccacccagattctgaggagcagcagcagaggctgcgggaggccgctgagggcctgaggatggccaccaatgctgctgcccagaatgccatcaagaagaagctggtgcagaggctggagcacgccgccaagcaggccgccgccagcgccacccagaccatcgccgccgcccagcacgccgccagcacccccaaggccagcgctggcccccagcccctgctggtgcagagctgcaaggctgtggccgagcagatccccctgctggtgcagggcgtgcggggcagccaggcccagcctgacagccccagcgcccagctggccctgattgctgccagccagagcttcctgcagcccggcggcaagatggtggccgccgccaaggcctctgtgcccaccatccaggaccaggccagcgccatgcagctgagccagtgtgccaagaacctgggcacagccctggccgagctgaggacagctgcccagaaggcccaggaggcctgtggccccctggagatggacagcgccctgtctgtggtgcagaacctggagaaggacctgcaggaggtgaaggccgccgccagagatggcaagctgaagcccctgcccggggagaccatggagaagtgcacccaggacctgggcaacagcaccaaggctgtgagcagcgccatcgcccagctgctgggggaggtggcccagggcaatgaaaattatgccggcattgctgccagagatgtggccggcggcctgcggagcctggcccaggccgcccggggcgtggccgccctgaccagtgaccctgctgtgcaggccatcgtgctggacacagccagtgatgtgctggacaaggccagcagcctcatcgaggaggccaagaaggctgctggccaccctggggaccctgagagccagcagaggctggcccaggtggccaaggctgtgacccaggccctgaacagatgtgtgtcctgcctgcccggccagagagatgtggacaatgccctgcgggctgtgggagatgccagcaagaggctgctgagtgacagcctgccccccagcacaggcaccttccaggaggcccagagccggctgaatgaagctgctgctggcctgaaccaggccgccacagagctggtgcaggccagccggggcaccccccaggacctggcccgggccagcggccgcttcggccaggacttcagcaccttcctggaggccggcgtggagatggccggccaggcccccagccaggaggaccgggcccaggtggtgagcaacctgaagggcatctccatgagcagcagcaagctgctgctggccgccaaggccctgagcacagatcctgctgcccccaacctgaagagccagctggccgccgccgcccgggctgtgacagacagcatcaaccagctgatcaccatgtgcacccagcaggcccctggccagaaggaatgtgacaatgccctgcgggagctggagaccgtgcgggagctgctggagaaccctgtgcagcccatcaatgacatgagctacttcggctgcctggacagcgtgatggagaacagcaaggtgctgggggaggccatgacaggcatcagccagaatgccaagaatggaaacctgcctgagtttggagatgccatcagcacagccagcaaggccctgtgtggcttcacagaagctgctgcccaggccgcctacctggtgggcgtgtctgaccccaacagccaggccggccagcagggcctggtggagcccacccagtttgcccgggccaaccaggccatccagatggcctgccagagcctgggggagcccggctgcacccaggcccaggtgctgtctgctgccaccatcgtggccaagcacaccagcgccctgtgcaacagctgccgcctggccagcgcccggaccaccaaccccacagccaagaggcagtttgtgcagagcgccaaggaggtggccaacagcacagccaacctggtgaagaccatcaaggccctggatggagccttcacagaagaaaatagagcccagtgccgggccgccacagcccccctgctggaggccgtggacaacctgagcgcctttgccagcaaccctgagttcagcagcatcccagcccagatcagccctgagggccgggccgccatggagcccatcgtcatcagcgccaagaccatgctggagagcgctgggggcctcatccagacagcccgggccctggccgtgaacccccgggaccccccatcctggagcgtgctggccggccacagcaggacagtgtctgacagcatcaagaagctgatcacctccatgagggacaaggcccctggccagctggagtgtgaaacagccatcgccgccctgaacagctgcctgcgggacctggaccaggccagcctggccgctgtgtcccagcagctggcccccctgcaggagatcagccacctgattgagcccctggccaatgctgcccgggcagaggccagccagctgggccacaaggtgtcccagatggcccagtactttgagcccctgaccctggccgctgtgggcgccgccagcaagaccctgagccacccccagcagatggccctgctggaccagaccaagaccctggccgagagcgccctgcagctgctgtacacagccaaggaggccggcggcaaccccaagctggatgagggccccatgggagagcctgagggcagctttgtggactaccagaccaccatggtgaggacagccaaggccatcgctgtgacagtgcaggagatgattggcagccacatcaagcaccgggtgcaggagctgggccacggctgtgccgccctggtgaccaaggccggggccctgcagtgcagccccagtgatgcctacaccaagaaggagctgattgaatgtgccaggagagtgtctgagaaggtgagccacgtgctggccgccctgcaggccggcaacagaggcacccaggcctgcatcacagctgccagcgctgtgtctggcatcatcgctgacctggacaccaccatcatgtttgccacagctggcaccctgaaccgggagggcacagagacctttgctgaccaccgggagggcatcctgaagacagccaaggtgctggtggaggacaccaaggtgctggtgcagaatgctgctggcagccaggagaagctggcccaggccgcccagagctctgtggccaccatcacccggctggctgatgtggtgaagctgggcgccgccagcctgggcgctgaggaccctgagacccaggtggtgctgatcaatgctgtgaaggatgtggccaaggccctgggggacctgatcagcgccaccaaggctgctgctgggaaggtgggagatgatcctgctgtgtggcagctgaagaacagcgccaaggtgatggtgaccaacgtgaccagcctgctgaagacagtgaaggctgtggaggatgaggccaccaagggcacccgggccctggaggccaccacagagcacatccggcaggagctggcccccccagccaagaccagcaccccagaggacttcatccgcatgaccaagggcatcaccatggccacagccaaggctgtggccgccggcaacagctgccggcaggaggatgtgattgccacagccaacctgagcagaagagccatcgctgacatgctgcgggcctgcaaggaggccgcctaccaccctgaggtggccccagatgtgcggctgcgggccctgcactacggccgggagtgtgccaacggctacctggagctgctggaccacgtgctgctgaccctgcagaagcccagccctgagctgaagcagcagctgaccggccacagcaagagggtggccggctctgtgacagagctgatccaggccgctgaggccatgaagggcacagagtgggtggaccctgaggaccccaccgtgattgctgaaaatgagctgctgggcgctgctgctgccatcgaggccgccgccaagaagctggagcagctgaagccccgggccaagcccaaggaggctgatgagagcctgaactttgaggagcagatcctggaggccgccaagagcattgctgctgccaccagcgccctggtgaaggccgccagcgctgcccagcgggagctggtggcccagggcaaggtgggcgccatcccagccaatgccctggatgatggccagtggagccagggcctcatctctgctgccaggatggtggccgccgccaccaacaacctgtgtgaggccgccaatgctgctgtgcagggccacgccagccaggagaagctgatcagcagcgccaagcaggtggccgccagcacagcccagctgctggtggcctgcaaggtgaaggctgaccaggacagcgaggccatgaagaggctgcaggccgctggaaatgctgtgaagagggccagtgacaacctggtgaaggccgcccagaaggccgccgcctttgaggagcaggagaatgaaacagtggtggtgaaggagaagatggtgggcggcatcgcccagatcatcgccgcccaggaggagatgctgaggaaggagcgggagctggaggaggccaggaagaagctggcccagatccggcagcagcagtacaagttcctgcccagcgagctgagagatgagcactag

SEQ ID NO: 163533 - DNA, 7626 bp, Artificial Sequence
  derived and/or modified sequence
atggtggccctgagcctgaagatcagcatcggcaacgtggtgaagacgatgcagtttgagccgagtaccatggtctatgatgcgtgtcggataatccgggagcgcataccagaagcacctgctggcccgcccagtgattttgggctcttcttgagcgatgatgaccctaagaagggcatctggctggaagccgggaaggcattggattactacatgctccggaatggagatactatggagtatagaaaaaagcagcggcctctgaagattagaatgttggatggcaccgtgaaaaccattatggtcgacgacagcaaaactgttacggatatgcttatgactatctgtgccagaatcggcataacgaaccatgatgagtatagcctggtgagggagctgatggaggaaaagaaggaggagattaccggcactctgagaaaagataagactctgctgagagatgaaaagaagatggagaaactgaaacagaagctccacacagacgacgaactgaactggcttgatcacgggaggacactaagagaacagggagtggaggaacacgagactttactgctgagacgaaaatttttttacagcgaccagaatgtagatagcagagatccggtccaactgaacttgctgtacgtacaggccagagacgatatcttgaatggctctcatcctgtgtccttcgacaaagcctgcgagttcgcaggtttccagtgccaaatacagttcggacctcacaatgaacagaagcacaaggccggattcttggaccttaaggattttctacctaaagagtatgtcaaacagaagggcgagcggaagattttccaggcccataagaattgtggacagatgtctgaaattgaggcgaaggtccgctatgttaaacttgctcgctccctgaagacctatggagtgtccttctttttggtaaaggaaaaaatgaaaggcaagaataagctggtcccacggttacttggtataacaaaggagtgtgtcatgagggttgatgagaagactaaagaagtgatacaggagtggaacctgacaaacattaagcgttgggcagcttcccccaaaagtttcacgctcgactttggcgactaccaagatggctactacagtgtgcagaccactgagggggagcagattgcccaactgatagccggctatattgacatcattctgaagaagaagaagtcaaaggatcattttggcctggaaggtgatgaagagtcgacgatgttagaagattctgttagccctaagaaaagcaccgtacttcaacagcagtacaacagagtcgggaaggtcgaacacggaagcgtggccttacccgccattatgaggtctggcgcttccggcccagaaaatttccaggtggggagtatgcctcctgctcagcaacagatcacaagtgggcagatgcaccgcggacacatgccccctctcacgtcagcccaacaggcactcaccggaacaatcaactcatctatgcaagccgtgcaggctgcacaggccaccctcgatgactttgacacccttcccccactggggcaggacgctgcaagtaaagcctggagaaaaaataaaatggatgaatctaaacatgaaattcattctcaggtcgatgctatcaccgccggcaccgcttctgtcgtgaacctcacagccggagatcccgccgagaccgattatacagcggttggctgcgccgtgaccacaatatcaagcaacctgactgaaatgtcaagaggagtcaaattgctcgccgcacttctcgaagatgaagggggttctggaagacctctactgcaggcagctaagggccttgcgggagcagtgtcagagctgttacgaagcgcacagcccgcctctgcagaacccagacaaaatctcctgcaggcggctggaaatgtaggacaggcctcaggcgagttgcttcagcaaatcggggaatccgataccgacccccactttcaagacgctttgatgcagttagcaaaagcggtcgccagcgcggccgcagccttagtactcaaggcgaaaagcgtggcccagaggaccgaagactccggactacagacccaggtgattgctgcggccacgcaatgtgcactcagcaccagccagttagtcgcctgtacaaaggtagtcgctcccactatatccagtcccgtatgtcaggagcagcttgtcgaggccggacgtcttgtggctaaggcggtcgaagggtgcgttagcgccagccaagccgcaactgaagacggccagctgctgaggggtgtaggcgcagccgccactgccgtgacccaggcccttaatgagctgctccagcatgtcaaagctcacgcgacaggagctggtccagccggtcggtacgaccaagccaccgacaccattttgacagtgacggagaatattttttctagcatgggggacgccggagaaatggtgcggcaggctcgaatcctggcccaggcaaccagcgatctggttaatgcgataaaagcggatgctgagggggaatccgaccttgagaattcgagaaaactgctctcagccgctaagattctggccgacgccactgccaaaatggtagaggctgctaaaggggctgcagcacatcctgactccgaggagcagcagcagcgcctacgcgaggcagccgaaggactgcggatggccacaaacgctgccgctcaaaacgcaattaagaaaaaacttgtgcaacgtctggagcacgcagctaaacaagccgctgcctctgccactcagaccatcgcagcagcgcagcatgccgcttccacccctaaagcttcagctggaccccagccactgctggtacagtcctgtaaggcggttgcggagcagataccactgcttgtgcagggagtcagaggttcacaggcccagcctgatagcccgtcagctcagctggctttaatcgctgcatctcagagcttcttgcaacccgggggcaagatggtcgctgctgccaaagcctctgtccctacgatccaggatcaagcttccgctatgcagttatcccagtgcgccaagaatctgggcacagccctggctgagcttagaacggccgcccagaaggcccaagaagcatgcggcccgctggagatggattccgcattgagcgtggtccagaatctggaaaaagacctgcaggaggtgaaagcagcggcgagagacggcaagctgaagccacttccgggtgagaccatggagaagtgcactcaggacctaggcaatagcacgaaggcagtgtcctctgctattgcacagttactaggcgaggtggcgcagggcaatgagaattacgcggggatcgccgctcgggacgttgccggcgggctgagatctctagcccaagccgcgaggggtgttgctgcactgacctccgacccagcagtgcaggctatcgtgctggatacagctagtgatgttctggataaagcctcatcactgattgaggaggccaaaaaagcagccggccaccccggcgatcctgagtcccagcagagactcgcccaggtagctaaggcagtgacccaggcactaaaccggtgcgtgagctgtttgcccggccaaagagacgtcgataacgctttaagggcagtcggggacgcctccaaaagactgttgagtgattcactccctcccagcactgggacatttcaggaggcacagtccagattgaatgaggccgcagcagggctgaaccaggctgcgacggagctggtgcaggcaagtaggggcactcctcaggacttggccagagcgtcgggaagatttgggcaggatttttccaccttcctggaggcaggagtggaaatggccgggcaggcaccttcacaagaagatcgagcacaagtggtgagcaacctgaagggcatctcaatgagcagctctaagctcctccttgccgcaaaggctctttcaactgatcccgcagccccgaacttgaaaagccagctggctgctgccgctcgggctgtcactgatagtatcaaccagctgatcaccatgtgcacccagcaggcacctgggcaaaaagagtgcgacaatgctctccgggagcttgagacagtgagagagcttctggagaatcctgtccaacccatcaatgacatgtcctacttcgggtgtctggattccgttatggaaaattctaaggtcctgggggaagccatgactggaatctcacagaacgctaaaaacggtaacctcccagagtttggggacgctatcagtaccgcttcgaaggcattgtgcggttttacagaggctgccgcacaggccgcttatttggtaggggtctcggaccctaattcacaggctggacaacagggtcttgtggagccaacgcagttcgctcgcgctaaccaggcaatccagatggcgtgccagagtctgggtgagcccggctgtacacaagcccaagtcctttcagctgccacgatcgttgcgaaacacacttctgcgttatgcaactcatgtaggctggcatccgcccgtactactaaccccactgccaagagacaatttgtccagtctgcaaaggaggtggccaatagtaccgctaaccttgtaaagacaatcaaagcactggatggtgcctttacagaggaaaatagagcccagtgccgggctgccactgcacctctcctagaagcggtggacaatctatcggccttcgcgagtaatcctgaattttcctcgattcctgctcagattagtccagaaggacgcgcagccatggaacctatcgtgatctctgctaagacaatgctcgagagcgctgggggtctgattcagactgcccgtgccctggcggtgaatccacgcgatcctcccagctggtctgtcttggccggacactcccgaacagtgtctgactcgattaaaaagcttattactagcatgcgcgacaaggcgccgggccagctcgagtgcgaaaccgcgattgcagctctgaacagctgcctccgcgatctcgaccaggcttcactggccgcagtgagccagcaattggcacctcgtgaaggcatctcgcaggaggccctgcacacccaaatgttaacagctgttcaggagatctcccacctgatcgaacctctggccaacgcagcaagggctgaagcctctcagctagggcacaaggtctcacagatggcccaatacttcgagcctctgaccctggcagctgtgggagctgcctccaaaactttgtcgcacccccagcagatggccttgttggatcaaactaagaccctggctgaatcagccttgcaacttctctacacggctaaagaggccggtggtaaccccaaacaggcggcacacacccaagaggccctcgaggaggccgtacagatgatgacggaggccgtggaagatctcaccactacgcttaacgaggccgcctctgcagctggtgtggtaggggggatggtggatagtatcacccaggccataaaccagctagatgagggaccaatgggcgagccagaaggttccttcgtagactaccagactacaatggtgcggactgcaaaggcaattgcagtgactgtacaggagatggtcactaagtccaatacatcacccgaggagctaggcccactggctaaccagttaaccagcgactacgggcggttggcctccgaagctaagccagccgcagtggcagctgagaatgaagaaatcggcagccatattaaacacagggtgcaggaactcggccacggatgcgccgcactcgtgactaaggccggcgctttgcagtgttccccctctgacgcgtacaccaaaaaggagctgatcgagtgtgctcgaagggtgagtgaaaaggtgtcacacgtgttagccgccctccaggccggcaaccgcgggacccaggcctgcatcacagcagcttctgctgtctctggcattatagctgacctcgacaccaccatcatgttcgcgaccgctggaaccctgaaccgggaaggcaccgagactttcgcggaccaccgggagggaatcctcaagacggcaaaggtcctggtcgaggataccaaagtgctggtccaaaacgcggccggaagccaggaaaaactggctcaagcggcccaaagtagcgtagccaccatcacaaggctggctgatgtggtcaagctgggtgcggcttcacttggggccgaggaccccgaaactcaggtggtcttgattaacgcagtgaaagacgtggccaaggctctcggtgacttgatttctgccacaaaagccgcagcagggaaagttggcgacgatccagcggtgtggcagctgaagaattctgctaaggtcatggtgactaatgtgacgtcacttcttaagacagtgaaggccgtggaggatgaagccaccaagggcacccgcgcgctggaggccactactgaacatattcgtcaggagcttgcagttttttgctctcccgaaccaccagccaagacgtcaacccccgaggacttcatccggatgacaaaagggattacaatggctactgcgaaagctgtggcagcgggtaattcttgccgccaggaggatgtgatcgctactgctaacctgtcaagacgagctatagctgatatgctgcgtgcgtgcaaggaggctgcatatcatcctgaagtggctcccgatgtacggctgcgggctctgcattacggacgcgaatgtgctaatgggtaccttgaactgctggaccacgtcctcctcaccttgcagaagccatccccagagctgaagcaacagctcactggccacagcaagcgggttgcagggagtgtgacagagcttattcaagccgcagaggcaatgaagggaactgaatgggttgaccccgaagacccaaccgtaattgccgagaatgagctgctcggcgctgcagcagcaattgaggccgcagcaaagaaattggagcagctgaagcccagggccaagccgaaagaagccgacgagtcactcaacttcgaggaacagatcctagaagctgctaagtccattgccgctgctacctctgccctcgtgaaggctgcatctgccgcccagcgcgagctggtagcccagggtaaagtgggggctatccctgcgaatgctttggacgacgggcagtggagccaggggctcatttcagcagctagaatggttgccgccgctactaacaatttatgtgaggctgcaaatgcagccgtgcaggggcatgctagccaggagaagcttatcagtagcgccaagcaggtagcagcctccacagcccagcttctggtggcctgtaaggtgaaggccgatcaggactccgaggctatgaagcgcctgcaggctgcgggtaacgcggttaagcgagcttcagacaacctggtgaaggctgcccaaaaggcagctgcattcgaggagcaggaaaacgagactgtggtagtaaaggaaaagatggtgggaggcatagcccagattatcgctgcgcaggaagagatgctgaggaaggagcgggaattagaggaagcaaggaagaagctagcccaaattaggcagcagcagtataaatttctaccatctgaacttcgcgatgagcattag

SEQ ID NO: 163534 - DNA, 7290 bp, Artificial Sequence
  derived and/or modified sequence
atggtggccctgagcctgaagatcagcatcggcaacgtggtgaagacaatgcaattcgaaccttcgaccatggtatatgatgcgtgtcgcattatcagggaacgaattccagaagcgcccgccggcccaccatccgacttcggcctcttcctcagcgatgacgatcccaaaaaggggatctggttggaggccggtaaagccctggactactacatgctgcggaatggagatacaatggagtacagaaagaagcagaggccactcaagatacgcatgctagacggcacagtgaagacaataatggtggacgacagcaagaccgtgaccgatatgctcatgacgatatgcgcacgcattggcattaccaatcatgacgagtactcgctggtgagggaattgatggaggagaaaaaagaggagatcacaggcacactgcgaaaagataaaaccctgttgcgcgatgagaagaagatggagaaactgaagcagaaactgcacactgacgatgagctgaattggctcgatcacggccggacgcttagagaacagggggtggaggaacacgagacattactgctgagacggaaatttttctattccgatcagaacgtggattctagagacccggtccagctgaacttattatatgtgcaggcccgcgacgacattttaaacggctcccatcccgtgtcatttgacaaagcctgcgagttcgctggtttccaatgccagatccaattcggaccccacaatgaacaaaaacataaggccggtttcctggatcttaaagactttttacccaaagagtatgtgaaacagaaaggtgaacgcaagatcttccaggcccataaaaactgtgggcagatgagcgaaatcgaagctaaggttagatatgtgaaactcgcgcgatccctcaagacttatggcgtgtctttcttcctcgtgaaagagaaaatgaaaggcaagaacaaactcgtccccaggctcctggggattaccaaagagtgcgtcatgcgcgtcgacgagaaaactaaagaagtgattcaggagtggaatctgaccaacattaaacgctgggccgcgtcccctaaaagtttcaccctggactttggtgattatcaggatgggtattactctgtgcagaccacggagggagagcagattgcacaactgatagcaggatatattgacattatcctcaagaagaaaaagtctaaagatcatttcggattggagggtgatgaagaatccacaatgcttgaggacagtgttagccccaaaaagtcaacagtgctgcagcagcagtataatcgtgtagggaaggtggaacacggttccgtggctctaccagccattatgagatcgggagcttctggaccggagaacttccaggtggggagcatgcctcctgcgcaacagcagattacctcaggccagatgcaccgcggacacatgccccccctgacttcagcacagcaggctctcacagggacgataaactcaagtatgcaggcagtgcaggctgcccaggccactctggacgactttgatacattgccaccactgggacaggacgccgcgtcgaaggcctggagaaagaacaaaatggatgaatccaagcacgagattcattcacaggtcgacgccataaccgccggcaccgctagtgtcgtaaacttgaccgccggggacccggccgaaactgactacacagcggtgggctgtgctgttacaaccattagcagcaacctcacagagatgtcgcgcggagtcaagcttctggctgcgctgctggaagacgaggggggctctgggcgacccctcctgcaggcggccaaagggctagccggagccgtgtccgaattgctcagatctgcccagcccgcaagcgccgaacctcgccaaaacctgttgcaggcagctggaaacgtggggcaggcctccggggaactgttacaacagataggcgaaagcgatacagacccacacttccaggacgccctgatgcagctcgcaaaggctgtggcctctgccgccgccgctctcgtgctcaaggcgaaatcagtagctcagcgcacggaggactccggtctgcaaacccaggtgatcgctgctgctactcagtgcgccttgagtactagccaactagtcgcatgcacaaaagtggtagctcctactattagcagtccagtttgtcaagagcagttggtagaagctgggcggctggtggcgaaggcggtggaaggatgcgtatcagctagccaggcagccactgaagatggacaactgctgagaggtgtaggagcagcggctactgccgtgacacaggcgctcaatgaattgctgcagcacgtcaaagcacacgcgaccggtgcaggacccgccgggaggtatgaccaggcaactgacacgatcttaacagtgacagagaacattttctcctccatgggggacgcaggcgagatggtgcgtcaagctcgcatcctcgcccaggcaacatccgacctggtcaacgctatcaaggcagacgctgaaggtgagagcgatttggaaaattcaagaaaactgctgtccgccgcgaagatcctggcagacgctactgccaaaatggtggaagccgctaaaggcgctgccgctcaccccgatagtgaggagcagcaacaaaggttgcgcgaggctgctgagggtcttcggatggctacgaatgctgccgcacagaatgctattaagaaaaagctggtccagagactggaacatgccgcgaaacaggctgctgcgtcagcaacccagaccattgccgctgcccagcacgcagcaagtacccccaaagcatctgcaggtccacagccattgctggtgcagagttgcaaggcagtcgctgagcaaatccctttacttgtgcagggagtacggggatcccaggctcaaccagacagtccatccgcccagctagccttgatcgctgccagtcagagttttctccaacctggaggtaagatggtggccgccgctaaggccagcgtcccaactatccaggaccaagcttcagctatgcaattaagtcagtgcgcgaagaacctgggcactgctctcgctgagttgcggacggcggcccagaaggcccaggaggcctgcggacccctcgagatggactctgcactctctgtggtgcagaaccttgaaaaagatctgcaggaagtaaaagccgccgcacgggacggtaaactgaagccccttcctggcgagaccatggaaaaatgtacacaagatctcggcaactctaccaaggctgtgtccagcgccattgcccagttactcggcgaggtagcgcaaggcaatgaaaattacgctggaattgccgcccgcgatgtcgcggggggactcagatcactcgcacaggcagccaggggcgtcgccgcccttactagtgaccctgcagtacaggcaatcgtcctcgacacagcaagcgacgtgctggacaaggcttcgtccctcattgaggaggccaagaaggccgccggtcacccaggtgacccagagtcccagcagcgactcgcccaggtggccaaggccgtgactcaggccctgaaccgttgcgtcagctgcttacccggacagcgggacgtggacaacgcgctccgggccgtaggcgacgctagcaaaaggttactgagtgattccttacctccctccactgggacattccaagaggcacagagcaggctaaatgaggcggctgccggcttaaatcaggcagccacagaacttgttcaagcaagcagggggaccccgcaggatttggcccgtgcctctggcaggtttgggcaagacttctctacgtttctggaagctggagtggaaatggcaggccaggcgcctagccaagaagacagggcccaggtggtttccaacttgaagggcattagcatgagcagctccaagttgttgctcgcagcaaaggctttatcgactgatcccgccgcacccaatcttaaaagccagctggctgccgccgccagagctgttactgacagcatcaatcagctgatcacgatgtgcacccaacaggctccggggcagaaggagtgcgataatgcactccgggagctagagacagttcgcgagttgctggaaaatccagtccagccgatcaacgatatgtcttactttggatgcctagactctgtgatggagaattctaaagtgttaggcgaggctatgactggaatctctcagaacgccaaaaatggcaatctgccagaatttggcgacgccattagcaccgcatccaaggccctgtgtggattcaccgaagcggctgcgcaagctgcatatttagtgggggttagtgatcctaatagccaagctgggcagcagggcctggtggaacctacccagttcgctcgggccaatcaggctatacagatggcgtgccaatctctgggagaaccaggctgcactcaggcccaggtgctgagcgcagccacaatcgttgccaagcatacttcagcattgtgcaacagctgtagactggctagcgctcggaccacaaaccctactgcaaagaggcaatttgtgcagtcagcgaaggaagttgctaatagtactgctaacctcgtgaaaaccatcaaagctctggatggtgcctttactgaggaaaaccgggcacaatgtcgggctgcgactgcccccctattggaggctgtggacaacctttctgcattcgcctcaaatcccgagttctcatccatacctgcccagattagcccagaggggcgagcagccatggaacccatcgtgataagtgccaagaccatgctggagagtgctggaggtttgattcagactgcacgtgcactcgccgtcaatcctcgcgaccctccaagctggtcagtcctcgcagggcactcgaggacagtcagcgatagcattaagaaactgatcacaagtatgagagacaaggctcctggacagttggaatgcgagaccgctattgctgctttaaattcttgcctgcgtgaccttgaccaagcttcattggcagcagtctctcagcaacttgcacctctgcaagaaatctctcatcttatcgagcctcttgcaaacgccgcgagggcggaagcctctcagctagggcataaggtgtcccaaatggcgcaatactttgagcctttgacattagccgccgtcggcgcagcttctaaaacactctcccatccccagcagatggctctcctcgaccagacgaaaacgctggctgaaagtgcactccagctcctttataccgctaaggaagctggcggcaatcccaaactggatgaggggccaatgggggaaccagagggaagctttgtcgactaccagaccacgatggtcaggactgcaaaggctatcgccgtcacggttcaggagatgatcggctctcatattaagcaccgggtgcaggagctgggtcatggctgcgccgccctcgttacgaaagccggtgccctccagtgcagccctagcgacgcgtatacaaagaaggagctaattgaatgcgccaggcgggtgtccgagaaggttagccatgtgttggccgctctgcaagctggtaaccgtggcacccaggcgtgtatcactgcagctagtgcagtgagcggcattattgccgacttggatacgaccatcatgttcgcgaccgctggcactttgaacagagagggcacagaaactttcgcagatcacagagaagggattcttaaaacggctaaggtcttggttgaagacactaaggttttggtgcagaatgctgccggatcacaggaaaaactggctcaggcagcccaatcgtcagttgcgactattaccaggctggctgatgttgtcaaacttggagccgcctcacttggcgctgaggaccctgaaacccaagttgtgctgatcaatgccgttaaagatgtcgcaaaggcgttgggcgacctcatatcagcaactaaggcagccgcaggcaaggtaggcgacgaccccgcggtatggcagttgaaaaattctgccaaagtcatggtcaccaacgtgacttccctgctgaaaacagtcaaggccgttgaggacgaagccaccaagggcacgcgggcactggaggccaccaccgaacacatccgtcaagagctggctccgccggcaaaaaccagtacccctgaggacttcatccgtatgactaagggcattactatggcaactgccaaagccgtggcagccggaaacagttgcaggcaagaggacgtgatagccactgctaacctgagtaggcgggctatcgcggatatgctccgcgcttgtaaggaagctgcctatcatccagaggtcgcacctgacgttagattaagagccctgcattacggccgcgaatgtgctaatgggtacctggaacttctggatcatgtgctgctgacactgcagaagccaagccccgagctcaagcagcagctgaccgggcactccaagagggtggcgggatccgttactgaactcattcaggccgccgaagccatgaaaggtacagagtgggttgatccagaagatccaaccgtaattgctgagaatgaattgctgggagctgcagccgcaatcgaggctgcagccaagaaactagagcagcttaaacctcgtgctaagccaaaggaggcggacgagtctctgaattttgaggagcagattctggaggcagcgaaaagcatcgccgcggccacttctgcactggtgaaagctgcatctgccgcacagagagagctagtggctcaagggaaggtcggagctattccggctaatgcgttagacgatggtcagtggtcgcagggcctgatctcagccgcacgaatggtcgccgccgccacaaacaatttgtgtgaagctgccaatgcagcagtccaaggacacgctagccaggagaagttgatcagcagcgcaaaacaggtggccgcgtctacagcacaactgctggtggcctgtaaggtcaaggcggatcaggatagcgaggcaatgaaaaggctgcaggcagcgggaaacgctgtgaaacgcgcttccgataatctggtgaaagcagcacaaaaagctgccgctttcgaagagcaggagaatgagacagtcgttgtgaaggagaagatggtcggcggtatcgcacagattattgccgcccaggaggaaatgctgcgaaaagagagggagctagaggaggcaagaaaaaagctagcacaaattcggcaacagcagtacaagtttttgcctagcgagctgagggatgagcattag

SEQ ID NO: 163535 - DNA, 7625 bp, Artificial Sequence
  derived and/or modified sequence
atggtcgcgctgagcctcaaaataagtattggaaacgtcgtcaaaactatgcagtttgagcctagtaccatggtttacgatgcatgccggataattagggaacgcattccagaggctccagccggacctccgagcgacttcgggctgttcctgagcgatgacgacccgaaaaagggtatctggctggaggcagggaaagcactggattattatatgctcagaaatggagacacaatggagtaccgtaagaagcagaggcctctgaaaattagaatgctcgacggtactgtgaagaccattatggtagacgattctaagaccgtgactgacatgctgatgaccatctgtgccaggattggcattacaaatcacgatgaatatagcctggtgagggaactgatggaggaaaagaaagaggaaatcacggggactctgcgcaaagataaaaccctgctccgagacgaaaaaaagatggaaaaactcaaacagaagctgcacactgacgatgaactcaattggctggaccatggaagaactctcagggagcagggtgttgaggagcatgaaacacttctgctgcggagaaagttcttttatagcgatcaaaatgtcgattctcgggatccagtgcagctaaacctgctgtacgtccaagcacgagacgacatcctgaatggctcccatccggtttcctttgataaagcatgtgagtttgccggttttcagtgccagatccaattcgggccacataatgagcagaaacataaagccggatttttggacctgaaggacttcctcccaaaggagtacgtcaaacagaagggggaacggaagattttccaggcccacaaaaactgtgggcagatgtctgagattgaggcaaaggtgaggtatgtgaagctggcgaggagtttaaaaacctatggagtgagcttcttcttggtaaaggaaaagatgaagggcaagaataagctcgtgcccagactcctgggaattactaaggaatgtgtgatgagggtcgacgaaaagactaaagaagtgatccaggagtggaatttgacaaatatcaagaggtgggcagctagtcctaaatcattcacactggacttcggcgattaccaggacggatattatagcgtccagactacggaaggcgaacagatagcacagcttatagccggttacattgatatcatactgaaaaagaagaagagtaaagaccattttggtctggagggagacgaagagagcacgatgctggaagatagcgtgagccctaaaaaatccactgtgctgcaacagcagtacaatagggtggggaaagtggagcacggcagcgtcgctctcccagccataatgcgatcaggagcatctggcccagagaacttccaggttggttctatgccgccagcacagcaacagataaccagcggccaaatgcaccgtggccacatgcctccactgacatccgcccagcaggcccttaccggaactatcaattcatcgatgcaggcggtccaggctgcgcaggctactctggatgactttgatacgctgcccccactgggacaggacgccgctagcaaggcctggaggaagaataagatggatgagagcaagcacgagattcatagccaggtggatgccatcacagctggcacagcaagcgttgtgaaccttacagcgggtgacccggctgagaccgactatactgcagtaggatgcgctgtcacaaccataagctcgaacttgactgaaatgtcacgaggcgttaagctactcgctgctctgctcgaggacgagggaggaagcggcaggccgctgctacaggccgcaaagggcctggcgggagctgtaagcgaattactgcggtctgcccaaccagcgagtgctgaacccaggcaaaacctgctgcaggctgccggaaacgtcgggcaggcaagtggagagctgttgcagcaaataggagaaagtgacaccgatccccatttccaggacgccctgatgcaactcgccaaagctgtcgcatcggctgccgcagctcttgtcctgaaggccaagtctgtcgctcaacggacggaagacagcggactacagacgcaggtgatcgcagccgcaactcagtgcgctctgtctacctcgcagttggtggcctgcacgaaagtggttgcccctacgatttcaagccccgtttgtcaggagcaactggtggaggcgggtcgactcgtggcaaaggctgtcgagggctgcgtcagtgcatcgcaagcagctactgaagacggacagctgctgcggggtgtgggggcagctgcaaccgctgtgacccaggccctcaacgaactcctgcagcatgtcaaggctcatgccaccggagcgggtcccgctggacgatacgatcaggcgactgacaccatcttgacggtgaccgaaaacatcttttctagcatgggcgacgccggtgaaatggttcgccaggctcgcattctggcccaagctacctccgatctagtgaacgcaattaaagcagatgctgagggagaatctgacctggaaaatagcagaaagcttctgagtgctgccaagatcctcgccgacgccactgccaaaatggtggaggcagctaagggtgcagccgctcatcctgattcagaggagcagcaacagcgtttgagagaggctgccgaaggtctgagaatggccacgaatgccgctgcacaaaatgcaatcaagaagaaattggtccagcgcctcgagcatgccgcaaagcaggccgcagccagcgccactcagaccattgcggctgcccagcacgccgcatccacaccaaaagctagcgccggaccacaacccctgttggtacagagttgcaaagccgtggcggagcagattccactacttgtgcaaggagtgcgagggtcccaggcccaaccagacagtccaagcgcccaactcgcgttgatcgccgcttctcaaagcttcctgcagcctgggggaaagatggttgcagccgctaaggcttccgtacctacaatccaagaccaggcctccgcgatgcaactgtcccagtgtgccaagaacctcggtactgcccttgccgagctccggacggccgctcaaaaggcccaggaagcgtgcggccctttggaaatggattcggcattgagcgtcgttcagaatctggaaaaagaccttcaagaggtgaaagctgcagcgcgtgacggaaaactgaagcccctgccaggggagaccatggagaaatgtacccaggacctcggcaacagtacaaaggccgtgtctagcgccatagcacagttactgggggaggttgcgcaggggaacgagaactatgccggtatcgcagcgagggacgtggcaggagggctcagaagtctagcccaggctgcgaggggcgtggccgcactgacaagtgaccccgcagtgcaggcaatcgtgctggataccgcctctgatgttttggataaggcaagtagcctgatcgaagaagctaaaaaagcagccggtcaccccggtgacccagaatcgcaacaaagattagcccaggtcgcgaaggccgtcactcaggcccttaatcggtgcgtctcctgcctgcccggacagcgcgatgtcgacaacgccctcagagccgtgggtgacgcgagcaagaggttgctgtctgattcactgcccccatcaaccgggaccttccaggaggcacagtcccgtctgaatgaggccgcagccggtctgaatcaggcagcaacggaactggtgcaggcctcacgcggaactccacaggaccttgcgcgagcgtctgggcgattcggacaggatttttcaactttccttgaggcaggggtggagatggccggtcaggccccttctcaggaagaccgggctcaggtggtgtccaatctgaagggcatcagcatgagtagctctaaactgctcctggccgcaaaggcactttcgaccgatcctgccgctccaaacttgaagagccagcttgccgcagccgctagagccgtgaccgattcaatcaaccagcttatcacaatgtgcacccaacaagctcctggccagaaggaatgtgataacgccttgcgggagttggaaaccgtcagagaactcctggaaaacccagtccaaccgatcaatgatatgtcctattttggatgtctggacagtgtgatggaaaactccaaggttctgggcgaagcgatgacaggtataagtcaaaatgccaaaaacggtaacttgccagagttcggagatgctatctcgactgccagcaaggctctgtgcggcttcacggaggccgctgcccaggcagcttacttagtgggagtcagtgaccccaactcgcaggctggccagcaggggctcgtggagcccacccagttcgctcgggctaatcaagccattcagatggcttgccagtctcttggcgaacctggttgcacccaggctcaggttctgagcgccgctaccatcgtggcaaaacacacctccgccttgtgcaactcttgcagactcgcatccgcgaggacaaccaatcctacagccaaacggcagttcgtccaatccgccaaggaagtggccaatagtacggcaaaccttgtgaaaacaattaaggccttggacggcgcatttacggaggagaaccgcgcacagtgcagggcggctacggcccctctgcttgaagcagtggataacttgtccgctttcgcgtcgaatcccgagttttcaagtattcctgcccagattagtcctgagggccgtgcggctatggaacctatcgtgattagcgctaagacgatgttggagagcgcgggtggactgattcaaacagctagggcgctggctgtgaatccaagagaccccccaagttggagcgttctggccggacattcccgcactgtatcggattccattaaaaaactgataactagtatgcgggacaaggcccctggacagttggaatgcgagactgctatagctgctctgaactcctgcttgcgagacttggaccaagcttcactggcggcagtgtctcaacagctggccccacgtgaggggatttcacaggaggccctccatacacaaatgctaactgctgtccaggaaatcagtcaccttatcgaacctctggcaaatgccgcacgggcagaggctagtcagctgggccacaaagtctcacagatggcccaatatttcgagcctctgacacttgccgctgtgggtgccgctagtaaaactttgtcacatcctcagcagatggcacttcttgaccagaccaaaactttggcggagtccgccctgcagctactttacaccgctaaggaggctggcggaaatcccaaacaggccgcacacacccaggaagcccttgaggaggccgtgcagatgatgactgaggctgttgaggatttaaccacaacactaaatgaggccgcatctgccgcaggtgtggttggcggaatggtggacagcatcacgcaagctattaaccaacttgatgaaggaccgatgggggagccagagggctcattcgtggactaccagaccacaatggttagaacagctaaagccatcgctgtcaccgtgcaggagatggtgaccaagtccaacaccagtcccgaggagcttgggccattggctaaccaactaacctcggattacggaagacttgcttcggaggcgaaaccggctgctgtggctgctgaaaatgaagaaattgggtcacacatcaaacatagggttcaggaactcggacacggatgcgcggcactagttaccaaagccggtgctcttcagtgtagcccctcagacgcatacacaaagaaggaactcatcgagtgcgctagacgagtgtccgaaaaagtcagtcacgtcctcgctgccctacaggccggaaataggggcacccaggcttgtattacggcagctagcgcagtgtctggcattatcgcagacttagacaccacaattatgtttgcgaccgcaggaactcttaaccgggaaggaaccgagacattcgcagatcatagggaaggcatcttgaaaactgcaaaggtgctcgttgaggatacgaaggtgcttgtgcaaaatgcagcaggtagccaggaaaaactagcccaggccgctcagtcaagcgtcgctacaataacccggctggccgatgttgttaaactgggagcagcctcactcggggcagaggaccccgagacgcaggtagtgctgatcaatgccgttaaggacgtagctaaggctcttggagaccttatcagcgctactaaggcagcagcgggtaaggtgggtgacgatcctgcagtgtggcaactaaaaaattccgctaaggtgatggtcaccaatgtcacttcacttctgaagaccgttaaggctgtggaagacgaagctacaaaagggacccgagccctggaagccacaacggagcacatcagacaagagctcgccgtcttctgcagtccggaaccacccgcaaagacatcaacacctgaggactttatccgaatgacgaaaggcatcaccatggctactgcaaaggcggtcgcagcaggaaatagttgcaggcaggaagacgtaattgcgactgccaatctaagtcggagggcaatagccgacatgctgagagcatgtaaagaggctgcttaccatcccgaagtcgctcctgatgtacgactgagagctctgcactacggaagagagtgtgccaatgggtacttggagctgttagatcacgtcctcctgaccttacagaagccctccccagagcttaagcagcaattgaccggacattctaagagggtggccggatctgtaacagagctgatacaagcagcagaagccatgaagggaactgaatgggtagatcctgaagatcctaccgtgatcgccgaaaacgaactcctgggagccgcagccgctatcgaagcagccgctaaaaagctcgagcagctgaagcccagagccaaaccaaaggaggcagatgagtccctgaattttgaagaacagattctggaggccgctaaaagcatcgctgctgcaacgtccgccctggtcaaggcagcctccgcagctcaacgagaactggttgcgcaggggaaggtgggcgctatccccgcaaacgcactcgacgacggtcagtggtctcagggcctgataagtgctgcaagaatggtggctgcagcgacaaacaacctgtgtgaggccgctaacgctgcagtgcaaggtcacgcttcacaggagaaactcatctcatcagcaaaacaagtagctgcttctaccgcacagctcctggtagcctgcaaggtgaaggccgaccaggatagcgaagctatgaaaagactccaggccgctgggaatgctgtgaagcgggcatcagacaacctggtaaaagccgctcagaaagctgccgcttttgaggaacaagaaaatgagactgtcgtcgtaaaagagaaaatggtgggcggaatcgctcagatcatagcggcacaagaggaaatgttgagaaaagagcgggagctggaagaggctcgaaaaaagcttgcccagatccggcagcagcaatacaaatttctgcctagcgaactgagagacgaacatta

SEQ ID NO: 163536 - DNA, 7289 bp, Artificial Sequence
  derived and/or modified sequence
atggtcgctctgtccttgaaaataagcataggaaacgtcgttaaaacaatgcagttcgaacctagtaccatggtctatgatgcttgccgcattattagggagcgtatccctgaagccccagccggtcccccaagtgactttggcctgttcctgtcagatgatgatccaaagaaagggatctggctggaagccggaaaagcgctggactattatatgctgcgtaatggcgatactatggagtacaggaagaaacagcgaccactgaagattagaatgctggatggaaccgtaaaaactataatggtggacgactcaaaaaccgtgaccgatatgcttatgacaatctgcgccagaatcgggataacaaatcatgatgagtacagtctcgttagagaacttatggaagaaaagaaggaggaaataaccggcactcttcgaaaggacaagactctgcttagggacgagaagaaaatggagaagctcaagcagaagctgcatacagacgatgagctgaattggctggatcatggcaggaccctgagggaacagggggttgaggaacacgaaacacttctattacgccgtaagttcttttactccgaccagaatgtagacagtagagatcccgttcagcttaatctgttatacgtgcaagcacgtgacgacatcttgaatggatcccacccagtttccttcgataaagcatgtgagttcgctggcttccagtgtcaaattcagttcgggccacacaacgaacagaaacacaaggccggttttctggatcttaaagacttcctacctaaagaatatgtcaagcagaagggcgagcggaagatatttcaggcacacaaaaactgtggacagatgagcgaaatagaagctaaggtccgctacgtgaagttggccaggtcccttaaaacgtatggggtgagttttttccttgttaaggagaagatgaaaggcaaaaataaactggttccacggctgctgggtataacgaaggaatgcgtcatgcgggtggacgaaaaaaccaaggaggtcatccaagagtggaatttgaccaacatcaaacgttgggcagcctcgcccaaatcattcaccctcgactttggcgattaccaggacgggtattacagcgtccagacgacagagggcgagcagatcgctcaactcatagccggatacatcgatatcatactgaagaagaaaaagtctaaagatcattttggtctggagggtgatgaagaatccacgatgttggaggatagtgtgtccccaaaaaagtccacagtgttgcaacagcagtacaatcgagtgggtaaggtggagcacgggtccgttgcactccctgctatcatgcgctctggcgctagtggccctgagaatttccaggtgggctcaatgcccccagcccagcaacagattacaagtggacagatgcacagaggtcacatgccccctctgaccagcgcacagcaggcgctgaccggaacgatcaattcctcaatgcaagccgtgcaagctgcccaagcaactctcgacgattttgacacgctgccaccgctgggccaagacgcagcctccaaagcgtggagaaagaacaaaatggacgaatcgaagcacgagattcatagtcaggtcgatgctataactgctgggaccgcctcagtggtgaacttaacggccggagacccggcagagacagactatacggccgtgggctgtgcggttactacgatatcctctaacctgacagaaatgtccaggggtgtgaaactcttggccgcactcttagaggacgaaggtggatcagggagacctctcttacaggccgcaaaaggattggccggagcagtgagcgagctgctccgcagtgcacaacccgcaagcgctgagccaaggcagaatttactgcaagccgctggtaatgtggggcaggcatcaggggagctcctccaacagattggagaatcagatacagacccacactttcaggacgcccttatgcagttggcgaaagccgtcgcatcagcagcggcagcgctggtgctgaaagccaagtccgtagcacaacgaacggaggacagcggtctccagacccaagtcatagccgctgcaacacaatgtgccttgtcaacatctcagctagtcgcctgcactaaggtggtagcgcctacaattagttccccggtgtgccaggagcagttggtggaagccggacggctggtggcaaaggctgtggaaggatgtgtgagcgcctcgcaagccgctaccgaggacggtcagttgttacggggagtcggggctgccgctaccgccgtcactcaggcgctcaacgagcttcttcagcatgtgaaggcgcatgccacgggcgcaggacccgcaggacgatatgatcaggctacagatacaatccttacagtgacagaaaacatattctcctccatgggggatgccggtgaaatggtccgacaggcaaggattctcgcccaagctacatccgacttggtgaatgcaatcaaagctgatgccgagggggaatcggacctggagaattctagaaagctactctcggcagccaagattctggctgatgcaaccgccaaaatggtggaggctgcaaaaggcgcagctgcccatccggacagcgaggagcaacagcagcggctgcgcgaagccgcagagggtctgagaatggccacaaatgcagccgcacagaacgcaatcaagaagaaactggtccagcgcctggagcatgcagctaaacaggcggctgcctcagccactcagacgattgccgcagcccaacacgccgcatccactcccaaggcgtccgcaggacctcaacctttgctggtgcaaagttgcaaagcagttgccgagcagattcccctgttggttcagggcgtacgtggaagtcaggcgcagccagacagcccaagcgcccagctggctctgatagccgcaagccagtctttcctgcagcccggaggcaaaatggtggccgcagcaaaggctagcgtgccgacaattcaagaccaggcatctgccatgcagctgtcccaatgcgctaagaatcttggcactgccttagctgaactacgcactgctgcacagaaggcccaggaagcttgcggccctcttgagatggactcggccctgtctgtggtccagaacctggagaaggacctgcaggaagtcaaggctgcggctcgggatggtaagctaaaacctctgcctggggagactatggagaagtgtacgcaggatctgggcaacagcaccaaggctgtgtctagcgccatagcccagctgttgggcgaagtggctcaggggaacgagaactatgccggtatcgctgctcgagacgttgccggtggtctcaggtcactggcacaggcggcacgaggtgtagcagctctaacaagtgaccctgcagtgcaggcaattgtgcttgacactgccagcgacgtgctggataaagccagctcccttatcgaggaagccaaaaaagccgcaggccaccccggagacccggaatcacagcagcggctagcccaggtggcgaaggcagtcacccaggccctcaaccgatgcgtcagttgtctgcccggtcaacgtgatgtggacaatgccctcagagctgtaggtgacgcttctaaaaggttgctaagcgatagcctgcccccatcgaccggtacattccaggaggctcaatctaggctaaacgaggccgcagcagggctgaatcaagcagctactgagctcgtccaggctagtagaggcactccccaggatcttgcgagagcttccggcagatttggccaggacttcagcaccttcctggaagccggagtggagatggcaggacaagctccgagtcaggaggatagggcccaggtggtgagcaacctcaaaggaatctccatgagctcttccaagcttctgctggccgctaaggcactgtccaccgaccccgcagctcccaacctgaagagccaactggccgctgcggctagggccgtgaccgacagcataaaccaacttatcaccatgtgcacacagcaggcacccggtcagaaagagtgcgacaatgccctcagggagcttgaaaccgtacgcgagcttctcgagaatcctgtacagcccatcaatgatatgtcctattttggatgccttgatagcgttatggaaaactccaaggtgctgggtgaggcaatgactggaatttcacaaaacgccaagaacgggaatttgcctgagtttggcgatgcaattagcacagcttctaaagctttatgtggctttacagaagctgctgcccaagctgcatatcttgtgggcgtcagcgaccctaacagccaggcgggtcaacaggggctggtggaacctacacaatttgcacgcgcaaaccaggccatacaaatggcatgccagagtttgggggagcccggttgcacgcaggctcaagtgctgtcagctgccacgattgtcgccaagcatacttctgccttgtgcaattcctgtaggttggcctccgccaggacaaccaaccctactgctaagcgccagttcgtgcagtctgccaaggaggtggccaacagcaccgcaaatcttgtgaagacaatcaaagctctggacggcgcatttaccgaagaaaatcgggctcagtgtcgggcagctaccgctcctctgcttgaggccgtggacaacctgagtgcctttgctagtaatcccgagtttagctctattcctgcgcaaatctcacccgagggtcgtgcggcaatggagcccattgttatcagcgcaaaaacgatgctggaatctgcaggaggcctgattcagacggccagggcgctagcagtgaatcccagagacccaccaagttggtccgtgttggccggtcactcgcgaaccgtcagcgattccattaagaaactgattacttcaatgagggacaaggcccctggacagctagaatgcgaaaccgccattgctgctttgaattcgtgcctacgtgacctggatcaagcttccttggcagccgtctcccagcagctcgcccctctccaggagatatcccatttgatcgagcctctggctaacgcggctcgcgcagaggcttcacagcttgggcacaaagtatcccagatggcacagtacttcgaaccccttacgctcgcagccgtcggcgcagcgtcaaagacactctcccatccacagcagatggctctgctggatcaaactaagacgttggctgagtccgctttgcagctgttgtatactgccaaagaagctgggggaaacccaaagctcgacgaggggcctatgggagaacctgaaggcagttttgtggattatcagacaaccatggtgcgcaccgctaaagccattgccgtaactgtccaggagatgatcgggtcccacatcaaacatagggtccaggagctcggacatggatgcgctgcactggtgacaaaggcgggtgcacttcagtgtagcccgagtgacgcctacaccaaaaaggagctaatcgagtgtgccagaagagtcagcgagaaggtctcccatgttcttgccgctctccaggcaggtaatcggggaacgcaagcctgcatcacggccgcaagcgcagtgagcgggataattgccgatttggatacaactataatgtttgccactgcgggaacgttgaacagggaagggacagaaaccttcgccgaccaccgagaaggtatactaaagactgcgaaggtactggtagaggacactaaggtactggtccagaatgcagccggatcccaggaaaagctggctcaggccgctcagtcatcagtagcaactattactcggcttgccgacgtcgtgaagctcggcgcagcgtctctgggtgccgaagatcctgaaacacaagttgtcctgattaatgcagtgaaagatgtagctaaggcgctgggagatctcatctctgcgacaaaagccgcagccggaaaagtcggcgatgaccctgctgtgtggcagctcaaaaactcggccaaagtgatggtgaccaacgtcactagcctccttaagacggtgaaggctgttgaagatgaagcaactaagggaacgcgagctctggaggccactactgagcatatcaggcaggaactggcgcctcccgctaagaccagcacgcccgaggactttatccgcatgactaagggcatcacaatggcaacagcaaaagctgtggccgctggcaattcttgcaggcaggaggacgtcattgccacagccaatttatcgcgtcgcgctatagccgacatgctgcgagcttgtaaggaagccgcataccaccccgaggttgcaccggatgtcagactcagggcactgcattatgggagagagtgtgcaaatggataccttgaactactggatcacgttctattgaccctccagaaacctagccccgagctgaagcaacagttaacggggcacagcaagcgggtagcgggaagcgtcacggagttaatccaggctgcagaagctatgaaggggaccgaatgggtagatccagaggatcccactgtcatagccgaaaacgagttgctcggcgctgccgcagccatcgaggcagccgctaagaaactcgagcagttgaaacccagagccaagcctaaagaggccgatgagagcctcaacttcgaggagcaaatcctcgaagctgctaagagtatcgcagccgctacttccgcgctcgtgaaggcggctagtgctgcccagcgcgagctagtcgcacagggaaaggtcggagctattcctgcaaacgctctggatgatggccagtggtcgcagggacttatcagtgccgctcgcatggtagcagcagccacaaacaatctctgcgaagcagccaatgctgccgtccaggggcacgctagccaggaaaagttaatctcttcagcaaaacaggtcgcagctagtacagctcagcttctcgttgcgtgcaaggtgaaggcggaccaggacagtgaggccatgaaacgcttacaagccgcagggaatgcagtcaagcgtgcgagtgacaatcttgtgaaggccgctcagaaagccgctgcattcgaagagcaggaaaatgaaaccgtggtggtgaaagagaaaatggtggggggaatcgcccagataattgccgctcaggaggagatgctgcgcaaagagcgcgaattggaggaagccaggaaaaagttggcccagatccggcagcagcagtataaattcctcccttcagaactgagagatgagcacta

SEQ ID NO: 163537 - DNA, 8823 bp, Artificial Sequence
  derived and/or modified sequence
ggaagagttctagcctgaaagggaactcgggcgtcgtcctggcgtcctctccggattgcgccgcaccctcgcttcctgccagggaggggctgccgggctttggcggctcccgagcatcgagaacggggccagagcagcttcctgcctgccccccgcgaccatagagcgcgggcccagggcgccgcccgcgggtgggggacgttcccaggacggaagtggccgagagagtgtcgaagggagggcgaggccggagcccgagggcgacccgagaagcggcggggcggcgggccggcgggcggggcgcagagccaggcagcgcaggtatagccaggctggagaaaagaagctgccaccatggttgcactttcactgaagatcagcattgggaatgtggtgaagacgatgcagtttgagccgtctaccatggtgtacgacgcctgccgcatcattcgtgagcggatcccagaggccccagctggtcctcccagcgactttgggctctttctgtcagatgatgaccccaaaaagggtatatggctggaggctgggaaagctttggactactacatgctccgaaatggggacactatggagtacaggaagaaacagagacccctgaagatccgtatgctggatggaactgtgaagacgatcatggtggatgactctaagactgtcactgacatgctcatgaccatctgtgcccgcattggcatcaccaatcatgatgaatattcattggttcgagagctgatggaagagaaaaaggaggaaataacagggaccttaagaaaggacaagacattgctgcgagatgaaaagaagatggagaaactaaagcagaaattgcacacagatgatgagttgaactggctggaccatggtcggacactgagggagcagggtgtagaggagcacgagacgctgctgctgcggaggaagttcttttactcagaccagaatgtggattcccgggaccctgtacagctgaacctcctgtatgtgcaggcacgagatgacatcctgaatggctcccaccctgtctcctttgacaaggcctgtgagtttgctggcttccaatgccagatccagtttgggccccacaatgagcagaagcacaaggctggcttccttgacctgaaggacttcctgcccaaggagtatgtgaagcagaagggagagcgtaagatcttccaggcacacaagaattgtgggcagatgagtgagattgaggccaaggtccgctacgtgaagctagcccgttctctcaagacttacggtgtctccttcttcctggtgaaggaaaaaatgaaagggaagaacaagctagtgcccaggcttctgggcatcaccaaggagtgtgtgatgcgagtggatgagaagaccaaggaagtgatccaggagtggaacctcaccaacatcaaacgctgggctgcgtctcccaaaagcttcaccctggattttggagattaccaagatggctattactcagtacagacaactgaaggggagcagattgcacagctcattgccggctacatcgatatcatcctgaagaagaaaaaaagcaaggatcactttgggctggaaggagatgaggagtctactatgctggaggactcagtgtcccccaaaaagtcaacagtcctgcagcagcaatacaaccgggtggggaaagtggagcatggctctgtggccctgcctgccatcatgcgctctggagcctctggtcctgagaatttccaggtgggcagcatgccccctgcccagcagcagattaccagcggccagatgcaccgaggacacatgcctcctctgacttcagcccagcaggcactcactggaaccattaactccagcatgcaggccgtgcaggctgcccaggccaccctggatgactttgacactctgccgcctcttggccaggatgctgcctctaaggcctggcgtaaaaacaagatggatgaatcaaagcatgagatccactctcaggtagatgccatcacagctggtactgcgtctgtggtgaacctgacagcaggggaccctgctgagacagactataccgcagtgggctgtgcagtcaccacaatctcctccaacctgacggagatgtcccgtggggtgaagctgctggctgccttgctggaggacgaaggcggcagtggtcggcccctgttgcaggcagcaaagggccttgcgggagcagtgtcagaactgctgcgcagtgcccaaccagccagtgctgagccccgtcagaacctgctgcaagcagctgggaacgtgggccaggccagtggggagctgttgcaacaaattggggaaagtgatactgacccccacttccaggatgcgctaatgcagctcgccaaagctgtggcaagtgctgcagctgccctggtcctcaaggccaagagtgtggcccagcggacagaggactcgggacttcagacccaagttattgctgcagcaacacagtgtgccctatccacttcccaactagtggcctgtactaaggtggtggcacctacaatcagctcacctgtctgccaagagcaactggtggaggctggacgactggtagccaaagccgtggagggctgtgtgtctgcctcccaggcagctacagaggatgggcaactgttgcgaggggtaggagcagcagccacagctgtcacccaggccctaaatgagctgctgcagcatgtgaaagcccatgccacaggggctgggcctgctggccgttatgaccaggctactgacaccatcctaaccgtcactgagaacatctttagctccatgggtgatgctggggagatggtgcgacaggcccgcatcctggcccaagccacatctgacctggtcaatgccatcaaggctgatgctgagggggaaagtgatctggagaactcccgcaagctcttaagtgctgccaagatcctagctgatgccacagccaagatggtagaggctgccaagggagcagctgcccaccctgacagtgaggagcagcagcagcggctgcgggaggcagctgaggggctgcgcatggccaccaatgcagctgcgcagaatgccatcaagaaaaagctggtgcagcgcctggagcatgcagccaagcaggctgcagcctcagccacacagaccatcgctgcagctcagcacgcagcctctacccccaaggcctctgccggcccccagcccctgctggtgcagagctgcaaggcagtggcagagcagattccactgctggtgcagggcgtccgaggaagccaagcccagcctgacagccccagcgctcagcttgccctcattgctgccagccagagcttcctgcagccaggtgggaagatggtggcagctgcaaaggcctcagtgccaacgattcaggaccaggcttcagccatgcagctgagtcagtgtgccaagaacctgggcaccgcgctggctgaactccggacggctgcccagaaggctcaggaagcatgtggacctttggagatggattctgcactgagtgtggtacagaatctagagaaagatctacaggaagtgaaggcagcagctcgagatggcaagcttaaacccttacctggggagacaatggagaagtgtacccaggacctgggcaacagcaccaaagccgtgagctcagccatcgcccagctactgggagaggttgcccagggcaatgagaattatgcaggtattgcagctcgggatgtggcaggtgggctgcggtcactggcccaggccgctaggggagtcgctgcactgacgtcagatcctgcagtgcaggccattgtacttgatacggccagtgatgtgctggacaaggccagcagcctcattgaggaggcgaaaaaggcagctggccatccaggggaccctgagagccagcagcggcttgcccaggtggctaaagcagtgacccaggctctgaaccgctgtgtcagctgcctacctggccagcgcgatgtggataatgccctgagggcagttggagatgccagcaagcgactcctgagtgactcgcttcctcctagcactgggacatttcaagaagctcagagccggttgaatgaagctgctgctgggctgaatcaggcagccacagaactggtgcaggcctctcggggaacccctcaggacctggctcgagcctcaggccgatttggacaggacttcagcaccttcctggaagctggtgtggagatggcaggccaggctccgagccaggaggaccgagcccaagttgtgtccaacttgaagggcatctccatgtcttcaagcaaacttcttctggctgccaaggccctgtccacggaccctgctgcccctaacctcaagagtcagctggctgcagctgccagggcagtaactgacagcatcaatcagctcatcactatgtgcacccagcaggcacccggccagaaggagtgtgataacgccctgcgggaattggagacggtccgggaactcctggagaacccagtccagcccatcaatgacatgtcctactttggttgcctggacagtgtaatggagaactcaaaggtgctgggcgaggccatgactggcatctcccaaaatgccaagaacggaaacctgccagagtttggagatgccatttccacagcctcaaaggcactttgtggcttcaccgaggcagctgcacaggctgcatatctggttggtgtctctgaccccaatagccaagctggacagcaagggctagtggagcccacacagtttgcccgtgcaaaccaggcaattcagatggcctgccagagtttgggagagcctggctgtacccaggcccaggtgctctctgcagccaccattgtggctaaacacacctctgcactgtgtaacagctgtcgcctggcttctgcccgtaccaccaatcctactgccaagcgccagtttgtacagtcagccaaggaggtggccaacagcacagctaatcttgtcaagaccatcaaggcgctagatggggccttcacagaggagaaccgtgcccagtgccgagcagcaacagcccctctgctggaggctgtggacaatctgagtgcctttgcgtccaaccctgagttctccagcattcctgcccagatcagccctgagggtcgggctgccatggagcccattgtgatctctgccaagacaatgttagagagtgccgggggactcatccagacagcccgggccctcgcagtcaatccccgggaccccccgagctggtcggtgctggccggccactcccgtactgtctcagactccatcaagaagctaattacaagcatgagggacaaggctccagggcagctggagtgtgaaacggccattgcagctctgaacagttgtctacgggacctagaccaggcttccctcgctgcagtcagccagcagcttgctccccgtgagggaatctctcaagaggccttgcacactcagatgctcactgcagtccaagagatctcccatctcattgagccgctggccaatgctgcccgggctgaagcctcccagctgggacacaaggtgtcccagatggcgcagtactttgagccgctcaccctggctgcagtgggtgctgcctccaagaccctgagccacccgcagcagatggcactcctggaccagactaaaacattggcagagtctgccctgcagttgctatacactgccaaggaggctggtggtaacccaaagcaagcagctcacacccaggaagccctggaggaggctgtgcagatgatgaccgaggccgtagaggacctgacaacaaccctcaacgaggcagccagtgctgctggggtcgtgggtggcatggtggactccatcacccaggccatcaaccagctagatgaaggaccaatgggtgaaccagaaggttccttcgtggattaccaaacaactatggtgcggacagccaaggccattgcagtgaccgttcaggagatggttaccaagtcaaacaccagcccagaggagctgggccctcttgctaaccagctgaccagtgactatggccgtctggcctcggaggccaagcctgcagcggtggctgctgaaaatgaagagataggttcccatatcaaacaccgggtacaggagctgggccatggctgtgccgctctggtcaccaaggcaggcgccctgcagtgcagccccagtgatgcctacaccaagaaggagctcatagagtgtgcccggagagtctctgagaaggtctcccacgtcctggctgcgctccaggctgggaatcgtggcacccaggcctgcatcacagcagccagcgctgtgtctggtatcattgctgacctcgacaccaccatcatgttcgccactgctggcacgctcaatcgtgagggtactgaaactttcgctgaccaccgggagggcatcctgaagactgcgaaggtgctggtggaggacaccaaggtcctggtgcaaaacgcagctgggagccaggagaagttggcgcaggctgcccagtcctccgtggcgaccatcacccgcctcgctgatgtggtcaagctgggtgcagccagcctgggagctgaggaccctgagacccaggtggtactaatcaacgcagtgaaagatgtagccaaagccctgggagacctcatcagtgcaacgaaggctgcagctggcaaagttggagatgaccctgctgtgtggcagctaaagaactctgccaaggtgatggtgaccaatgtgacatcattgcttaagacagtaaaagccgtggaagatgaggccaccaaaggcactcgggccctggaggcaaccacagaacacatacggcaggagctggcggttttctgttccccagagccacctgccaagacctctaccccagaagacttcatccgaatgaccaagggtatcaccatggcaaccgccaaggccgttgctgctggcaattcctgtcgccaggaagatgtcattgccacagccaatctgagccgccgtgctattgcagatatgcttcgggcttgcaaggaagcagcttaccacccagaagtggcccctgatgtgcggcttcgagccctgcactatggccgggagtgtgccaatggctacctggaactgctggaccatgtactgctgaccctgcagaagccaagcccagaactgaagcagcagttgacaggacattcaaagcgtgtggctggttccgtcactgagctcatccaggctgctgaagccatgaagggaacagaatgggtagacccagaggaccccacagtcattgctgagaatgagctcctgggagctgcagccgccattgaggctgcagccaaaaagctagagcagctgaagccccgggccaaacccaaggaggcagatgagtccttgaactttgaggagcagatactagaagctgccaagtccattgcagcagccaccagtgcactggtaaaggctgcgtcggctgcccagagagaactagtggcccaagggaaggtgggtgccattccagccaatgcactggacgatgggcagtggtcccagggcctcatttctgctgcccggatggtggctgcggccaccaacaatctgtgtgaggcagccaatgcagctgtacaaggccatgccagccaggagaagctcatctcatcagccaagcaggtagctgcctccacagcccagctccttgtggcctgcaaggtcaaggctgaccaggactcggaggcaatgaaacgacttcaggctgctggcaacgcagtgaagcgagcctcagataatctggtgaaagcagcacagaaggctgcagcctttgaagagcaggagaatgagacagtggtggtgaaagagaagatggttggcggcattgcccagatcatcgcagcacaggaagaaatgcttcggaaggaacgagagctggaagaggcgcggaagaaactggcccagatccggcagcagcagtacaagtttctgccttcagagcttcgagatgagcactaaagaagcctcttctatttaatgcagacccggcccagagactgtgcgtgccactaccaaagccttctgggctgtcggggcccaacctgcccaaccccagcactccccaaagtgcctgccaaaccccagggcctggccccgcccagtcccgcagtacatcccctgtcccctccccaaccccaagtgccttcatgccctagggccccccaagtgcctgcccctccccagagtattaacgctccaagagtattattaacgctgctgtacctcgatctgaatctgccggggccccagcccactccaccctgccagcagcttccggccagtccccacagcctcatcagctctcttcaccgttttttgatactatcttcccccacccccagctacccataggggctgcagagttataagccccaaacaggtcatgctccaataaaaatgattctacctacaacctctgcctggcttcaagggagatacaagttttctcccagggcagtaggagagacagtggggttgaattctgtcacccagcttgatccagcttgaaatgggagaggggaagactggcagtctgcacctgaggtcccttcctccttgcacccggaccctaaagttatccaatggggaagttgtgcctgagaagtcatactcctgttatcctcacctccctggccagcacctaagcctcacaaagtgtcgttctgctgctgctgggacagcagctaccacagttccttgtggctaccaggacattctgttcttcatagctactcagggtatgtcaacaaatccagtccttgaccaaattcaaattttcaaaagaagctttgctaaaaataa

SEQ ID NO: 163538 - DNA, 8098 bp, Artificial Sequence
  derived and/or modified sequence
ggaagagttctagcctgaaagggaactcgggcgtcgtcctggcgtcctctccggattgcgccgcaccctcgcttcctgccagggaggggctgccgggctttggcggctcccgagcatcgagaacggggccagagcagcttcctgcctgccccccgcgaccatagagcgcgggcccagggcgccgcccgcgggtgggggacgttcccaggacggaagtggccgagagagtgtcgaagggagggcgaggccggagcccgagggcgacccgagaagcggcggggcggcgggccggcgggcggggcgcagagccaggcagcgcaggtatagccaggctggagaaaagaagctgccaccatggttgcactttcactgaagatcagcattgggaatgtggtgaagacgatgcagtttgagccgtctaccatggtgtacgacgcctgccgcatcattcgtgagcggatcccagaggccccagctggtcctcccagcgactttgggctctttctgtcagatgatgaccccaaaaagggtatatggctggaggctgggaaagctttggactactacatgctccgaaatggggacactatggagtacaggaagaaacagagacccctgaagatccgtatgctggatggaactgtgaagacgatcatggtggatgactctaagactgtcactgacatgctcatgaccatctgtgcccgcattggcatcaccaatcatgatgaatattcattggttcgagagctgatggaagagaaaaaggaggaaataacagggaccttaagaaaggacaagacattgctgcgagatgaaaagaagatggagaaactaaagcagaaattgcacacagatgatgagttgaactggctggaccatggtcggacactgagggagcagggtgtagaggagcacgagacgctgctgctgcggaggaagttcttttactcagaccagaatgtggattcccgggaccctgtacagctgaacctcctgtatgtgcaggcacgagatgacatcctgaatggctcccaccctgtctcctttgacaaggcctgtgagtttgctggcttccaatgccagatccagtttgggccccacaatgagcagaagcacaaggctggcttccttgacctgaaggacttcctgcccaaggagtatgtgaagcagaagggagagcgtaagatcttccaggcacacaagaattgtgggcagatgagtgagattgaggccaaggtccgctacgtgaagctagcccgttctctcaagacttacggtgtctccttcttcctggtgaaggaaaaaatgaaagggaagaacaagctagtgcccaggcttctgggcatcaccaaggagtgtgtgatgcgagtggatgagaagaccaaggaagtgatccaggagtggaacctcaccaacatcaaacgctgggctgcgtctcccaaaagcttcaccctggattttggagattaccaagatggctattactcagtacagacaactgaaggggagcagattgcacagctcattgccggctacatcgatatcatcctgaagaagaaaaaaagcaaggatcactttgggctggaaggagatgaggagtctactatgctggaggactcagtgtcccccaaaaagtcaacagtcctgcagcagcaatacaaccgggtggggaaagtggagcatggctctgtggccctgcctgccatcatgcgctctggagcctctggtcctgagaatttccaggtgggcagcatgccccctgcccagcagcagattaccagcggccagatgcaccgaggacacatgcctcctctgacttcagcccagcaggcactcactggaaccattaactccagcatgcaggccgtgcaggctgcccaggccaccctggatgactttgacactctgccgcctcttggccaggatgctgcctctaaggcctggcgtaaaaacaagatggatgaatcaaagcatgagatccactctcaggtagatgccatcacagctggtactgcgtctgtggtgaacctgacagcaggggaccctgctgagacagactataccgcagtgggctgtgcagtcaccacaatctcctccaacctgacggagatgtcccgtggggtgaagctgctggctgccttgctggaggacgaaggcggcagtggtcggcccctgttgcaggcagcaaagggccttgcgggagcagtgtcagaactgctgcgcagtgcccaaccagccagtgctgagccccgtcagaacctgctgcaagcagctgggaacgtgggccaggccagtggggagctgttgcaacaaattggggaaagtgatactgacccccacttccaggatgcgctaatgcagctcgccaaagctgtggcaagtgctgcagctgccctggtcctcaaggccaagagtgtggcccagcggacagaggactcgggacttcagacccaagttattgctgcagcaacacagtgtgccctatccacttcccaactagtggcctgtactaaggtggtggcacctacaatcagctcacctgtctgccaagagcaactggtggaggctggacgactggtagccaaagccgtggagggctgtgtgtctgcctcccaggcagctacagaggatgggcaactgttgcgaggggtaggagcagcagccacagctgtcacccaggccctaaatgagctgctgcagcatgtgaaagcccatgccacaggggctgggcctgctggccgttatgaccaggctactgacaccatcctaaccgtcactgagaacatctttagctccatgggtgatgctggggagatggtgcgacaggcccgcatcctggcccaagccacatctgacctggtcaatgccatcaaggctgatgctgagggggaaagtgatctggagaactcccgcaagctcttaagtgctgccaagatcctagctgatgccacagccaagatggtagaggctgccaagggagcagctgcccaccctgacagtgaggagcagcagcagcggctgcgggaggcagctgaggggctgcgcatggccaccaatgcagctgcgcagaatgccatcaagaaaaagctggtgcagcgcctggagcatgcagccaagcaggctgcagcctcagccacacagaccatcgctgcagctcagcacgcagcctctacccccaaggcctctgccggcccccagcccctgctggtgcagagctgcaaggcagtggcagagcagattccactgctggtgcagggcgtccgaggaagccaagcccagcctgacagccccagcgctcagcttgccctcattgctgccagccagagcttcctgcagccaggtgggaagatggtggcagctgcaaaggcctcagtgccaacgattcaggaccaggcttcagccatgcagctgagtcagtgtgccaagaacctgggcaccgcgctggctgaactccggacggctgcccagaaggctcaggaagcatgtggacctttggagatggattctgcactgagtgtggtacagaatctagagaaagatctacaggaagtgaaggcagcagctcgagatggcaagcttaaacccttacctggggagacaatggagaagtgtacccaggacctgggcaacagcaccaaagccgtgagctcagccatcgcccagctactgggagaggttgcccagggcaatgagaattatgcaggtattgcagctcgggatgtggcaggtgggctgcggtcactggcccaggccgctaggggagtcgctgcactgacgtcagatcctgcagtgcaggccattgtacttgatacggccagtgatgtgctggacaaggccagcagcctcattgaggaggcgaaaaaggcagctggccatccaggggaccctgagagccagcagcggcttgcccaggtggctaaagcagtgacccaggctctgaaccgctgtgtcagctgcctacctggccagcgcgatgtggataatgccctgagggcagttggagatgccagcaagcgactcctgagtgactcgcttcctcctagcactgggacatttcaagaagctcagagccggttgaatgaagctgctgctgggctgaatcaggcagccacagaactggtgcaggcctctcggggaacccctcaggacctggctcgagcctcaggccgatttggacaggacttcagcaccttcctggaagctggtgtggagatggcaggccaggctccgagccaggaggaccgagcccaagttgtgtccaacttgaagggcatctccatgtcttcaagcaaacttcttctggctgccaaggccctgtccacggaccctgctgcccctaacctcaagagtcagctggctgcagctgccagggcagtaactgacagcatcaatcagctcatcactatgtgcacccagcaggcacccggccagaaggagtgtgataacgccctgcgggaattggagacggtccgggaactcctggagaacccagtccagcccatcaatgacatgtcctactttggttgcctggacagtgtaatggagaactcaaaggtgctgggcgaggccatgactggcatctcccaaaatgccaagaacggaaacctgccagagtttggagatgccatttccacagcctcaaaggcactttgtggcttcaccgaggcagctgcacaggctgcatatctggttggtgtctctgaccccaatagccaagctggacagcaagggctagtggagcccacacagtttgcccgtgcaaaccaggcaattcagatggcctgccagagtttgggagagcctggctgtacccaggcccaggtgctctctgcagccaccattgtggctaaacacacctctgcactgtgtaacagctgtcgcctggcttctgcccgtaccaccaatcctactgccaagcgccagtttgtacagtcagccaaggaggtggccaacagcacagctaatcttgtcaagaccatcaaggcgctagatggggccttcacagaggagaaccgtgcccagtgccgagcagcaacagcccctctgctggaggctgtggacaatctgagtgcctttgcgtccaaccctgagttctccagcattcctgcccagatcagccctgagggtcgggctgccatggagcccattgtgatctctgccaagacaatgttagagagtgccgggggactcatccagacagcccgggccctcgcagtcaatccccgggaccccccgagctggtcggtgctggccggccactcccgtactgtctcagactccatcaagaagctaattacaagcatgagggacaaggctccagggcagctggagtgtgaaacggccattgcagctctgaacagttgtctacgggacctagaccaggcttccctcgctgcagtcagccagcagcttgctcccctccaagagatctcccatctcattgagccgctggccaatgctgcccgggctgaagcctcccagctgggacacaaggtgtcccagatggcgcagtactttgagccgctcaccctggctgcagtgggtgctgcctccaagaccctgagccacccgcagcagatggcactcctggaccagactaaaacattggcagagtctgccctgcagttgctatacactgccaaggaggctggtggtaacccaaagctagatgaaggaccaatgggtgaaccagaaggttccttcgtggattaccaaacaactatggtgcggacagccaaggccattgcagtgaccgttcaggagatgataggttcccatatcaaacaccgggtacaggagctgggccatggctgtgccgctctggtcaccaaggcaggcgccctgcagtgcagccccagtgatgcctacaccaagaaggagctcatagagtgtgcccggagagtctctgagaaggtctcccacgtcctggctgcgctccaggctgggaatcgtggcacccaggcctgcatcacagcagccagcgctgtgtctggtatcattgctgacctcgacaccaccatcatgttcgccactgctggcacgctcaatcgtgagggtactgaaactttcgctgaccaccgggagggcatcctgaagactgcgaaggtgctggtggaggacaccaaggtcctggtgcaaaacgcagctgggagccaggagaagttggcgcaggctgcccagtcctccgtggcgaccatcacccgcctcgctgatgtggtcaagctgggtgcagccagcctgggagctgaggaccctgagacccaggtggtactaatcaacgcagtgaaagatgtagccaaagccctgggagacctcatcagtgcaacgaaggctgcagctggcaaagttggagatgaccctgctgtgtggcagctaaagaactctgccaaggtgatggtgaccaatgtgacatcattgcttaagacagtaaaagccgtggaagatgaggccaccaaaggcactcgggccctggaggcaaccacagaacacatacggcaggagctggcgccacctgccaagacctctaccccagaagacttcatccgaatgaccaagggtatcaccatggcaaccgccaaggccgttgctgctggcaattcctgtcgccaggaagatgtcattgccacagccaatctgagccgccgtgctattgcagatatgcttcgggcttgcaaggaagcagcttaccacccagaagtggcccctgatgtgcggcttcgagccctgcactatggccgggagtgtgccaatggctacctggaactgctggaccatgtactgctgaccctgcagaagccaagcccagaactgaagcagcagttgacaggacattcaaagcgtgtggctggttccgtcactgagctcatccaggctgctgaagccatgaagggaacagaatgggtagacccagaggaccccacagtcattgctgagaatgagctcctgggagctgcagccgccattgaggctgcagccaaaaagctagagcagctgaagccccgggccaaacccaaggaggcagatgagtccttgaactttgaggagcagatactagaagctgccaagtccattgcagcagccaccagtgcactggtaaaggctgcgtcggctgcccagagagaactagtggcccaagggaaggtgggtgccattccagccaatgcactggacgatgggcagtggtcccagggcctcatttctgctgcccggatggtggctgcggccaccaacaatctgtgtgaggcagccaatgcagctgtacaaggccatgccagccaggagaagctcatctcatcagccaagcaggtagctgcctccacagcccagctccttgtggcctgcaaggtcaaggctgaccaggactcggaggcaatgaaacgacttcaggctgctggcaacgcagtgaagcgagcctcagataatctggtgaaagcagcacagaaggctgcagcctttgaagagcaggagaatgagacagtggtggtgaaagagaagatggttggcggcattgcccagatcatcgcagcacaggaagaaatgcttcggaaggaacgagagctggaagaggcgcggaagaaactggcccagatccggcagcagcagtacaagtttctgccttcagagcttcgagatgagcactaaagaagcctcttctatttaatgcagacccggcccagagactgtgcgtgccactaccaaagccttctgggctgtcggggcccaacctgcccaaccccagcactccccaaagtgcctgccaaaccccagggcctggccccgcccagtcccgcagtacatcccctgtcccctccccaaccccaagtgccttcatgccctagggccccccaagtgcctgcccctccccagagtattaacgctccaagagtattattaacgctgctgtacctcgatctgaatctgccggggccccagcccactccaccctgccagcagcttccggccagtccccacagcctcatcagctctcttcaccgttttttgatactatcttcccccacccccagctacccataggggctgcagagttataagccccaaacaggtcatgctccaataaaaatgattctacctacaa

SEQ ID NO: 163539 - protein, 790 aa, Artificial Sequence
  derived and/or modified sequence
MAEQVLPQALYLSNMRKAVKIRERTPEDIFKPTNGIIHHFKTMHRYTLEMFRTCQFCPQFREIIHKALIDRNIQATLESQKKLNWCREVRKLVALKTNGDGNCLMHATSQYMWGVQDTDLVLRKALFSTLKETDTRNFKFRWQLESLKSQEFVETGLCYDTRNWNDEWDNLIKMASTDTPMARSGLQYNSLEEIHIFVLCNILRRPIIVISDKMLRSLESGSNFAPLKVGGIYLPLHWPAQECYRYPIVLGYDSHHFVPLVTLKDSGPEIRAVPLVNRDRGRFEDLKVHFLTDPENEMKEKLLKEYLMVIEIPVQGWDHGTTHLINAAKLDEANLPKEINLVDDYFELVQHEYKKWQENSEQGRREGHAQNPMEPSVPQLSLMDVKCETPNCPFFMSVNTQPLCHECSERRQKNQNKLPKLNSKPGPEGLPGMALGASRGEAYEPLAWNPEESTGGPHSAPPTAPSPFLFSETTAMKCRSPGCPFTLNVQHNGFCERCHNARQLHASHAPDHTRHLDPGKCQACLQDVTRTFNGICSTCFKRTTAEASSSLSTSLPPSCHQRSKSDPSRLVRSPSPHSCHRAGNDAPAGCLSQAARTPGDRTGTSKCRKAGCVYFGTPENKGFCTLCFIEYRENKHFAAASGKVSPTASRFQNTIPCLGRECGTLGSTMFEGYCQKCFIEAQNQRFHEAKRTEEQLRSSQRRDVPRTTQSTSRPKCARASCKNILACRSEELCMECQHPNQRMGPGAHRGEPAPEDPPKQRCRAPACDHFGNAKCNGYCNECFQFKQMYG

SEQ ID NO: 163540 - protein, 162 aa, Artificial Sequence
  derived and/or modified sequence
MAEQVLPQALYLSNMRKAVKIRERTPEDIFKPTNGIIHHFKTMHRYTLEMFRTCQFCPQFREIIHKALIDRNIQATLESQKKLNWCREVRKLVALKTNGDGNCLMHATSQYMWGVQDTDLVLRKALFSTLKETDTRNFKFRWQLESLKSQEFVETGLCYDTR

SEQ ID NO: 163541 - protein, 26 aa, Artificial Sequence
  derived and/or modified sequence
MAEQVLPQALYLSNMRKAVKIRERTP

SEQ ID NO: 163542 - protein, 98 aa, Artificial Sequence
  derived and/or modified sequence
MAEQVLPQALYLSNMRKAVKIRERTPEDIFKPTNGIIHHFKTMHRYTLEMFRTCQFCPQFREIIHKALIDRNIQATLESQKKLNWCREVRKLVALKTN

SEQ ID NO: 163543 - protein, 270 aa, Artificial Sequence
  derived and/or modified sequence
MAEQVLPQALYLSNMRKAVKIRERTPEDIFKPTNGIIHHFKTMHRYTLEMFRTCQFCPQFREIIHKALIDRNIQATLESQKKLNWCREVRKLVALKTNGDGNCLMHATSQYMWGVQDTDLVLRKALFSTLKETDTRNFKFRWQLESLKSQEFVETGLCYDTRNWNDEWDNLIKMASTDTPMARSGLQYNSLEEIHIFVLCNILRRPIIVISDKMLRSLESGSNFAPLKVGGIYLPLHWPAQECYRYPIVLGYDSHHFVPLVTLKDSGPDI

SEQ ID NO: 163544 - protein, 749 aa, Artificial Sequence
  derived and/or modified sequence
MAEQVLPQALYLSNMRKAVKIRERTPEDIFKPTNGIIHHFKTMHRYTLEMFRTCQFCPQFREIIHKALIDRNIQATLESQKKLNWCREVRKLVALKTNGDGNCLMHATSQYMWGVQDTDLVLRKALFSTLKETDTRNFKFRWQLESLKSQEFVETGLCYDTRNWNDEWDNLIKMASTDTPMARSGLQYNSLEEIHIFVLCNILRRPIIVISDKMLRSLESGSNFAPLKVGGIYLPLHWPAQECYRYPIVLGYDSHHFVPLVTLKDSGPEIRAVPLVNRDRGRFEDLKVHFLTDPENEMKEKLLKEYLMVIEIPVQGWDHGTTHLINAAKLDEANLPKEINLVDDYFELVQHEYKKWQENSEQGRREGHAQNPMEPSVPQLSLMDVKCETPNCPFFMSVNTQPLCHECSERRQKNQNKLPKLNSKPGPEGLPGMALGASRGEAYEPLAWNPEESTGGPHSAPPTAPSPFLFSETTAMKCRSPGCPFTLNVQHNGFCERCHNARQLHASHAPDHTRHLDPGKCQACLQDVTRTFNGICSTCFKRTTAEASSSLSTSLPPSCHQRSKSDPSRLVRSPSPHSCHRAGNDAPAGCLSQAARTPGDRTGTSKCRKAGCVYFGTPENKGFCTLCFIEYRENKHFAAASGKVSPTASRFQNTIPCLGRECGTLGSTMFEGYCQKCFIEAQNQRFHEAKRTEEQLRSSQRRDVPRTTQSTSRPKCARASCKNILACRSEELCMECQHQPEDGPWGPPG

SEQ ID NO: 163545 - protein, 214 aa, Artificial Sequence
  derived and/or modified sequence
MAEQVLPQALYLSNMRKAVKIRERTPEDIFKPTNGIIHHFKTMHRYTLEMFRTCQFCPQFREIIHKALIDRNIQATLESQKKLNWCREVRKLVALKTNGDGNCLMHATSQYMWGVQDTDLVLRKALFSTLKETDTRNFKFRWQLESLKSQEFVETGLCYDTRNWNDEWDNLIKWLPQTHPWPEVDFSTTHWKKYTYLSFATSSEGQSLSFQTKC

SEQ ID NO: 163546 - protein, 669 aa, Artificial Sequence
  derived and/or modified sequence
MAEQVLPQALYLSNMRKAVKIRERTPEDIFKPTNGIIHHFKTMHRYTLEMFRTCQFCPQFREIIHKALIDRNIQATLESQKKLNWCREVRKLVALKTNGDGNCLMHATSQYMWGVQDTDLVLRKALFSTLKETDTRNFKFRWQLESLKSQEFVETGLCYDTRNWNDEWDNLIKMASTDTPMARSGLQYNSLEEIHIFVLCNILRRPIIVISDKMLRSLESGSNFAPLKVGGIYLPLHWPAQECYRYPIVLGYDSHHFVPLVTLKDSGPEIRAVPLVNRDRGRFEDLKVHFLTDPENEMKEKLLKEYLMVIEIPVQGWDHGTTHLINAAKLDEANLPKEINLVDDYFELVQHEYKKWQENSEQGRREGHAQNPMEPSVPQLSLMDVKCETPNCPFFMSVNTQPLCHECSERRQKNQNKLPKLNSKPGPEGLPGMALGASRGEAYEPLAWNPEESTGGPHSAPPTAPSPFLFSETTAMKCRSPGCPFTLNVQHNGFCERCHNARQLHASHAPDHTRHLDPGKCQACLQDVTRTFNGICSTCFKRTTAEASSSLSTSLPPSCHQRSKSDPSRLVRSPSPHSCHRAGNDAPAGCLSQAARTPGDRTGTSKCRKAGCVYFGTPENKGFCTLFHRVQRKQTFCCCLRESQSHSVQVPEHHSVPGEGMRHPWKHHV

SEQ ID NO: 163547 - DNA, 2373 bp, Artificial Sequence
  derived and/or modified sequence
atggccgagcaggtgctgccccaggccctgtacctgagcaacatgagaaaggccgtgaagatcagagagagaacccccgaggacatcttcaagcccaccaacggcatcatccaccacttcaagaccatgcacagatacaccctggagatgttcagaacctgccagttctgcccccagttcagagagatcatccacaaggccctgatcgacagaaacatccaggccaccctggagagccagaagaagctgaactggtgcagagaggtgagaaagctggtggccctgaagaccaacggcgacggcaactgcctgatgcacgccaccagccagtacatgtggggcgtgcaggacaccgacctggtgctgagaaaggccctgttcagcaccctgaaggagaccgacaccagaaacttcaagttcagatggcagctggagagcctgaagagccaggagttcgtggagaccggcctgtgctacgacaccagaaactggaacgacgagtgggacaacctgatcaagatggccagcaccgacacccccatggccagaagcggcctgcagtacaacagcctggaggagatccacatcttcgtgctgtgcaacatcctgagaagacccatcatcgtgatcagcgacaagatgctgagaagcctggagagcggcagcaacttcgcccccctgaaggtgggcggcatctacctgcccctgcactggcccgcccaggagtgctacagataccccatcgtgctgggctacgacagccaccacttcgtgcccctggtgaccctgaaggacagcggccccgagatcagagccgtgcccctggtgaacagagacagaggcagattcgaggacctgaaggtgcacttcctgaccgaccccgagaacgagatgaaggagaagctgctgaaggagtacctgatggtgatcgagatccccgtgcagggctgggaccacggcaccacccacctgatcaacgccgccaagctggacgaggccaacctgcccaaggagatcaacctggtggacgactacttcgagctggtgcagcacgagtacaagaagtggcaggagaacagcgagcagggcagaagagagggccacgcccagaaccccatggagcccagcgtgccccagctgagcctgatggacgtgaagtgcgagacccccaactgccccttcttcatgagcgtgaacacccagcccctgtgccacgagtgcagcgagagaagacagaagaaccagaacaagctgcccaagctgaacagcaagcccggccccgagggcctgcccggcatggccctgggcgccagcagaggcgaggcctacgagcccctggcctggaaccccgaggagagcaccggcggcccccacagcgccccccccaccgcccccagccccttcctgttcagcgagaccaccgccatgaagtgcagaagccccggctgccccttcaccctgaacgtgcagcacaacggcttctgcgagagatgccacaacgccagacagctgcacgccagccacgcccccgaccacaccagacacctggaccccggcaagtgccaggcctgcctgcaggacgtgaccagaaccttcaacggcatctgcagcacctgcttcaagagaaccaccgccgaggccagcagcagcctgagcaccagcctgccccccagctgccaccagagaagcaagagcgaccccagcagactggtgagaagccccagcccccacagctgccacagagccggcaacgacgcccccgccggctgcctgagccaggccgccagaacccccggcgacagaaccggcaccagcaagtgcagaaaggccggctgcgtgtacttcggcacccccgagaacaagggcttctgcaccctgtgcttcatcgagtacagagagaacaagcacttcgccgccgccagcggcaaggtgagccccaccgccagcagattccagaacaccatcccctgcctgggcagagagtgcggcaccctgggcagcaccatgttcgagggctactgccagaagtgcttcatcgaggcccagaaccagagattccacgaggccaagagaaccgaggagcagctgagaagcagccagagaagagacgtgcccagaaccacccagagcaccagcagacccaagtgcgccagagccagctgcaagaacatcctggcctgcagaagcgaggagctgtgcatggagtgccagcaccccaaccagagaatgggccccggcgcccacagaggcgagcccgcccccgaggacccccccaagcagagatgcagagcccccgcctgcgaccacttcggcaacgccaagtgcaacggctactgcaacgagtgcttccagttcaagcagatgtacggctag

SEQ ID NO: 163548 - DNA, 81 bp, Artificial Sequence
  derived and/or modified sequence
atggccgagcaggtgctgccccaggccctgtacctgagcaacatgagaaaggccgtgaagatcagagagagaaccccctag

SEQ ID NO: 163549 - DNA, 2250 bp, Artificial Sequence
  derived and/or modified sequence
atggccgagcaggtgctgccccaggccctgtacctgagcaacatgagaaaggccgtgaagatcagagagagaacccccgaggacatcttcaagcccaccaacggcatcatccaccacttcaagaccatgcacagatacaccctggagatgttcagaacctgccagttctgcccccagttcagagagatcatccacaaggccctgatcgacagaaacatccaggccaccctggagagccagaagaagctgaactggtgcagagaggtgagaaagctggtggccctgaagaccaacggcgacggcaactgcctgatgcacgccaccagccagtacatgtggggcgtgcaggacaccgacctggtgctgagaaaggccctgttcagcaccctgaaggagaccgacaccagaaacttcaagttcagatggcagctggagagcctgaagagccaggagttcgtggagaccggcctgtgctacgacaccagaaactggaacgacgagtgggacaacctgatcaagatggccagcaccgacacccccatggccagaagcggcctgcagtacaacagcctggaggagatccacatcttcgtgctgtgcaacatcctgagaagacccatcatcgtgatcagcgacaagatgctgagaagcctggagagcggcagcaacttcgcccccctgaaggtgggcggcatctacctgcccctgcactggcccgcccaggagtgctacagataccccatcgtgctgggctacgacagccaccacttcgtgcccctggtgaccctgaaggacagcggccccgagatcagagccgtgcccctggtgaacagagacagaggcagattcgaggacctgaaggtgcacttcctgaccgaccccgagaacgagatgaaggagaagctgctgaaggagtacctgatggtgatcgagatccccgtgcagggctgggaccacggcaccacccacctgatcaacgccgccaagctggacgaggccaacctgcccaaggagatcaacctggtggacgactacttcgagctggtgcagcacgagtacaagaagtggcaggagaacagcgagcagggcagaagagagggccacgcccagaaccccatggagcccagcgtgccccagctgagcctgatggacgtgaagtgcgagacccccaactgccccttcttcatgagcgtgaacacccagcccctgtgccacgagtgcagcgagagaagacagaagaaccagaacaagctgcccaagctgaacagcaagcccggccccgagggcctgcccggcatggccctgggcgccagcagaggcgaggcctacgagcccctggcctggaaccccgaggagagcaccggcggcccccacagcgccccccccaccgcccccagccccttcctgttcagcgagaccaccgccatgaagtgcagaagccccggctgccccttcaccctgaacgtgcagcacaacggcttctgcgagagatgccacaacgccagacagctgcacgccagccacgcccccgaccacaccagacacctggaccccggcaagtgccaggcctgcctgcaggacgtgaccagaaccttcaacggcatctgcagcacctgcttcaagagaaccaccgccgaggccagcagcagcctgagcaccagcctgccccccagctgccaccagagaagcaagagcgaccccagcagactggtgagaagccccagcccccacagctgccacagagccggcaacgacgcccccgccggctgcctgagccaggccgccagaacccccggcgacagaaccggcaccagcaagtgcagaaaggccggctgcgtgtacttcggcacccccgagaacaagggcttctgcaccctgtgcttcatcgagtacagagagaacaagcacttcgccgccgccagcggcaaggtgagccccaccgccagcagattccagaacaccatcccctgcctgggcagagagtgcggcaccctgggcagcaccatgttcgagggctactgccagaagtgcttcatcgaggcccagaaccagagattccacgaggccaagagaaccgaggagcagctgagaagcagccagagaagagacgtgcccagaaccacccagagcaccagcagacccaagtgcgccagagccagctgcaagaacatcctggcctgcagaagcgaggagctgtgcatggagtgccagcaccagcccgaggacggcccctggggcccccccggctag

SEQ ID NO: 163550 - DNA, 2373 bp, Artificial Sequence
  derived and/or modified sequence
atggccgagcaggtgctgccgcaggccctctatctatctaatatgcggaaagccgttaagatccgagaacgcactcctgaggatatatttaagccgacgaatggaatcatccatcactttaagacgatgcatcgttatacgctggaaatgtttcgcacatgccagttttgcccacagtttagggagataatccacaaggctttaatagatagaaatattcaggctaccttagaaagtcagaaaaaacttaactggtgtcgagaagtgaggaaactcgtagccctgaaaaccaacggcgacggcaactgtctcatgcatgccacttcccagtatatgtggggggtccaggacacagatttggtgctcagaaaagccttgttcagcactctgaaagagactgataccaggaattttaaattccggtggcaactcgagagtctgaaatcgcaggaatttgtggaaacaggactgtgttacgacacaaggaactggaacgacgagtgggataacttgattaagatggcctctactgatactcctatggcacgctctggcttacaatacaattccctggaggagatacacatatttgtcctctgcaatattctgcggaggcctattatagtcatcagcgacaagatgcttcgtagcctggaatctggtagcaacttcgcccctctgaaagttggaggcatttacctccccttgcactggcctgcacaggagtgctataggtatcccatagtcctcggctatgacagtcaccactttgttcccctggtaacactcaaggactccggcccagaaattcgcgctgtgccactggtcaatagagatagagggcggttcgaggacctgaaggtgcactttctaacggaccccgagaatgaaatgaaggagaaactcctgaaggagtatctcatggttattgagatcccggtgcagggttgggaccacggaacaacccacctcatcaatgcggccaaattagatgaagccaatctacccaaagaaataaatctagtcgacgactattttgagctagttcagcatgaatataagaagtggcaggagaattcagagcaggggagacgcgaggggcacgctcagaatcccatggaaccgtcagtcccccagctttctctcatggacgttaaatgcgagacgccgaattgcccctttttcatgtcagtcaatacccaacccttgtgccatgagtgtagtgaaaggcggcaaaagaaccaaaataagctgcctaaattgaattccaaacccggacccgagggcctcccaggcatggcactgggcgcgtctagaggcgaggcctatgagccactggcgtggaatcccgaagagagcactggggggccacacagcgcacctcccactgctccaagtccattcttgttctcagagacgacagcaatgaagtgtagatccccaggatgtccctttactctgaatgttcaacacaacggtttctgcgagagatgtcacaacgctcggcagctgcatgcctcccacgcccccgatcatacgcgtcacctcgacccaggcaagtgccaggcgtgcctgcaggatgtcacacggacctttaatggaatctgcagtacctgcttcaaacgaacgaccgcagaagcctcgtcctcgctttcaacaagcctccccccttcttgccaccaaaggtccaaatcagatccctccagactcgtacgcagcccttctccacactcctgccatcgtgccggaaatgatgcacctgcaggctgcctgtcacaagctgctcgcactccaggtgatcgaacaggcaccagcaagtgtcgcaaagcaggatgcgtatatttcggcacacccgaaaataagggattttgtacgctgtgcttcatagaatatcgggagaacaaacattttgcggctgcttcaggcaaggtctctccgacagcttcccgatttcagaatactataccttgcttaggccgcgagtgtggaaccctggggtccacgatgttcgagggttattgtcagaagtgctttatagaggctcagaaccagagatttcatgaggctaaacgcacagaagaacagttgagatccagccaacggagggatgtacctagaacaacacaatcaacaagccgccccaaatgtgctcgggccagttgtaagaatatcttggcgtgtcggtcggaggaattgtgcatggagtgccagcatccaaaccagagaatgggacctggcgctcaccgcggggagcccgcccccgaagatccacccaagcaacgctgtcgtgcccctgcttgcgaccattttggaaacgcaaagtgtaatgggtattgcaatgaatgtttccagttcaagcaaatgtacggctag

SEQ ID NO: 163551 - DNA, 81 bp, Artificial Sequence
  derived and/or modified sequence
atggcggaacaagtcctccctcaggcgctgtacttgtctaacatgcggaaagccgtaaaaatcagagaacggactccctag

SEQ ID NO: 163552 - DNA, 2250 bp, Artificial Sequence
  derived and/or modified sequence
atggccgaacaggtgcttcctcaagccctgtatctttctaatatgcggaaggcggtgaaaattagggagagaacgcctgaggacatcttcaagcccactaacggtatcattcaccattttaagaccatgcacaggtacacgctggagatgtttagaacgtgtcagttctgcccgcagtttcgggagataatccacaaggcacttatagatcgtaatatacaggccacattggagagccaaaagaagttgaactggtgccgcgaggtccgcaaactcgtagcgctgaagaccaatggagacggaaattgcctgatgcacgcaacctcccagtacatgtggggggttcaggatactgatctggtgctaagaaaagctctctttagcactctgaaggaaactgacaccaggaactttaagtttagatggcagctcgaatcactgaagtcccaagaattcgtcgaaacgggactgtgctatgatacaagaaactggaatgacgagtgggacaacctcatcaagatggcctctaccgacacgcctatggcacgctcgggactgcagtacaattccttggaagaaatccacatttttgtgctgtgtaatatcctcagaaggcccattattgtcatctccgacaagatgttgcgcagcctggagtcaggttcaaacttcgctcctctgaaagtgggtggaatttacctgcctctacactggccagcccaagaatgctatagatatccaatcgtactagggtatgattcacaccactttgtcccactggtgacgttaaaggatagtggtcctgagatacgagccgtgccactcgttaatagagaccgaggcaggttcgaggatctaaaagtgcatttcctgacggaccctgagaatgaaatgaaagaaaaactgctgaaagagtacctgatggtgatcgaaatccctgtccagggctgggatcacggtaccacacacctgattaacgccgccaaactggacgaagccaacttgcccaaggaaatcaacttggttgatgactatttcgagcttgtccagcacgaatacaagaagtggcaggagaattccgagcagggcaggcgagagggtcatgcacagaatccaatggagccgagcgttccccagctctcgctgatggatgtaaaatgtgaaacacctaactgccccttttttatgtccgttaatacccagcccttgtgccacgaatgctcagagaggaggcaaaagaaccagaacaaattaccaaagctaaattcgaagcctggcccagagggcttgcctggaatggctctcggggctagtcgcggcgaagcttacgagccactggcttggaatcccgaagaaagcactggtggcccccattcggctccacccaccgccccttctccatttctatttagtgagacaaccgccatgaagtgtcggtctcctgggtgcccctttaccctgaacgtccaacacaacggtttctgtgagagatgccacaacgccagacagctccatgctagccatgctcccgaccatacccgccatttggaccctggcaaatgccaggcatgcctgcaagatgtgacccggactttcaacggcatctgcagtacctgttttaagcgcactaccgccgaggcttcatccagcctcagtactagcctacccccctcgtgtcatcagcggagcaagagtgatcctagccgactggtccgatccccatccccccactcctgccaccgcgcgggaaatgatgccccggccggttgcctgtcccaggcagccaggacacccggggaccgcactgggacctccaagtgccgcaaggccggatgtgtctacttcggcactcctgagaataagggattctgtacactgtgcttcattgaatatcgtgagaacaagcacttcgcagccgcctctgggaaagtgtcacctacggcaagcaggttccaaaataccatcccatgcctggggcgggagtgtgggaccctcggctctacgatgtttgagggatattgccaaaaatgttttatcgaagcccagaatcagcgattccacgaggcaaagcgcacagaggaacagctgcggagctcccagcgaagggacgtccctcgcactacccaatctacatctcggccgaagtgcgcccgggcatcatgtaagaacatactggcttgcaggagcgaagaattgtgcatggaatgccagcaccagcctgaagacgggccttggggaccccctggatag

SEQ ID NO: 163553 - DNA, 2373 bp, Artificial Sequence
  derived and/or modified sequence
atggccgagcaggtgctgccccaggccctgtacctgagcaacatgaggaaggctgtgaagatccgggagaggaccccagaggacatcttcaagcccaccaacggcatcatccaccacttcaagaccatgcaccgctacaccctggagatgttccgcacctgccagttctgcccccagttccgggagatcatccacaaggccctgattgacaggaacatccaggccaccctggagagccagaagaagctgaactggtgccgggaggtgaggaagctggtggccctgaagaccaatggagatggcaactgcctgatgcacgccaccagccagtacatgtggggcgtgcaggacacagacctggtgctgaggaaggccctcttcagcaccctgaaggagacagacaccaggaacttcaagttccgctggcagctggagagcctgaagagccaggagtttgtggagaccggcctgtgctatgacaccaggaactggaatgatgagtgggacaacctgatcaagatggccagcacagacacccccatggcccggagcggcctgcagtacaacagcctggaggagatccacatctttgtgctgtgcaacatcctgcggcggcccatcatcgtcatcagtgacaagatgctgcggagcctggagagcggcagcaactttgcccccctgaaggtgggcggcatctacctgcccctgcactggccagcccaggagtgctaccgctaccccatcgtgctgggctatgacagccaccactttgtgcccctggtgaccctgaaggacagcggccctgagatccgggctgtgcccctggtgaacagagaccggggccgctttgaggacctgaaggtgcacttcctgacagatcctgaaaatgagatgaaggagaagctgctgaaggagtacctgatggtgattgagatccctgtgcagggctgggaccacggcaccacccacctgatcaatgctgccaagctggatgaggccaacctgcccaaggagatcaacctggtggatgactactttgagctggtgcagcacgagtacaagaagtggcaggagaacagcgagcagggccggcgggagggccacgcccagaaccccatggagcccagcgtgccccagctgagcctgatggatgtgaagtgtgagacccccaactgccccttcttcatgtctgtgaacacccagcccctgtgccacgagtgcagcgagcggcggcagaagaaccagaacaagctgcccaagctgaacagcaagccaggccctgagggcctgcccggcatggccctgggcgccagcagaggagaggcctatgagcccctggcctggaaccctgaggagagcactggaggcccccacagcgccccacccacagcccccagccccttcctgttcagcgagaccacagccatgaagtgccgcagccctggctgccccttcaccctgaatgtgcagcacaacggcttctgtgagcgctgccacaatgcccggcagctgcacgccagccacgccccagaccacaccaggcacctggaccccgggaagtgccaggcctgcctgcaggatgtgaccaggaccttcaacggcatctgcagcacctgcttcaagaggaccacagctgaggccagcagcagcctgagcaccagcctgccccccagctgccaccagaggagcaagagtgaccccagccggctggtgcgcagccccagcccccacagctgccacagagctggaaatgatgccccagctggctgcctgagccaggccgcccggacccctggggacagaacaggcaccagcaagtgcaggaaggccggctgtgtgtacttcggcaccccagaaaataaaggcttctgcaccctgtgcttcatcgagtaccgggagaacaagcactttgctgctgccagcggcaaggtgagccccacagccagccgcttccagaacaccatcccctgcctgggcagagaatgtggcaccctgggcagcaccatgtttgagggctactgccagaagtgcttcatcgaggcccagaaccagcgcttccacgaggccaagaggacagaggagcagctgcggagcagccagaggagagatgtgcccaggaccacccagagcaccagccggcccaagtgtgcccgggccagctgcaagaacatcctggcctgccgctctgaggagctgtgcatggagtgccagcaccccaaccagaggatgggccctggggcccacagaggagagcccgccccagaagatcctcccaagcagcgctgccgggccccagcctgtgaccactttggaaatgccaagtgcaatggctactgcaatgaatgcttccagttcaagcagatgtatggatag

SEQ ID NO: 163554 - DNA, 81 bp, Artificial Sequence
  derived and/or modified sequence
atggccgagcaggtgctgccccaggccctgtacctgagcaacatgaggaaggctgtgaagatccgggagaggaccccctag

SEQ ID NO: 163555 - DNA, 2250 bp, Artificial Sequence
  derived and/or modified sequence
atggccgagcaggtgctgccccaggccctgtacctgagcaacatgaggaaggctgtgaagatccgggagaggaccccagaggacatcttcaagcccaccaacggcatcatccaccacttcaagaccatgcaccgctacaccctggagatgttccgcacctgccagttctgcccccagttccgggagatcatccacaaggccctgattgacaggaacatccaggccaccctggagagccagaagaagctgaactggtgccgggaggtgaggaagctggtggccctgaagaccaatggagatggcaactgcctgatgcacgccaccagccagtacatgtggggcgtgcaggacacagacctggtgctgaggaaggccctcttcagcaccctgaaggagacagacaccaggaacttcaagttccgctggcagctggagagcctgaagagccaggagtttgtggagaccggcctgtgctatgacaccaggaactggaatgatgagtgggacaacctgatcaagatggccagcacagacacccccatggcccggagcggcctgcagtacaacagcctggaggagatccacatctttgtgctgtgcaacatcctgcggcggcccatcatcgtcatcagtgacaagatgctgcggagcctggagagcggcagcaactttgcccccctgaaggtgggcggcatctacctgcccctgcactggccagcccaggagtgctaccgctaccccatcgtgctgggctatgacagccaccactttgtgcccctggtgaccctgaaggacagcggccctgagatccgggctgtgcccctggtgaacagagaccggggccgctttgaggacctgaaggtgcacttcctgacagatcctgaaaatgagatgaaggagaagctgctgaaggagtacctgatggtgattgagatccctgtgcagggctgggaccacggcaccacccacctgatcaatgctgccaagctggatgaggccaacctgcccaaggagatcaacctggtggatgactactttgagctggtgcagcacgagtacaagaagtggcaggagaacagcgagcagggccggcgggagggccacgcccagaaccccatggagcccagcgtgccccagctgagcctgatggatgtgaagtgtgagacccccaactgccccttcttcatgtctgtgaacacccagcccctgtgccacgagtgcagcgagcggcggcagaagaaccagaacaagctgcccaagctgaacagcaagccaggccctgagggcctgcccggcatggccctgggcgccagcagaggagaggcctatgagcccctggcctggaaccctgaggagagcactggaggcccccacagcgccccacccacagcccccagccccttcctgttcagcgagaccacagccatgaagtgccgcagccctggctgccccttcaccctgaatgtgcagcacaacggcttctgtgagcgctgccacaatgcccggcagctgcacgccagccacgccccagaccacaccaggcacctggaccccgggaagtgccaggcctgcctgcaggatgtgaccaggaccttcaacggcatctgcagcacctgcttcaagaggaccacagctgaggccagcagcagcctgagcaccagcctgccccccagctgccaccagaggagcaagagtgaccccagccggctggtgcgcagccccagcccccacagctgccacagagctggaaatgatgccccagctggctgcctgagccaggccgcccggacccctggggacagaacaggcaccagcaagtgcaggaaggccggctgtgtgtacttcggcaccccagaaaataaaggcttctgcaccctgtgcttcatcgagtaccgggagaacaagcactttgctgctgccagcggcaaggtgagccccacagccagccgcttccagaacaccatcccctgcctgggcagagaatgtggcaccctgggcagcaccatgtttgagggctactgccagaagtgcttcatcgaggcccagaaccagcgcttccacgaggccaagaggacagaggagcagctgcggagcagccagaggagagatgtgcccaggaccacccagagcaccagccggcccaagtgtgcccgggccagctgcaagaacatcctggcctgccgctctgaggagctgtgcatggagtgccagcaccagccagaagatggcccctggggccccccaggatag

SEQ ID NO: 163556 - DNA, 2373 bp, Artificial Sequence
  derived and/or modified sequence
atggccgagcaggtgctgccccaggccctgtacctgagcaacatgaggaaagccgtcaagatccgggagaggacgccggaggatatttttaagccaaccaatggcatcatacatcattttaagacaatgcacaggtatactctcgagatgttccgcacttgccagttttgtccacagttccgggaaattattcacaaggcactgatcgaccggaatatccaggcaaccctcgagagccaaaagaagctgaattggtgcagagaggtgcgaaagctcgttgctctgaaaaccaacggtgacggcaactgcctgatgcatgccacgtcccagtacatgtggggagttcaggatactgacctggtcctgcgtaaggccttgttctccacattgaaggagaccgacacaaggaacttcaagtttcgctggcagctcgaaagtctgaagtcccaagagtttgttgagacaggtctgtgctatgacacccggaattggaacgatgaatgggataacttgataaaaatggctagtaccgatacacctatggcacggtccggccttcaatacaactctctggaggaaattcatatcttcgttctctgcaacatactgcggcgtcccataatagtgatatcggataaaatgttgaggtcacttgaatccggatcaaactttgctccactgaaggttggagggatttatctgccactgcattggcccgcccaggagtgttaccgctatccaattgtgctagggtatgactcccatcacttcgtcccactcgtcacattgaaggacagcggccctgagatacgggcagtgcccctcgttaatcgggatagaggtaggtttgaggacctcaaggtgcattttctgaccgatcctgagaacgaaatgaaggagaagcttctcaaagagtacctgatggttattgaaatccctgtgcaaggttgggatcatggtacaacccacctaatcaatgccgctaagctcgatgaggccaaccttcccaaggaaatcaacctggtggacgactactttgagctggttcagcatgagtataaaaagtggcaggagaattccgagcaggggaggcgggagggtcacgcccagaatccgatggaacccagcgttccccagttgtcccttatggacgtgaagtgtgagactcctaactgcccgtttttcatgagtgtaaatacacagcctctctgccatgaatgttcagagcggagacaaaagaaccagaataagctccccaaactgaactccaagcccggcccggagggcctgcccggtatggctcttggcgcgtcacggggggaggcctacgagccattggcctggaacccggaagagagtaccggcgggccccacagcgcccctcctactgctcccagcccttttctgttctccgaaactaccgccatgaaatgccgcagccctgggtgcccctttactttaaatgttcagcacaatggattttgcgagcggtgccataatgctaggcaactgcacgcctctcatgctccagaccacactaggcacctggaccccggcaagtgtcaggcctgcctgcaggacgttacccgcactttcaacggcatttgcagcacatgtttcaaacgtaccactgcggaggcaagctcctcactgtccacgagtctgcctccgagctgccatcaaaggtccaagtcagatccaagcaggctggtccgatccccaagccctcacagttgccaccgggccggtaatgacgcgcctgccggctgtttgtctcaggccgcaaggacccccggtgataggaccggaacctctaagtgtaggaaagcaggctgtgtatacttcggaaccccagagaacaagggcttttgcacactgtgcttcattgaatatcgagagaacaaacacttcgcagccgctagcggcaaagtgagtccaacagcttctcgtttccagaataccatcccatgtctcggccgggagtgtggtacactaggctcaactatgtttgaaggctattgccaaaagtgtttcatcgaggcccagaatcagcgctttcacgaggccaaacgtaccgaggagcagttaagatcatctcaaagacgggatgtgccaagaaccacgcaaagtacctctcgcccaaagtgtgccagggcctcctgcaagaacatcttggcatgcaggagtgaagaactgtgtatggaatgccagcaccccaatcagagaatgggccccggagcgcacagaggcgaacctgctccggaggatccacctaagcagcgatgccgtgcgcctgcctgcgatcattttggaaatgcaaagtgcaatggatattgtaatgaatgctttcagttcaaacagatgtacggctag

SEQ ID NO: 163557 - DNA, 81 bp, Artificial Sequence
  derived and/or modified sequence
atggccgagcaggtgctgccccaggccctgtacctgagcaacatgaggaaggctgtgaaaattagagaaagaaccccgtag

SEQ ID NO: 163558 - DNA, 2250 bp, Artificial Sequence
  derived and/or modified sequence
atggccgagcaggtgctgccccaggccctgtacctgagcaacatgcgcaaggctgtgaaaattcgggagcgcactccagaggacatctttaaaccgaccaatggcattattcaccacttcaaaaccatgcaccggtacacgctcgaaatgtttaggacctgtcagttctgtcctcagtttagggagatcattcacaaggccctgattgatagaaacattcaggcaactctggagtcacagaaaaagttaaattggtgcagagaagtgagaaagctcgtggcccttaagactaatggcgacggaaactgccttatgcacgcaacttctcagtatatgtggggcgttcaggacacggaccttgttttgcggaaggccctgttctccaccttgaaggaaacagacacacggaactttaaattcaggtggcagctggagagcctgaagagccaggagtttgttgagactggactctgctacgacaccaggaactggaatgatgagtgggacaacctaatcaaaatggcctccacagacacaccgatggctcgtagtgggctgcagtataattcacttgaggagatccatatcttcgtactgtgtaatatcctgagaagacccatcattgtgatcagcgacaagatgttgcgctcgctggagagcgggtctaatttcgccccactcaaagtcggtgggatctacctgccgctccattggccagcccaggagtgttaccgttaccccattgtgctgggatacgattcacatcactttgtccctctcgtcactctgaaggattcagggcctgagatacgggctgtcccccttgtaaatcgtgaccggggacgttttgaagacctgaaggtgcatttcctgactgaccctgaaaatgaaatgaaggagaagctgctgaaggagtatctgatggttattgagataccagtacagggatgggaccacgggacgacccatcttatcaacgccgcaaaattggatgaggctaatctgccaaaggaaatcaatctggtagatgattattttgaactagtccagcacgaatacaagaagtggcaggagaactcagagcaaggccgtcgtgaaggacatgctcaaaaccctatggagcccagcgttccacaattatctctgatggacgttaagtgtgaaactcctaattgtccctttttcatgagcgtgaacacacagcccctttgtcacgagtgctcagaacgccgacaaaagaaccaaaataagctccctaagttaaacagcaagcccgggcctgaaggcttaccggggatggctttaggagccagccgcggagaggcctacgaacctctcgcttggaatcccgaggagtcaacagggggcccccactccgccccaccaaccgcaccctcacccttcctttttagtgagactaccgctatgaagtgtagaagccccggatgccctttcacactgaacgtgcagcataatggattctgcgagcggtgtcataacgccagacaattgcatgcatctcacgccccagatcacacaagacatctggacccaggcaagtgccaggcttgcctgcaggacgtgacccgcaccttcaacgggatctgtagcacatgctttaaacggactactgccgaagcatcatcctcactgtcaacatcactgcccccctcctgtcaccagcggtctaagagcgatccctccagactcgttcggtccccctctccccactcttgccaccgcgctgggaatgacgctccagccggttgtctttcacaagccgcccgtactcccggtgacaggaccggcacttctaaatgccggaaggcagggtgtgtctacttcggtactccagagaacaaaggcttctgtacactctgcttcatcgagtaccgagagaacaaacatttcgctgctgcatctgggaaggtttctcccactgcttcccggttccagaatactattccttgtttagggcgtgaatgcggcacactgggaagcacaatgttcgagggatattgtcagaagtgttttattgaggcacaaaatcaacggttccatgaggctaagcgcaccgaagaacagctgcggagttcccagcgtcgagacgtgcctaggacgacacagagcacttcgcggcctaagtgcgcccgcgcgtcatgcaagaacattctggcctgtaggtctgaggagttgtgtatggagtgccaacatcagccagaggacggaccatggggtccccccggctag

SEQ ID NO: 163559 - DNA, 2373 bp, Artificial Sequence
  derived and/or modified sequence
atggcagagcaggtgctgccacaggctctctatctgtctaacatgaggaaggccgtgaaaatcagggagaggacccccgaagatattttcaaacctacgaatggcataatccaccacttcaagactatgcatcgatacacgctggagatgttccggacttgccagttctgtcctcagtttagggagataattcacaaagcgctcatcgacaggaatattcaggcaacactagagtcccagaaaaagctgaactggtgtagggaggtcagaaaactggtggccctgaaaactaatggagacgggaactgcctaatgcacgccacaagtcagtacatgtggggagttcaggacactgacttggttttgcggaaggctttgttctcaactctcaaagaaacggacaccagaaactttaaatttaggtggcagctggagtcactgaagtctcaggagttcgtcgagaccggactttgttacgatacacggaattggaacgatgagtgggataacctaattaagatggcctcgaccgatactcccatggccagaagcggcctgcagtacaacagcctggaagagatccacatcttcgtcctgtgtaatatcctgcggagacctatcattgtgatttccgataaaatgttgaggtcactcgagtctggttccaatttcgcgccactcaaggtcggagggatttatctgccccttcactggcctgcccaggagtgttacagatacccgattgtcctgggctatgactcccaccacttcgttcctctcgtgaccctgaaggacagtggaccagagattcgggctgtgccattagtgaaccgcgatcggggacgatttgaagacttgaaagtgcattttttaacggaccccgagaatgagatgaaagagaagctgcttaaggaatacctgatggtaatagaaatcccagtgcagggctgggaccacggaaccacccaccttattaacgccgcaaaacttgacgaagcgaatctgccaaaggaaattaacctggtggatgactattttgagcttgtccagcacgagtataagaaatggcaggaaaattcagagcaggggcgacgcgagggccatgcccagaacccaatggagccctctgtgcctcaactcagtttaatggatgtcaaatgtgagacgccaaattgccccttcttcatgagtgttaacacacagccactttgccatgagtgttcagagcgacgacagaaaaatcagaataaactccccaagcttaatagtaaacccggtccagaagggctgcccggaatggccctgggagctagccgcggtgaggcatatgaacccttagcatggaatccagaggagtccacggggggaccccatagtgctccacctaccgccccatcaccctttctgtttagcgaaactacagccatgaagtgtcggagtccagggtgtccttttaccctcaacgtccagcataatggtttttgtgagagatgccacaatgccagacagctgcacgcatcccatgctcccgatcacacgaggcacctggacccaggaaagtgccaggcttgtctgcaggacgtaacacgaaccttcaacggaatttgtagcacttgcttcaagcgtacaactgctgaggccagcagcagccttagcacctctctgccgcctagctgccaccaacgtagtaaatctgaccccagtaggctggttcggtccccgtctccccactcatgccaccgagccggtaatgacgccccagccggttgtctatcccaggcagctcgaacccccggtgaccgtactggaacgagcaaatgcagaaaagccggatgcgtctatttcgggaccccagaaaacaaagggttctgtaccctttgtttcatcgaatatcgcgagaacaaacacttcgctgccgcttcaggcaaggtgagccctaccgcttcgagatttcagaacaccatcccctgcctggggagagagtgtgggaccttgggtagcaccatgtttgaaggctactgtcagaagtgttttatcgaagcgcaaaatcagagatttcacgaggctaaacgcaccgaagagcagcttaggagtagtcagagacgggacgttcctagaacaacccagagcacatcccgccctaaatgtgcacgagcctcctgtaaaaacattctggcttgcagatcggaagagctgtgcatggagtgccagcaccccaaccagcggatggggccaggcgctcacaggggagagcctgcgccagaagacccccctaagcagaggtgccgggcacccgcttgtgaccactttggcaacgcgaaatgcaatgggtattgtaatgagtgcttccagtttaagcagatgtatggctag

SEQ ID NO: 163560 - DNA, 81 bp, Artificial Sequence
  derived and/or modified sequence
atggctgaacaggttctccctcaggccttgtacctttcaaacatgcggaaggccgttaaaatacgggagcgtacgccatag

SEQ ID NO: 163561 - DNA, 2250 bp, Artificial Sequence
  derived and/or modified sequence
atggccgaacaggtgctcccccaagccctgtatctttccaacatgcgcaaagcggttaaaatccgggagcggacaccagaagacatatttaaaccaacaaatggcatcatccaccatttcaagaccatgcaccggtacacacttgaaatgtttcgaacctgtcaattttgcccccagtttcgtgagatcatacataaggctcttatagaccgaaatatccaggcaacactggagtcacagaaaaagctgaattggtgcagagaagtgcgcaaattggttgccctcaagacgaacggggacgggaactgtttgatgcacgcaaccagccagtacatgtggggggtgcaagatacagacctggtgctgcgaaaggctctgttctcaactctgaaggagaccgatacccgcaactttaaatttagatggcagttggaaagcctcaaaagccaggaattcgtcgagaccggactttgttatgatacacggaattggaatgatgagtgggataatctgattaagatggccagcacggatactcccatggcccgaagcgggctgcagtataactctctggaggagattcatatcttcgtgctctgcaacattctccgaaggcccattattgtaatcagcgataaaatgttgaggtccctagagtctgggtcgaatttcgcaccactgaaggtcggcggtatttacctgcccttacactggccagcacaggagtgctatcgctatcccatcgtactggggtacgactctcatcacttcgtccctctggtcaccctgaaagattctgggcctgagatcagagcagtgcccctggtgaaccgtgacaggggccgtttcgaagatctgaaagttcactttctgactgaccctgaaaacgagatgaaggaaaagttactgaaggagtacctcatggtaatcgagatccctgtacagggctgggaccacgggaccacacacctgattaatgccgcaaagctggacgaagccaacctgcccaaagaaataaacctagtggacgattatttcgaactggtccaacacgagtacaagaaatggcaagaaaactccgaacagggcaggcgcgaggggcatgcccagaacccaatggagcccagtgtaccacagttgtcgctcatggatgtgaaatgcgaaacaccaaactgcccattcttcatgagtgtgaatacccagccgctgtgccacgaatgtagtgagagaagacagaagaatcagaacaagctgccaaagttaaatagcaaacctggtccagaaggcctgcccggaatggcgcttggggcttcacggggagaggcttatgagcctttggcgtggaacccagaggaaagcaccggcggaccacactctgcccctccaacggctccttctcccttcctcttctcagagaccaccgccatgaagtgcaggagtcccggttgcccgtttactttaaacgtgcagcataacggattctgtgaacgatgtcataacgcaaggcagctgcatgctagccacgccccagatcacacacgccacctcgatccagggaagtgccaggcctgcctgcaggatgtgactcggacctttaatgggatttgcagtacatgttttaagaggacaactgccgaagcgtcaagctctctgagcacttcactcccacccagttgtcatcagaggtccaaatcagatccgagtagactggtacgctcacccagccctcacagttgccatagggctggcaacgacgcccctgcgggatgcctcagccaagcggcacgtacacccggagaccgaacaggaacttccaagtgccggaaggccggatgtgtgtactttgggactccggagaataagggtttttgcacattgtgtttcattgaataccgggaaaacaagcacttcgcggcagcgtctgggaaggtgagtccaactgctagtcgtttccagaacaccatcccgtgtctagggcgtgagtgtggaactctgggctcaacaatgttcgaggggtactgtcagaagtgcttcatcgaagcccagaatcaaaggttccatgaggccaaaagaactgaggagcagctgcgatcaagccagcgacgcgacgtacccaggactactcagtcgacatccagacccaagtgcgcacgagcaagctgcaagaacatactggcatgccgaagtgaggagttatgcatggagtgccagcaccagccagaagacggaccctgggggcctccaggatag

SEQ ID NO: 163562 - DNA, 4432 bp, Artificial Sequence
  derived and/or modified sequence
tgccttgaccaggacttgggactttgcgaaaggatcgcggggcccggagaggtgttggagagcacaatggctgaacaagtccttcctcaggctttgtatttgagcaatatgcggaaagctgtgaagatacgggagagaactccagaagacatttttaaacctactaatgggatcattcatcattttaaaaccatgcaccgatacacactggaaatgttcagaacttgccagttttgtcctcagtttcgggagatcatccacaaagccctcatcgacagaaacatccaggccaccctggaaagccagaagaaactcaactggtgtcgagaagtccggaagcttgtggcgctgaaaacgaacggtgacggcaattgcctcatgcatgccacttctcagtacatgtggggcgttcaggacacagacttggtactgaggaaggcgctgttcagcacgctcaaggaaacagacacacgcaactttaaattccgctggcaactggagtctctcaaatctcaggaatttgttgaaacggggctttgctatgatactcggaactggaatgatgaatgggacaatcttatcaaaatggcttccacagacacacccatggcccgaagtggacttcagtacaactcactggaagaaatacacatatttgtcctttgcaacatcctcagaaggccaatcattgtcatttcagacaaaatgctaagaagtttggaatcaggttccaatttcgcccctttgaaagtgggtggaatttacttgcctctccactggcctgcccaggaatgctacagataccccattgttctcggctatgacagccatcattttgtacccttggtgaccctgaaggacagtgggcctgaaatccgagctgttccacttgttaacagagaccggggaagatttgaagacttaaaagttcactttttgacagatcctgaaaatgagatgaaggagaagctcttaaaagagtacttaatggtgatagaaatccccgtccaaggctgggaccatggcacaactcatctcatcaatgccgcaaagttggatgaagctaacttaccaaaagaaatcaatctggtagatgattactttgaacttgttcagcatgagtacaagaaatggcaggaaaacagcgagcaggggaggagagaggggcacgcccagaatcccatggaaccttccgtgccccagctttctctcatggatgtaaaatgtgaaacgcccaactgccccttcttcatgtctgtgaacacccagcctttatgccatgagtgctcagagaggcggcaaaagaatcaaaacaaactcccaaagctgaactccaagccgggccctgaggggctccctggcatggcgctcggggcctctcggggagaagcctatgagcccttggcgtggaaccctgaggagtccactggggggcctcattcggccccaccgacagcacccagcccttttctgttcagtgagaccactgccatgaagtgcaggagccccggctgccccttcacactgaatgtgcagcacaacggattttgtgaacgttgccacaacgcccggcaacttcacgccagccacgccccagaccacacaaggcacttggatcccgggaagtgccaagcctgcctccaggatgttaccaggacatttaatgggatctgcagtacttgcttcaaaaggactacagcagaggcctcctccagcctcagcaccagcctccctccttcctgtcaccagcgttccaagtcagatccctcgcggctcgtccggagcccctccccgcattcttgccacagagctggaaacgacgcccctgctggctgcctgtctcaagctgcacggactcctggggacaggacggggacgagcaagtgcagaaaagccggctgcgtgtattttgggactccagaaaacaagggcttttgcacactgtgtttcatcgagtacagagaaaacaaacattttgctgctgcctcagggaaagtcagtcccacagcgtccaggttccagaacaccattccgtgcctggggagggaatgcggcacccttggaagcaccatgtttgaaggatactgccagaagtgtttcattgaagctcagaatcagagatttcatgaggccaaaaggacagaagagcaactgagatcgagccagcgcagagatgtgcctcgaaccacacaaagcacctcaaggcccaagtgcgcccgggcctcctgcaagaacatcctggcctgccgcagcgaggagctctgcatggagtgtcagcatcccaaccagaggatgggccctggggcccaccggggtgagcctgcccccgaagacccccccaagcagcgttgccgggcccccgcctgtgatcattttggcaatgccaagtgcaacggctactgcaacgaatgctttcagttcaagcagatgtatggctaaccggaaacaggtgggtcacctcctgcaagaagtggggcctcgagctgtcagtcatcatggtgctatcctctgaacccctcagctgccactgcaacagtgggcttaagggtgtctgagcaggagaggaaagataagctcttcgtggtgcccacgatgctcaggtttggtaacccgggagtgttcccaggtggccttagaaagcaaagcttgtaactggcaagggatgatgtcagattcagcccaaggttcctcctctcctaccaagcaggaggccaggaacttctttggacttggaaggtgtgcggggactggccgaggcccctgcaccctgcgcatcaggactgcttcatcgtcttggctgagaaagggaaaagacacacaagtcgcgtgggttggagaagccagagccattccacctcccctcccccagcatctctcagagatgtgaagccagatcctcatggcagcgaggccctctgcaagaagctcaaggaagctcagggaaaatggacgtattcagagagtgtttgtagttcatggtttttccctacctgcccggttcctttcctgaggacccggcagaaatgcagaaccatccatggactgtgattctgaggctgctgagactgaacatgttcacattgacagaaaaacaagctgctctttataatatgcaccttttaaaaaattagaatattttactgggaagacgtgtaactctttgggttattactgtctttacttctaaagaagttagcttgaactgaggagtaaaagtgtgtacatatataatatacccttacattatgtatgagggatttttttaaattatattgaaatgctgccctagaagtacaataggaaggctaaataataataacctgttttctggttgttgttggggcatgagcttgtgtatacactgcttgcataaactcaaccagctgcctttttaaagggagctctagtcctttttgtgtaattcactttatttattttattacaaacttcaagattatttaagtgaagatatttcttcagctctggggaaaatgccacagtgttctcctgagagaacatccttgctttgagtcaggctgtgggcaagttcctgaccacagggagtaaattggcctctttgatacacttttgcttgcctccccaggaaagaaggaattgcatccaaggtatacatacatattcatcgatgtttcgtgcttctccttatgaaactccagctatgtaataaaaaactatactctgtgttctgttaatgcctctgagtgtcctacctccttggagatgagatagggaaggagcagggatgagactggcaatggtcacagggaaagatgtggccttttgtgatggttttattttctgttaacactgtgtcctgggggggctgggaagtcccctgcatcccatggtaccctggtattgggacagcaaaagccagtaaccatgagtatgaggaaatctctttctgttgctggcttacagtttctctgtgtgctttgtggttgctgtcatatttgctctagaagaaaaaaaaaaaaggaggggaaatgcattttccccagagataaaggctgccattttgggggtctgtacttatggcctgaaaatatttgtgatccataactctacacagcctttactcatactattaggcacactttccccttagagccccctaagtttttcccagacgaatctttataatttctttccaaagataccaaataaacttcagtgttttcatctaattctcttaaagttgatatcttaatattttgtgttgatcattatttccattcttaatgtgaaaaaaagtaattatttatacttattataaaaagtatttgaaatttgcacatttaattgtccctaatagaaagccacctattctttgttggatttcttcaagtttttctaaataaatgtaacttttcacaagagtcaacattaaaaaataaattatttaagaaca

SEQ ID NO: 163563 - DNA, 3817 bp, Artificial Sequence
  derived and/or modified sequence
aggtgttggagagcacaatggctgaacaagtccttcctcaggctttgtatttgagcaatatgcggaaagctgtgaagatacgggagagaactccagaagacatttttaaacctactaatgggatcattcatcattttaaaaccatgcaccgatacacactggaaatgttcagaacttgccagttttgtcctcagtttcgggagatcatccacaaagccctcatcgacagaaacatccaggccaccctggaaagccagaagaaactcaactggtgtcgagaagtccggaagcttgtggcgctgaaaacgaacggtgacggcaattgcctcatgcatgccacttctcagtacatgtggggcgttcaggacacagacttggtactgaggaaggcgctgttcagcacgctcaaggaaacagacacacgcaactttaaattccgctggcaactggagtctctcaaatctcaggaatttgttgaaacggggctttgctatgatactcggaactggaatgatgaatgggacaatcttatcaaaatggcttccacagacacacccatggcccgaagtggacttcagtacaactcactggaagaaatacacatatttgtcctttgcaacatcctcagaaggccaatcattgtcatttcagacaaaatgctaagaagtttggaatcaggttccaatttcgcccctttgaaagtgggtggaatttacttgcctctccactggcctgcccaggaatgctacagataccccattgttctcggctatgacagccatcattttgtacccttggtgaccctgaaggacagtgggcctgaaatccgagctgttccacttgttaacagagaccggggaagatttgaagacttaaaagttcactttttgacagatcctgaaaatgagatgaaggagaagctcttaaaagagtacttaatggtgatagaaatccccgtccaaggctgggaccatggcacaactcatctcatcaatgccgcaaagttggatgaagctaacttaccaaaagaaatcaatctggtagatgattactttgaacttgttcagcatgagtacaagaaatggcaggaaaacagcgagcaggggaggagagaggggcacgcccagaatcccatggaaccttccgtgccccagctttctctcatggatgtaaaatgtgaaacgcccaactgccccttcttcatgtctgtgaacacccagcctttatgccatgagtgctcagagaggcggcaaaagaatcaaaacaaactcccaaagctgaactccaagccgggccctgaggggctccctggcatggcgctcggggcctctcggggagaagcctatgagcccttggcgtggaaccctgaggagtccactggggggcctcattcggccccaccgacagcacccagcccttttctgttcagtgagaccactgccatgaagtgcaggagccccggctgccccttcacactgaatgtgcagcacaacggattttgtgaacgttgccacaacgcccggcaacttcacgccagccacgccccagaccacacaaggcacttggatcccgggaagtgccaagcctgcctccaggatgttaccaggacatttaatgggatctgcagtacttgcttcaaaaggactacagcagaggcctcctccagcctcagcaccagcctccctccttcctgtcaccagcgttccaagtcagatccctcgcggctcgtccggagcccctccccgcattcttgccacagagctggaaacgacgcccctgctggctgcctgtctcaagctgcacggactcctggggacaggacggggacgagcaagtgcagaaaagccggctgcgtgtattttgggactccagaaaacaagggcttttgcacactgtgtttcatcgagtacagagaaaacaaacattttgctgctgcctcagggaaagtcagtcccacagcgtccaggttccagaacaccattccgtgcctggggagggaatgcggcacccttggaagcaccatgtttgaaggatactgccagaagtgtttcattgaagctcagaatcagagatttcatgaggccaaaaggacagaagagcaactgagatcgagccagcgcagagatgtgcctcgaaccacacaaagcacctcaaggcccaagtgcgcccgggcctcctgcaagaacatcctggcctgccgcagcgaggagctctgcatggagtgtcagcatcaaccagaggatgggccctggggcccaccggggtgagcctgcccccgaagacccccccaagcagcgttgccgggcccccgcctgtgatcattttggcaatgccaagtgcaacggctactgcaacgaatgctttcagttcaagcagatgtatggctaaccggaaacaggtgggtcacctcctgcaagaagtggggcctcgagctgtcagtcatcatggtgctatcctctgaacccctcagctgccactgcaacagtgggcttaagggtgtctgagcaggagaggaaagataagctcttcgtggtgcccacgatgctcaggtttggtaacccgggagtgttcccaggtggccttagaaagcaaagcttgtaactggcaagggatgatgtcagattcagcccaaggttcctcctctcctaccaagcaggaggccaggaacttctttggacttggaaggtgtgcggggactggccgaggcccctgcaccctgcgcatcaggactgcttcatcgtcttggctgagaaagggaaaagacacacaagtcgcgtgggttggagaagccagagccattccacctcccctcccccagcatctctcagagatgtgaagccagatcctcatggcagcgaggccctctgcaagaagctcaaggaagctcagggaaaatggacgtattcagagagtgtttgtagttcatggtttttccctacctgcccggttcctttcctgaggacccggcagaaatgcagaaccatccatggactgtgattctgaggctgctgagactgaacatgttcacattgacagaaaaacaagctgctctttataatatgcaccttttaaaaaattagaatattttactgggaagacgtgtaactctttgggttattactgtctttacttctaaagaagttagcttgaactgaggagtaaaagtgtgtacatatataatatacccttacattatgtatgagggatttttttaaattatattgaaatgctgccctagaagtacaataggaaggctaaataataataacctgttttctggttgttgttggggcatgagcttgtgtatacactgcttgcataaactcaaccagctgcctttttaaagggagctctagtcctttttgtgtaattcactttatttattttattacaaacttcaagattatttaagtgaagatatttcttcagctctggggaaaatgccacagtgttctcctgagagaacatccttgctttgagtcaggctgtgggcaagttcctgaccacagggagtaaattggcctctttgatacacttttgcttgcctccccaggaaagaaggaattgcatccaaggtatacatacatattcatcgatgtttcgtgcttctccttatgaaactccagctatgtaataaaaaactatactctgtgttctgttaatgcctctgagtgtcctacctccttggagatgagatagggaaggagcagggatgagactggcaatggtcacagggaaagatgtggccttttgtgatggttttattttctgttaacactgtgtcctgggggggctgggaagtcccctgcatcccatg

SEQ ID NO: 163564 - DNA, 3818 bp, Artificial Sequence
  derived and/or modified sequence
aggtgttggagagcacaatggctgaacaagtccttcctcaggctttgtatttgagcaatatgcggaaagctgtgaagatacgggagagaactccagaagacatttttaaacctactaatgggatcattcatcattttaaaaccatgcaccgatacacactggaaatgttcagaacttgccagttttgtcctcagtttcgggagatcatccacaaagccctcatcgacagaaacatccaggccaccctggaaagccagaagaaactcaactggtgtcgagaagtccggaagcttgtggcgctgaaaacgaacggtgacggcaattgcctcatgcatgccacttctcagtacatgtggggcgttcaggacacagacttggtactgaggaaggcgctgttcagcacgctcaaggaaacagacacacgcaactttaaattccgctggcaactggagtctctcaaatctcaggaatttgttgaaacggggctttgctatgatactcggaactggaatgatgaatgggacaatcttatcaaatggcttccacagacacacccatggcccgaagtggacttcagtacaactcactggaagaaatacacatatttgtcctttgcaacatcctcagaaggccaatcattgtcatttcagacaaaatgctaagaagtttggaatcaggttccaatttcgcccctttgaaagtgggtggaatttacttgcctctccactggcctgcccaggaatgctacagataccccattgttctcggctatgacagccatcattttgtacccttggtgaccctgaaggacagtgggcctgaaatccgagctgttccacttgttaacagagaccggggaagatttgaagacttaaaagttcactttttgacagatcctgaaaatgagatgaaggagaagctcttaaaagagtacttaatggtgatagaaatccccgtccaaggctgggaccatggcacaactcatctcatcaatgccgcaaagttggatgaagctaacttaccaaaagaaatcaatctggtagatgattactttgaacttgttcagcatgagtacaagaaatggcaggaaaacagcgagcaggggaggagagaggggcacgcccagaatcccatggaaccttccgtgccccagctttctctcatggatgtaaaatgtgaaacgcccaactgccccttcttcatgtctgtgaacacccagcctttatgccatgagtgctcagagaggcggcaaaagaatcaaaacaaactcccaaagctgaactccaagccgggccctgaggggctccctggcatggcgctcggggcctctcggggagaagcctatgagcccttggcgtggaaccctgaggagtccactggggggcctcattcggccccaccgacagcacccagcccttttctgttcagtgagaccactgccatgaagtgcaggagccccggctgccccttcacactgaatgtgcagcacaacggattttgtgaacgttgccacaacgcccggcaacttcacgccagccacgccccagaccacacaaggcacttggatcccgggaagtgccaagcctgcctccaggatgttaccaggacatttaatgggatctgcagtacttgcttcaaaaggactacagcagaggcctcctccagcctcagcaccagcctccctccttcctgtcaccagcgttccaagtcagatccctcgcggctcgtccggagcccctccccgcattcttgccacagagctggaaacgacgcccctgctggctgcctgtctcaagctgcacggactcctggggacaggacggggacgagcaagtgcagaaaagccggctgcgtgtattttgggactccagaaaacaagggcttttgcacactgtgtttcatcgagtacagagaaaacaaacattttgctgctgcctcagggaaagtcagtcccacagcgtccaggttccagaacaccattccgtgcctggggagggaatgcggcacccttggaagcaccatgtttgaaggatactgccagaagtgtttcattgaagctcagaatcagagatttcatgaggccaaaaggacagaagagcaactgagatcgagccagcgcagagatgtgcctcgaaccacacaaagcacctcaaggcccaagtgcgcccgggcctcctgcaagaacatcctggcctgccgcagcgaggagctctgcatggagtgtcagcatcccaaccagaggatgggccctggggcccaccggggtgagcctgcccccgaagacccccccaagcagcgttgccgggcccccgcctgtgatcattttggcaatgccaagtgcaacggctactgcaacgaatgctttcagttcaagcagatgtatggctaaccggaaacaggtgggtcacctcctgcaagaagtggggcctcgagctgtcagtcatcatggtgctatcctctgaacccctcagctgccactgcaacagtgggcttaagggtgtctgagcaggagaggaaagataagctcttcgtggtgcccacgatgctcaggtttggtaacccgggagtgttcccaggtggccttagaaagcaaagcttgtaactggcaagggatgatgtcagattcagcccaaggttcctcctctcctaccaagcaggaggccaggaacttctttggacttggaaggtgtgcggggactggccgaggcccctgcaccctgcgcatcaggactgcttcatcgtcttggctgagaaagggaaaagacacacaagtcgcgtgggttggagaagccagagccattccacctcccctcccccagcatctctcagagatgtgaagccagatcctcatggcagcgaggccctctgcaagaagctcaaggaagctcagggaaaatggacgtattcagagagtgtttgtagttcatggtttttccctacctgcccggttcctttcctgaggacccggcagaaatgcagaaccatccatggactgtgattctgaggctgctgagactgaacatgttcacattgacagaaaaacaagctgctctttataatatgcaccttttaaaaaattagaatattttactgggaagacgtgtaactctttgggttattactgtctttacttctaaagaagttagcttgaactgaggagtaaaagtgtgtacatatataatatacccttacattatgtatgagggatttttttaaattatattgaaatgctgccctagaagtacaataggaaggctaaataataataacctgttttctggttgttgttggggcatgagcttgtgtatacactgcttgcataaactcaaccagctgcctttttaaagggagctctagtcctttttgtgtaattcactttatttattttattacaaacttcaagattatttaagtgaagatatttcttcagctctggggaaaatgccacagtgttctcctgagagaacatccttgctttgagtcaggctgtgggcaagttcctgaccacagggagtaaattggcctctttgatacacttttgcttgcctccccaggaaagaaggaattgcatccaaggtatacatacatattcatcgatgtttcgtgcttctccttatgaaactccagctatgtaataaaaaactatactctgtgttctgttaatgcctctgagtgtcctacctccttggagatgagatagggaaggagcagggatgagactggcaatggtcacagggaaagatgtggccttttgtgatggttttattttctgttaacactgtgtcctgggggggctgggaagtcccctgcatcccatg

SEQ ID NO: 163565 - protein, 654 aa, Artificial Sequence
  derived and/or modified sequence
MSEASSEDLVPPLEAGAAPYREEEEAAKKKKEKKKKSKGLANVFCVFTKGKKKKGQPSSAEPEDAAGSRQGLDGPPPTVEELKAALERGQLEAARPLLALERELAAAAAAGGVSEEELVRRQSKVEALYELLRDQVLGVLRRPLEAPPERLRQALAVVAEQEREDRQAAAAGPGTSGLAATRPRRWLQLWRRGVAEAAEERMGQRPAAGAEVPESVFLHLGRTMKEDLEAVVERLKPLFPAEFGVVAAYAESYHQHFAAHLAAVAQFELCERDTYMLLLWVQNLYPNDIINSPKLVGELQGMGLGSLLPPRQIRLLEATFLSSEAANVRELMDRALELEARRWAEDVPPQRLDGHCHSELAIDIIQITSQAQAKAESITLDLGSQIKRVLLVELPAFLRSYQRAFNEFLERGKQLTNYRANVIANINNCLSFRMSMEQNWQVPQDTLSLLLGPLGELKSHGFDTLLQNLHEDLKPLFKRFTHTRWAAPVETLENIIATVDTRLPEFSELQGCFREELMEALHLHLVKEYIIQLSKGRLVLKTAEQQQQLAGYILANADTIQHFCTQHGSPATWLQPALPTLAEIIRLQDPSAIKIEVATYATCYPDFSKGHLSAILAIKGNLSNSEVKRIRSILDVSMGAQEPSRPLFSLIKVG

SEQ ID NO: 163566 - protein, 323 aa, Artificial Sequence [sequence omitted]

SEQ ID NO: 163567 - protein, 39 aa, Artificial Sequence
  derived and/or modified sequence
MSEASSEDLVPPLEAGAAPYREEEEAAKKKKEKKKKSKG

SEQ ID NO: 163568 - DNA, 1965 bp, Artificial Sequence
  derived and/or modified sequence
atgagcgaggccagcagcgaggacctggtgccccccctggaggccggcgccgccccctacagagaggaggaggaggccgccaagaagaagaaggagaagaagaagaagagcaagggcctggccaacgtgttctgcgtgttcaccaagggcaagaagaagaagggccagcccagcagcgccgagcccgaggacgccgccggcagcagacagggcctggacggccccccccccaccgtggaggagctgaaggccgccctggagagaggccagctggaggccgccagacccctgctggccctggagagagagctggccgccgccgccgccgccggcggcgtgagcgaggaggagctggtgagaagacagagcaaggtggaggccctgtacgagctgctgagagaccaggtgctgggcgtgctgagaagacccctggaggccccccccgagagactgagacaggccctggccgtggtggccgagcaggagagagaggacagacaggccgccgccgccggccccggcaccagcggcctggccgccaccagacccagaagatggctgcagctgtggagaagaggcgtggccgaggccgccgaggagagaatgggccagagacccgccgccggcgccgaggtgcccgagagcgtgttcctgcacctgggcagaaccatgaaggaggacctggaggccgtggtggagagactgaagcccctgttccccgccgagttcggcgtggtggccgcctacgccgagagctaccaccagcacttcgccgcccacctggccgccgtggcccagttcgagctgtgcgagagagacacctacatgctgctgctgtgggtgcagaacctgtaccccaacgacatcatcaacagccccaagctggtgggcgagctgcagggcatgggcctgggcagcctgctgccccccagacagatcagactgctggaggccaccttcctgagcagcgaggccgccaacgtgagagagctgatggacagagccctggagctggaggccagaagatgggccgaggacgtgcccccccagagactggacggccactgccacagcgagctggccatcgacatcatccagatcaccagccaggcccaggccaaggccgagagcatcaccctggacctgggcagccagatcaagagagtgctgctggtggagctgcccgccttcctgagaagctaccagagagccttcaacgagttcctggagagaggcaagcagctgaccaactacagagccaacgtgatcgccaacatcaacaactgcctgagcttcagaatgagcatggagcagaactggcaggtgccccaggacaccctgagcctgctgctgggccccctgggcgagctgaagagccacggcttcgacaccctgctgcagaacctgcacgaggacctgaagcccctgttcaagagattcacccacaccagatgggccgcccccgtggagaccctggagaacatcatcgccaccgtggacaccagactgcccgagttcagcgagctgcagggctgcttcagagaggagctgatggaggccctgcacctgcacctggtgaaggagtacatcatccagctgagcaagggcagactggtgctgaagaccgccgagcagcagcagcagctggccggctacatcctggccaacgccgacaccatccagcacttctgcacccagcacggcagccccgccacctggctgcagcccgccctgcccaccctggccgagatcatcagactgcaggaccccagcgccatcaagatcgaggtggccacctacgccacctgctaccccgacttcagcaagggccacctgagcgccatcctggccatcaagggcaacctgagcaacagcgaggtgaagagaatcagaagcatcctggacgtgagcatgggcgcccaggagcccagcagacccctgttcagcctgatcaaggtgggctag

SEQ ID NO: 163569 - DNA, 972 bp, Artificial Sequence
  derived and/or modified sequence
atggacagagccctggagctggaggccagaagatgggccgaggacgtgcccccccagagactggacggccactgccacagcgagctggccatcgacatcatccagatcaccagccaggcccaggccaaggccgagagcatcaccctggacctgggcagccagatcaagagagtgctgctggtggagctgcccgccttcctgagaagctaccagagagccttcaacgagttcctggagagaggcaagcagctgaccaactacagagccaacgtgatcgccaacatcaacaactgcctgagcttcagaatgagcatggagcagaactggcaggtgccccaggacaccctgagcctgctgctgggccccctgggcgagctgaagagccacggcttcgacaccctgctgcagaacctgcacgaggacctgaagcccctgttcaagagattcacccacaccagatgggccgcccccgtggagaccctggagaacatcatcgccaccgtggacaccagactgcccgagttcagcgagctgcagggctgcttcagagaggagctgatggaggccctgcacctgcacctggtgaaggagtacatcatccagctgagcaagggcagactggtgctgaagaccgccgagcagcagcagcagctggccggctacatcctggccaacgccgacaccatccagcacttctgcacccagcacggcagccccgccacctggctgcagcccgccctgcccaccctggccgagatcatcagactgcaggaccccagcgccatcaagatcgaggtggccacctacgccacctgctaccccgacttcagcaagggccacctgagcgccatcctggccatcaagggcaacctgagcaacagcgaggtgaagagaatcagaagcatcctggacgtgagcatgggcgcccaggagcccagcagacccctgttcagcctgatcaaggtgggctag

SEQ ID NO: 163570 - DNA, 1965 bp, Artificial Sequence
  derived and/or modified sequence
atgagtgaggcttcatcagaggaccttgtccctcccctcgaggctggtgcagcaccatatcgcgaggaggaagaagcagctaagaagaagaaggagaaaaaaaaaaagagtaaggggttggcgaacgtgttctgtgtgttcaccaaaggtaaaaagaaaaaagggcagccctcgtctgcagagccagaagatgccgccggcagtcgacagggactagatgggccccctccaactgtagaagagctgaaagcagccttggagcgcgggcagctggaggccgcacgtcccctcctggctctggaacgggagctggctgctgcagccgctgccggcggagtctctgaagaagagctagtgcgccgccagtctaaagttgaggcactgtacgaactgctccgagaccaggtcctgggcgttctgaggcggcccctcgaggccccacccgaacgcttgcgacaagccctggcggtcgttgccgaacaggaacgcgaagacagacaggccgccgccgccggtcctggaacatccggtctggccgctacacggccacgccggtggcttcaactgtggcgcaggggcgtcgccgaggctgcagaagaacgcatgggccaacgtcctgccgcgggagcagaagtcccagagagtgtttttctgcatttgggtcggacaatgaaggaggacttagaagcagttgttgagcgcctgaagccactgttccctgcagagttcggcgttgttgcggcttacgccgaaagttaccaccagcattttgctgcacacctggcggccgtcgcccagtttgagctgtgcgagagggatacctacatgctgttgctgtgggtccagaatttgtatcctaacgacattattaactctccgaaacttgtcggcgagctgcagggcatgggcttgggaagcctccttccccctcgccagatccggttacttgaggccacttttctgtcctcagaggcagcaaacgtgagggagctaatggatagggcccttgagttagaggcacggagatgggcagaagacgtgccaccacagagactggatggccactgccactccgagctggccattgatattattcaaatcacttcacaggcccaagcaaaggctgagagtataacattggacctgggctctcagatcaagcgggtcctgctggtggagctgcctgcatttctgagatcgtatcagcgggccttcaacgagtttcttgaacggggtaagcagctgaccaactacagagccaacgtcattgccaatatcaataattgtctgtcgtttcggatgtccatggaacaaaattggcaagtgcctcaggacactctttccctcctcttgggcccgctcggtgagttgaaatctcacggatttgataccctgcttcagaatctgcatgaggatttgaagcctctctttaaaagatttactcacacacggtgggcagccccagtggagactctggaaaatatcattgccacggtcgacacacggctgccagagttttcagagctgcaaggatgcttccgggaggagttgatggaggctctgcatctgcacttagtgaaggaatacatcatccagctgagcaaagggcggctcgtgttaaagacggccgaacagcagcagcaacttgcgggttatattcttgccaacgccgatacaattcaacatttctgtactcagcacgggagtccagcaacgtggctgcagcccgctttaccaaccctggccgaaatcattagactgcaggaccccagcgccatcaagattgaagtggctacatacgccacctgttaccctgacttcagtaaaggacatttatctgctatccttgcaattaagggcaacctgtcaaatagcgaggtgaagaggatccggtctattctggatgtgtctatgggggctcaagaaccctcccgtccactctttagcctcatcaaagtgggatag

SEQ ID NO: 163571 - DNA, 972 bp, Artificial Sequence
  derived and/or modified sequence
atggatagggctcttgagcttgaggcgagacgctgggccgaagatgtacccccacaacgcctcgacggtcactgccactccgaattggcaattgacatcatacagataacctctcaggcccaggccaaggcagagtccattacactggatctggggtcccagatcaaaagggttctcctagtagaactgccagcctttttgaggagttaccagcgcgcttttaatgagttcctggagagagggaaacagctgacgaattacagggctaatgttattgcaaacatcaataactgtctctctttcagaatgagcatggaacaaaactggcaggttcctcaggacaccctttcgctactgctgggccccctgggtgagctcaagagccatggctttgacaccttacttcagaatttgcatgaggatctcaaacccttgttcaagagattcactcacaccaggtgggccgcgcccgtcgagaccctcgaaaacataatcgcgacggttgacactagactgccagaattctccgagcttcagggctgcttcagagaggaactcatggaagccctgcacctgcatctggtgaaagagtacattattcagctgtccaagggccggttggtcctgaagacagctgagcagcaacagcagctagcgggatatattcttgcaaacgccgataccatccaacacttttgtacgcagcacggatctccagccacatggctgcaacccgcattgccaacgttggccgagattattcggcttcaggaccctagcgccatcaagatcgaggtggccacatacgccacatgttaccctgattttagcaagggccatctgtctgctatcctggcgataaagggaaacctgagcaactctgaagttaagcgtatccggtccatcctggacgtcagtatgggcgcccaggaacctagtagaccactgttttctctgataaaggtgggctag

SEQ ID NO: 163572 - DNA, 1965 bp, Artificial Sequence
  derived and/or modified sequence
atgagcgaggctagcagcgaagatcttgttcccccactggaagcgggcgcagccccataccgggaggaagaagaggccgctaaaaaaaagaaggagaagaagaagaaatctaagggtctcgccaatgtgttttgtgtcttcaccaaaggaaaaaagaagaaggggcagccttcatccgctgaacccgaggacgccgcgggctctaggcaggggctcgacggacccccccctacagttgaagagttaaaggccgccctggagcggggacaattagaagctgcacggcccctcctcgctctggagcgcgagctggccgccgcggcagccgccggcggggttagcgaagaagaactagtgcggcgccagagcaaagtagaagccctctatgaattactgcgagaccaagtgttgggcgtgctgaggcgcccattggaggcaccgcctgagcgtctgcgccaggctttggcggtggtagctgagcaggagagagaggaccgacaagccgccgctgccgggccgggtacttccggcctcgcggcaactagacccagacgttggcttcagctgtggcggagaggcgtcgccgaagccgctgaggagcgaatggggcagaggcccgctgcgggtgcggaggttcctgaatccgtttttctgcatctggggagaaccatgaaggaagacctggaggccgtggtggagaggctcaagcctctctttcccgctgagtttggcgtagtcgccgcttatgccgagtcgtaccatcaacatttcgccgcacaccttgctgctgtggcacagttcgaactctgcgagagagacacttatatgcttctgttgtgggtccaaaatctctaccctaacgatattatcaattcaccgaaactggtcggggagcttcaaggcatgggactgggctcacttcttcccccgcgacagattcgactgctggaggctaccttcctgagtagcgaggccgcaaacgtgagggaactcatggatagagccctggaactcgaagcaagaaggtgggcagaagatgtacccccgcaaagactggacggccactgtcactccgaactcgcaatcgatatcattcagattacatctcaggcccaagccaaagccgagagcatcacactggatttgggatcccagatcaaacgggtgctcttggttgagctccccgcattccttagaagctatcaaagggcatttaacgagtttttagagaggggcaagcaactgaccaattatagagccaacgtgatagcaaacattaataattgcctctcatttagaatgtcaatggagcagaactggcaggtcccacaggatactctctccctgctgctcggccccctcggagagctcaagtcacacggttttgatacactgcttcagaatcttcatgaagacctgaaaccgctatttaagaggtttactcacacacggtgggcagctccggtggagacgctcgaaaatatcatcgctaccgtcgacaccaggttgccggagttcagcgagctgcagggctgttttcgagaagagctgatggaggccctgcacctgcaccttgtgaaagaatacatcatccagctgagcaaaggaagattggtcctgaagacagccgagcagcagcagcaactcgctggctacatcctagccaatgctgacactatccaacacttttgcacccagcacgggtcccctgccacctggctgcagcccgccctcccaacattggctgaaataatccgcctccaggacccctccgctatcaaaatcgaagtggccacctacgccacatgttaccccgatttctcaaagggccacttgtcagccattttggccatcaagggcaacctgagcaacagcgaggttaaaagaattcgctcaattctagatgtatccatgggcgcccaagaaccctctaggcctttattctctctaattaaagtgggttag

SEQ ID NO: 163573 - DNA, 1965 bp, Artificial Sequence
  derived and/or modified sequence
atgtctgaggccagcagcgaggacctggtgccccccctggaggccggggccgccccctaccgggaggaggaggaggccgccaagaagaagaaggagaagaagaagaagagcaagggcctggccaacgtgttctgtgtgttcaccaagggcaagaagaagaagggccagcccagcagcgctgagccagaagatgctgctggcagccggcagggcctggatggccccccacccaccgtggaggagctgaaggccgccctggagcggggccagctggaggccgcccggcccctgctggccctggagcgggagctggccgctgctgctgctgctgggggcgtgtctgaggaggagctggtgcggcggcagagcaaggtggaggccctgtatgagctgctgcgggaccaggtgctgggcgtgctgcggcggcccctggaggcccctcctgagcggctgcggcaggccctggccgtggtggccgagcaggagcgggaggaccggcaggccgctgctgctggccctggcaccagcggcctggccgccacccggccccggcgctggctgcagctgtggaggagaggagtggccgaggccgctgaggagaggatgggccagaggcctgctgctggagctgaggtgcctgagagcgtcttcctgcacctgggccgcaccatgaaggaggacctggaggccgtggtggagcggctgaagcccctcttccctgctgagtttggagtggtggccgcctatgcagagagctaccaccagcactttgctgcccacctggccgctgtggcccagtttgagctgtgtgagcgggacacctacatgctgctgctgtgggtgcagaacctgtacccaaatgacatcatcaacagccccaagctggtgggggagctgcagggcatgggcctgggcagcctgctgcccccccggcagatccggctgctggaggccaccttcctgagcagcgaggccgccaacgtgcgggagctgatggaccgggccctggagctggaggcccggcgctgggccgaggatgtgcccccccagaggctggatggccactgccacagcgagctggccatcgacatcatccagatcaccagccaggcccaggccaaggccgagagcatcaccctggacctgggcagccagatcaagagggtgctgctggtggagctgcctgccttcctgcggagctaccagagggccttcaatgagttcctggagcggggcaagcagctgaccaactaccgggccaacgtgattgccaacatcaacaactgcctgtccttcaggatgtccatggagcagaactggcaggtgccccaggacaccctgagcctgctgctgggccccctgggggagctgaagagccacggctttgacaccctgctgcagaacctgcacgaggacctgaagcccctcttcaagcgcttcacccacacccgctgggccgcccctgtggagaccctggagaacatcatcgccaccgtggacacccggctgcctgagttcagcgagctgcagggctgcttccgggaggagctgatggaggccctgcacctgcacctggtgaaggagtacatcatccagctgagcaagggccgcctggtgctgaagacagctgagcagcagcagcagctggccggctacatcctggccaatgctgacaccatccagcacttctgcacccagcacggcagccctgccacctggctgcagcctgccctgcccaccctggccgagatcatccggctgcaggaccccagcgccatcaagattgaggtggccacctacgccacctgctacccagacttcagcaagggccacctgagcgccatcctggccatcaagggcaacctgagcaacagcgaggtgaagaggatccgcagcatcctggatgtgtccatgggcgcccaggagcccagccggcccctcttcagcctcatcaaggtgggctag

SEQ ID NO: 163574 - DNA, 972 bp, Artificial Sequence
  derived and/or modified sequence
atggaccgggccctggagctggaggcccggcgctgggccgaggatgtgcccccccagaggctggatggccactgccacagcgagctggccatcgacatcatccagatcaccagccaggcccaggccaaggccgagagcatcaccctggacctgggcagccagatcaagagggtgctgctggtggagctgcctgccttcctgcggagctaccagagggccttcaatgagttcctggagcggggcaagcagctgaccaactaccgggccaacgtcatcgccaacatcaacaactgcctgtccttcaggatgtccatggagcagaactggcaggtgccccaggacaccctgagcctgctgctgggccccctgggggagctgaagagccacggctttgacaccctgctgcagaacctgcacgaggacctgaagcccctcttcaagcgcttcacccacacccgctgggccgcccctgtggagaccctggagaacatcatcgccaccgtggacacccggctgcctgagttcagcgagctgcagggctgcttccgggaggagctgatggaggccctgcacctgcacctggtgaaggagtacatcatccagctgagcaagggccgcctggtgctgaagacagctgagcagcagcagcagctggccggctacatcctggccaatgctgacaccatccagcacttctgcacccagcacggcagccctgccacctggctgcagcctgccctgcccaccctggccgagatcatccggctgcaggaccccagcgccatcaagattgaggtggccacctacgccacctgctacccagacttcagcaagggccacctgagcgccatcctggccatcaagggcaacctgagcaacagcgaggtgaagaggatccgcagcatcctggatgtgtccatgggcgcccaggagcccagccggcccctcttcagcctcatcaaggtgggctag

SEQ ID NO: 163575 - DNA, 1965 bp, Artificial Sequence
  derived and/or modified sequence
atgagcgaggccagcagcgaggacctggtgccccccctggaggccggagccgcaccctatcgcgaagaagaggaagcagctaagaagaagaaggagaagaaaaagaagtccaagggcctcgctaatgttttttgcgtgtttacaaagggcaaaaagaagaagggccagccatcctctgctgaacccgaggatgccgcgggatctcgccaagggctggacggaccaccgcctacagtggaggaactgaaagccgccttagagagagggcaactggaggctgctaggcctctcctcgcgctcgagagagagctggctgccgcagcagccgctggcggcgtgtcagaggaggagcttgtgaggcggcaatcaaaagtggaggccctgtacgaacttctgagggatcaggtactcggggtgctccgccgacccctcgaggcgccccctgaaaggctgagacaagccctggctgtggtggctgaacaggaacgtgaggatagacaggccgctgctgccggacctggaacctccgggctagccgcaacgagaccgcgtaggtggctgcagctttggagacgtggggtcgccgaagcagcggaggaaagaatgggacagcgtcccgccgccggcgcggaggtgcctgagtcagtgttcctccatcttggtcgaactatgaaagaagatctggaggccgtagtcgagagactgaaacctctattccctgctgagtttggtgtagtggcagcctatgccgagagttatcaccaacacttcgcagcgcatctagcggccgtggcccagtttgagctgtgtgagcgggacacctatatgttactgctgtgggtccagaacctctaccccaacgatatcatcaactcacctaagctggtgggcgagcttcagggaatgggcttaggtagcctgctgccacccaggcagatcagactgctggaagccacgttcctatcttctgaggcggcaaatgtgagggagctcatggaccgcgccctggaactggaggcccggagatgggcagaggacgtccctccgcagcggctggacgggcactgccacagtgaactggcgatcgatattatccaaattacctcccaggctcaggcaaaggccgaatcgattacactggacctaggctcgcagatcaaacgggtgctactggtggaattacctgcctttctgcgctcttatcaaagagctttcaatgagttcctggagcgtggaaaacagctgacaaactaccgcgccaatgtgattgccaatatcaacaactgtctctcatttagaatgagcatggagcagaactggcaggtcccccaggataccttgtcacttctcctgggcccactcggggaacttaagtctcacggctttgacactctcctgcaaaacctccacgaagacctcaaacctcttttcaagagatttactcatacaaggtgggctgctcccgttgaaactctcgagaatatcatcgccaccgtcgacaccaggctgcctgaattttctgaattgcaggggtgctttcgtgaggaactgatggaagctctccatcttcacttagtgaaagaatacatcattcaactcagcaaaggacgcctggtcctgaaaaccgcagagcagcaacagcagttagcgggttacatactagccaacgctgatacaatccagcatttttgcactcagcacggcagcccagccacttggctgcaacccgctcttcctacgctcgcagaaattataagactgcaagacccttctgctataaaaatcgaagtggccacctacgcaacctgctatcctgattttagtaaggggcatctgagcgctatcctggctatcaaagggaacctcagcaattccgaggttaagcggatcagatcaattctggatgtttccatgggggcccaggagcccagccgccccctgttttctctgataaaagtgggctag

SEQ ID NO: 163576 - DNA, 972 bp, Artificial Sequence
  derived and/or modified sequence
atggaccgggccctggagctggaggcccggcggtgggccgaggacgtgccgccacagcggttagatggccactgtcactccgagctcgcaattgacatcattcaaatcacttctcaggcacaggctaaagccgagtcgatcaccctcgacctcggcagccagattaagagggtgctgctggtggagctgcctgccttcctgcggagttaccaaagagccttcaatgagtttctggaacgtgggaagcagctgactaactacagagcgaacgtaattgctaatatcaataattgcctatcttttcgaatgtctatggagcagaattggcaggtgccacaggatacactgtctttactactgggacctcttggcgaacttaagagccatggctttgacacactgctgcaaaacctgcatgaggatctgaaaccccttttcaaacgatttacacacacccgatgggcagctcctgtagaaacactggagaatattatagccactgtcgacacgaggctcccagaatttagtgaactccagggctgcttcagggaggagctcatggaggcgcttcaccttcaccttgtcaaggagtacatcatccagctatccaaaggcaggctggtcttgaagactgccgaacagcagcagcagctggccggatatattttggccaacgccgacactattcagcatttctgcacacagcacggttcccccgcgacgtggctacagccagcactgccgaccctggctgagatcatccggttgcaagacccgtctgctataaagatcgaagtggctacatatgctacttgctaccccgatttctctaaaggacacctcagcgctatcctggcaattaaaggaaacctgtcgaattctgaagtgaaacgaattaggtcaatcctcgatgtcagcatgggcgcccaggaacctagccgcccactatttagcttgattaaggtgggttag

SEQ ID NO: 163577 - DNA, 1965 bp, Artificial Sequence
  derived and/or modified sequence
atgagcgaggccagcagcgaggacctggtgccccccctggaggccggcgctgccccctacagggaagaggaggaggccgctaaaaagaaaaaagaaaagaagaaaaagtccaagggtctggccaatgtgttctgtgtgtttaccaagggtaagaaaaagaaggggcaaccttcatcggcggagccggaggacgcggctgggtctcgtcagggtctcgacggtccacctcctacagttgaggaacttaaagctgcattggagcgaggtcagctagaggccgccaggcccttgctggcactcgagcgcgaactagccgccgctgccgcggccgggggagtcagcgaggaagagctggtgagacgccagagtaaggtggaagccctctacgaattgctcagagaccaggtgctcggcgtcctgcgacgcccactcgaggcaccgccagagcggctgcggcaagccctggccgtcgtggccgaacaggagcgtgaggacaggcaggccgcagctgctggacctggcactagcgggcttgccgcgacacgccctagacggtggctgcagctatggagaagaggcgttgcagaagcggccgaggaaagaatggggcagagacccgccgctggagctgaagtgccagagtccgtgttccttcacctgggcaggacaatgaaagaagatctggaggctgtagtggagagacttaagccactcttccccgccgagttcggcgtagtggcagcctatgcagaaagctatcaccagcacttcgccgcccacctggctgctgtggctcaattcgagttgtgtgaaagggatacatacatgctactgctatgggtgcaaaacttgtacccaaacgatatcattaactccccaaagctggtcggggagctgcaggggatgggactcggttctctgttgccacctcgacagataagactgcttgaagctacattcctctcctccgaagccgccaacgtaagagagctgatggatcgggcgctggagctggaggccagaagatgggcagaagacgtgccacctcagagactggacggacattgccactcagagttggccatcgacattattcagattaccagccaggcccaagcaaaggcagagtccattacgctcgacctagggtcgcagatcaagagagttctcttggtagagctcccggcatttctccgatcttatcagcgcgcctttaacgagttcttggaacggggaaaacagcttaccaattaccgggccaacgttattgcaaacattaataactgtctctcatttcgtatgtcgatggaacagaattggcaggtgccacaggacaccctctctctcctcctgggccctctgggcgaattgaaatctcatggatttgatacccttctgcaaaacctgcacgaagacctaaagcctcttttcaagcgattcacccatactaggtgggccgctcccgtggaaactctcgagaacatcatcgcaacggtagacacaagactgccagagttttccgagcttcagggctgtttccgtgaggagttgatggaggccctgcacctgcatctcgtgaaagaatatataattcagttgtcaaaaggccggctggttctcaagacggcagagcagcaacagcaacttgccgggtacatcctggctaacgccgacacgatacagcacttttgcacacagcacggatctcccgcaacctggctgcagccagccctccccactctggcagagatcattaggctccaggacccgtcagcgataaagatcgaagtcgcaacatatgccacgtgctatcccgacttttccaagggacacctctccgccatcctggcgattaaggggaatttgtcaaactctgaggtcaagcggatcagaagcattctggatgtgtccatgggcgcccaggagccctcccggcccttattctcattgataaaggtgggatag

SEQ ID NO: 163578 - DNA, 1965 bp, Artificial Sequence
  derived and/or modified sequence
atgtctgaagcaagctccgaggatctggtcccccctctggaggcaggagccgctccttaccgggaagaggaggaagcggcaaaaaaaaagaaggagaaaaagaagaagtctaagggccttgcaaacgtgttttgcgtcttcaccaagggcaagaagaagaaaggacagcccagctcagcagagcccgaagacgcagcaggctccaggcagggactggatgggccaccacctacagtggaggagctcaaagcagccctggagcgcggacagctggaggccgcacggccactgttagcactggagcgggagcttgccgcagcagccgcagcaggcggtgtctccgaagaggagctggtgagaaggcaaagcaaagtggaggctctttatgagctgctgagggaccaagtcctgggggtcctaagaagaccgctcgaagccccacctgaaagactgcgacaggctctcgccgtggtggcagagcaagaacgcgaggatagacaggccgcagctgcgggtccagggacctccggcctggccgctactaggccaagaaggtggctgcaactttggcgaaggggagtggctgaagctgctgaagagcgaatgggacagcgcccagccgcaggagcagaggtgcctgaaagcgtgttcctccatcttggacggacaatgaaagaggacctggaagcagtcgtggagaggctgaaacccctgttcccagctgagttcggcgtagtggccgcttacgcggaaagttatcaccagcacttcgctgcccatttagctgccgttgcacagtttgaactctgtgagcgcgacacgtacatgcttcttctgtgggtgcagaacctgtacccaaatgacattattaattcgcctaaactggtgggagaactgcagggcatgggactgggcagtttgctgcccccaagacagattcggctgctggaagctaccttcctgtcaagcgaagcggctaatgtgagagaactgatggatagagcacttgagcttgaagcaagacgttgggcagaggatgtgccaccgcagcgacttgatggtcactgtcatagcgaactagccattgacattattcagattactagccaggcacaggctaaagccgagtcgatcaccttggacctaggctcacaaatcaagagggtcttacttgtagaacttccagccttcctaagatcataccagcgcgctttcaacgagtttctggagagggggaagcagttgaccaactatcgagctaacgttatagcaaacatcaacaactgtctgagttttcggatgtctatggagcaaaactggcaagttccacaagacacactctctttgttgctgggccctttgggggagcttaaaagtcatgggttcgatacgctattacagaacctccatgaggacctgaagccattattcaaacgattcacacacacccgttgggctgctccagtcgaaaccctcgagaatatcatcgcaactgtcgatactcggctgccagagttttctgagcttcaaggatgctttagggaagagctgatggaagcactccacctgcacttggtcaaagagtacatcatccagctcagtaaagggagactagtgctcaagacagcagagcagcagcagcagcttgctggatacatcctggccaacgccgacacgattcaacatttctgcactcagcatggctctcccgcaacctggcttcagcctgctttaccaaccttggcagaaattattagactccaagaccctagcgccatcaaaattgaggtggcaacctatgctacttgctatcccgattttagtaaaggccatctcagcgccatactggctataaaaggaaatttaagcaactcagaagtcaagagaattaggtccatcctcgacgtcagcatgggggcacaggaaccaagcagaccacttttttcactgatcaaagttggctag

SEQ ID NO: 163579 - DNA, 972 bp, Artificial Sequence
  derived and/or modified sequence
atggatagggccctcgagctagaagccagaaggtgggccgaggacgtgccaccccagagactggacggacattgccactcagaactggcaattgatattatccagatcacatctcaagcccaagccaaagcagagtctatcacactggacctaggttcacagatcaagcgggtgctgctagtcgagctgcctgccttccttcggtcatatcaacgggcatttaatgaattcttagaaaggggtaaacagctgacaaactatcgggctaacgtgatcgctaacattaacaactgtctttctttcagaatgtcgatggaacagaattggcaggtgccacaagacacgctctccctgctgcttggccctttaggagagttgaagagccatgggtttgatactctcctgcagaacttgcacgaagacctgaagcctctgttcaagcggttcactcatactcgctgggccgcaccagttgagaccctcgaaaatattattgccaccgtagacacgaggctgcccgagttttcagagctgcagggctgcttccgcgaagagttgatggaagcactgcatctgcatctcgttaaggagtacatcatccagctgtcaaaggggcgacttgtacttaagaccgcagagcagcagcaacagctggccggatacattctggccaatgctgatactatccagcatttttgtacccagcatggctcgcccgctacatggctccagccagccctcccaaccctcgctgagatcatcagactgcaagatccgtccgcaatcaaaattgaagtcgcaacttatgccacctgctatccggacttctccaaaggccatctgtccgccatacttgccataaagggaaatcttagtaatagcgaggttaagagaatccggagtatactcgatgtctcaatgggggctcaagaacctagcaggcctctgttcagtctgataaaggtcggttag

SEQ ID NO: 163580 - DNA, 1965 bp, Artificial Sequence
  derived and/or modified sequence
atgagtgaggcatccagtgaagacctcgttcccccactcgaggcaggagcagcaccctatcgagaggaggaggaggctgccaagaaaaagaaggagaaaaagaaaaagtctaaaggactagcgaatgtattttgtgtgtttacgaagggtaagaagaagaaaggccagcctagcagtgccgagcctgaagatgccgctggaagcaggcagggactggatggcccacccccaaccgtggaggagcttaaagccgctctggagcggggtcagcttgaggcagcgcgtcccttgcttgccctagaaagggaattagctgccgcagcagctgcagggggtgtgtctgaagaggaattagtgcggagacagtctaaggtggaggctctctatgaactgctacgcgaccaggttctaggcgtcctcagacgcccactggaagcccctcccgagcggctcaggcaggcgctcgctgttgtggccgagcaagagcgagaggacaggcaagctgctgccgcagggccagggacctctggtttagcggctacgagaccacggagatggctgcagctatggcgccgtggagtggccgaagccgctgaagagcggatgggccagcgccctgccgcaggcgctgaagtgcctgagtccgtttttttgcacctgggccgaacaatgaaagaagatctggaagctgttgttgaacggctgaagcccctctttccagcggagttcggagtagtagccgcatacgcagaatcctaccaccaacatttcgctgctcacctggccgcagtggctcagttcgaactgtgtgagcgggacacctatatgttgctcttgtgggtgcagaacctgtatcccaacgatatcattaactctcctaagttggttggggaactccagggaatgggacttggatccttattacccccacgccagatccgtctgctggaggccacttttttgagctctgaggctgctaatgtgagggaattgatggatagggcacttgagttggaggctcgacgctgggctgaggatgtgccccctcagcgcctagacgggcattgtcactcggagttagccattgatatcatccagataaccagtcaggcccaggccaaggcagaaagtatcacgttagatctaggttctcagattaaacgcgtcctgcttgtggaattaccagcatttctacgatcataccagagagcatttaacgaattcttagaacggggaaagcagctgacgaactacagggccaacgttatcgccaatattaacaactgtctctcttttagaatgagcatggagcaaaactggcaagtgccacaggatactctcagcctccttctcgggcctcttggcgagctgaaaagccacggctttgacacactactgcagaaccttcacgaggacctaaagccgttgttcaaacggtttacccatactagatgggccgctcctgttgaaacgctggaaaatatcatcgcaaccgtggacacccgccttcccgaattctctgaactgcaggggtgctttcgggaagagctgatggaggcgctccatttgcatctggtcaaagagtatataattcaattgtcgaagggacggctggtgttgaagacagccgaacagcagcagcagctggccggttatattctagctaatgccgatacgatccaacatttttgcacccagcatgggagccctgctacgtggctacaacctgctctgcccaccctagcagagatcatcaggctacaagacccgagtgctattaaaattgaagtcgccacgtatgccacatgttacccagactttagcaaaggccacctcagcgctatcttggccatcaaaggtaacctcagtaattctgaggtaaagagaatcagatctatcttagatgtttctatgggagcccaggaacccagccgacccctgttctctttgattaaggtcggttag

SEQ ID NO: 163581 - DNA, 4175 bp, Artificial Sequence
  derived and/or modified sequence
ccagggtgatgctgaagatgatgaccttcttccaaggcctctagagccatcagcctgtgccaggcaccctcgacttgcctagaggcccccaaaagttgcagtccacatcagaggcagagtcagaggcctccatgtcggaggcctcctctgaggacctggtgccacccctggaggctggggcagccccatatagggaggaggaagaggcggcgaagaagaagaaggagaagaagaagaagtccaaaggcctggccaatgtgttctgcgtcttcaccaaagggaagaagaagaagggtcagcccagctcagcggagcccgaggacgcagccgggtccaggcaggggctggatggcccgccccccacagtggaggagctgaaggcggcgctggagcgcgggcagctggaggcggcgcggccgctgctggcgctggagcgggagctggcggcggcggcggcggcgggcggtgtgagcgaggaggagctggtgcggcgccagagcaaggtggaggcgctgtacgagctgctgcgcgaccaggtgctgggcgtgctgcggcggccgctggaggcgccgcccgagcggctgcgccaggcgctggccgtggtggcggagcaggagcgcgaggaccgccaggcggcggcggcggggccggggacctcggggctggcggccacgcgcccgcggcgctggctgcagctgtggcggcgcggcgtggcggaggcggccgaggagcgcatgggccagcggccggccgcgggcgccgaggtccccgagagcgtctttctgcacttgggccgcaccatgaaggaggacctggaggccgtggtggagcggctgaagccgctgttccccgccgagttcggcgtcgtggcggcctacgccgagagctaccaccagcacttcgcggcccacctggccgccgtggcgcagttcgagctgtgcgagcgcgacacctacatgctgctgctctgggtgcagaacctctaccccaatgacatcatcaacagccccaagctggtgggtgagctgcagggtatggggctcgggagcctcctgccccccaggcagatccgactgctggaggccacattcctgtccagtgaggcggccaatgtgagggagttgatggaccgagctctggagctagaggcacggcgctgggctgaggatgtgcctccccagaggctggacggccactgccacagcgagctggccatcgacatcatccagatcacctcccaggcccaggccaaggccgagagcatcacgctggacttgggctcacagataaagcgggtgctgctggtggagctgcctgcgttcctgaggagctaccagcgcgcctttaatgaatttctggagagaggcaagcagctgacgaattacagggccaatgttattgccaacatcaacaactgcctgtccttccggatgtccatggagcagaattggcaggtaccccaggacaccctgagcctcctgctgggccccctgggtgagctcaagagccacggctttgacaccctgctccagaacctgcatgaggacctgaagccactgttcaagaggttcacgcacacccgctgggcggcccctgtggagaccctggaaaacatcatcgccactgtagacacgaggctgcctgagttctcagagctgcagggctgtttccgggaggagctcatggaggccttgcacctgcacctggtgaaggagtacatcatccaactcagcaaggggcgcctggtcctcaagacggccgagcagcagcagcagctggctgggtacatcctggccaatgctgacaccatccagcacttctgcacccagcacggctccccggcgacctggctgcagcctgctctccctacgctggccgagatcattcgcctgcaggaccccagtgccatcaagattgaggtggccacttatgccacctgctaccctgacttcagcaaaggccacctgagcgctatcctggccatcaaggggaacctatccaacagtgaggtcaagcgcatccggagcatcttggacgtcagcatgggggcgcaggagccctcccggcccctattttcccttataaaggttggttagcttttcctgtggcctgacctgcctgtgagtgcccagcaagccttgggcacaccccgctgggagctgttaagagcagcgctggttctcggttcctcccgggtctcctgtgctctgatgctacttctgcctagccctggcggaggtgcaggccctgtcagctggaactggacagaccttggtttgtttacatgtccgatgggggcaggagctcccatcctgggcagccaaccaggcaacaccaaggactctttgtaaacgatagctgatcgtgtgcacgcaaggaaagaaccaggagggagagtgcagccaggctcagggatccccggacacctctgtccagagcccctccacagtcggcctcatgactgtcctcctcgtgggtggggccgagggccctcttcagctctctggagacaggggccgagcctcacccatctgccctctgcagcccagggccgccgtgagcgggattcagcaatggtggaatggaagacagaactggaagagaaagaaggaaaagatgagctctcgtctggcaggggcttttagggtcctgtggcgagctgtgagcaccgccagcattagacgtcacatccaggtggccccacggcccctacaggctggccctgcaatggggccctgagccctccctcttcatcccccaaggcctcaactagagggtggtcccccgagggcttggtgtctactaccgaagggcccaagacctcctgggtcctctcaggctcccccttccccaaggcagggacaggccctgggggtgccaccgtgggccctgccacccagaagtctggctgaggtctgggcaggggcagggcaagcttgacctctcactgttgaccctttggcctctgtatttgtttcctattgccgtgacaggtttccacaaacttcgtggatcaaaacgaggtcttccagttctgcgggtcagaaggctgacccggggctcaaatctgggtgtcggcagtcctgcactccttctggaggctctaggggagaattcatttctggccttttcatttttagaggctgaccgtaattcttgacttcaggctcctccatcttcagagccagctgtgggtagttgaatctttttcccgtcacctcattgaggcctcccctctcctgcctccctccaccacttttttttttttttttttgagacagggtcttgctgtgttgcccaggctggagtgcagtggcctggtcatggcatcaaggctcactgcagcctggacctcctggttcaagtgatcctcttgtctcagtcccctgagacaatcccccacgcccagctacatattttttgtggatacagggtctcattctgttgcctaggcttgtctggaactcctgggctcaagggatcttgtagccttagcctcctaaagtgctgggattataggcatgagtcactgtacccggcctgctctaccgcttttaaggacgcttatgatcacattgcgcctacccagagaacccaggtcgtctttctattttcaggtcagctgattagccaccttagttccatctgcaactttagttcccactggctgtgtaacctaacatagtcacaggctctggggactgtcacgtggacatctttgggaggccgttattctgcccaccgcaccctccgttcatcccctgccctgccgggcacctcgctctaccccaggaaaatgtgagctcgttttcctgctcggcatgtgctccccctaaggctctgctcctccctgggcctgaaagttccttctcagcctgagagggggcccttcggactcaggcatgactcagcccggctgatgcctctgcagtgctgagtcaggatttggggccggctctcttgggtccgtccccttttcccaggtactgccttacaaagctgtggccaggaagtggccggtataaaggatgcccaaggtctttgtacgtgtgtaggagttagcgtgtttgatattgttaatataataataattattttttagagtactgcttttgtatgtatgttgaacaggatccaggtttttatagcttgatataaaacagaattcaaaagtg

SEQ ID NO: 163582 - DNA, 1334 bp, Artificial Sequence
  derived and/or modified sequence
gtgcgagcgcgacacctacatgctgctgctctgggtgcagaacctctaccccaagccaatgtgagggagttgatggaccgagctctggagctagaggcacggcgctgggctgaggatgtgcctccccagaggctggacggccactgccacagcgagctggccatcgacatcatccagatcacctcccaggcccaggccaaggccgagagcatcacgctggacttgggctcacagataaagcgggtgctgctggtggagctgcctgcgttcctgaggagctaccagcgcgcctttaatgaatttctggagagaggcaagcagctgacgaattacagggccaatgttattgccaacatcaacaactgcctgtccttccggatgtccatggagcagaattggcaggtaccccaggacaccctgagcctcctgctgggccccctgggtgagctcaagagccacggctttgacaccctgctccagaacctgcatgaggacctgaagccactgttcaagaggttcacgcacacccgctgggcggcccctgtggagaccctggaaaacatcatcgccactgtagacacgaggctgcctgagttctcagagctgcagggctgtttccgggaggagctcatggaggccttgcacctgcacctggtgaaggagtacatcatccaactcagcaaggggcgcctggtcctcaagacggccgagcagcagcagcagctggctgggtacatcctggccaatgctgacaccatccagcacttctgcacccagcacggctccccggcgacctggctgcagcctgctctccctacgctggccgagatcattcgcctgcaggaccccagtgccatcaagattgaggtggccacttatgccacctgctaccctgacttcagcaaaggccacctgagcgctatcctggccatcaaggggaacctatccaacagtgaggtcaagcgcatccggagcatcttggacgtcagcatgggggcgcaggagccctcccggcccctattttcccttataaaggttggttagcttttcctgtggcctgacctgcctgtgagtgcccagcaagccttgggcacaccccgctgggagctgttaagagcagcgctggttctcggttcctcccgggtctcctgtgctctgatgctacttctgcctagccctggcggaggtgcaggccctgtcagctggaactggacagaccttggtttgtttacatgtccgatgggggcaggagctcccatcctgggcagccaaccaggcaacaccaaggactctttgtaaacgatagctgatcgtgtgcacgcaaggaaagaacc

SEQ ID NO: 163583 - DNA, 4683 bp, Artificial Sequence
  derived and/or modified sequence
agtggcggccaggccgggacacggtaagtgacctccgcttccacacgtccattccccgccgctccgcgcggcttctcgcccgcccctaccccgaggccaggccggattccccgaggaaagagcctgtcgccgcggcggggacaggagggggctggacgcttccagggaaactgaggccctggcgcgcccagcgtccgcgcgtccgggcgcagaggggccaaggctggctgagggcccgggcctgccagaggcagggagggcggggctggggcaggcgcaggggtctcccctccattacagcagaaaggccccaggtccggcgtgactccccggccgggcgacacaggccgagtcacttcctcgcccgtgcccgggtgtcctcatcgggggatgggtgcgccttccacatcctgcccaggactgaaggagccgggcccagcgagctcccgggaggtgtgtggacatcagccctgacggggaaggcgagccaggagcctgcaggcctgaaccagggtgatgctgaagatgatgaccttcttccaaggcctctagagccatcagcctgtgccaggcaccctcgacttgcctagaggcccccaaaagttgcagtccacatcagaggcagagtcagaggcctccatgtcggaggcctcctctgaggacctggtgccacccctggaggctggggcagccccatatagggaggaggaagaggcggcgaagaagaagaaggagaagaagaagaagtccaaaggcctggccaatgtgttctgcgtcttcaccaaagggaagaagaagaagggtcagcccagctcagcggagcccgaggacgcagccgggtccaggcaggggctggatggcccgccccccacagtggaggagctgaaggcggcgctggagcgcgggcagctggaggcggcgcggccgctgctggcgctggagcgggagctggcggcggcggcggcggcgggcggtgtgagcgaggaggagctggtgcggcgccagagcaaggtggaggcgctgtacgagctgctgcgcgaccaggtgctgggcgtgctgcggcggccgctggaggcgccgcccgagcggctgcgccaggcgctggccgtggtggcggagcaggagcgcgaggaccgccaggcggcggcggcggggccggggacctcggggctggcggccacgcgcccgcggcgctggctgcagctgtggcggcgcggcgtggcggaggcggccgaggagcgcatgggccagcggccggccgcgggcgccgaggtccccgagagcgtctttctgcacttgggccgcaccatgaaggaggacctggaggccgtggtggagcggctgaagccgctgttccccgccgagttcggcgtcgtggcggcctacgccgagagctaccaccagcacttcgcggcccacctggccgccgtggcgcagttcgagctgtgcgagcgcgacacctacatgctgctgctctgggtgcagaacctctaccccaatgacatcatcaacagccccaagctggtgggtgagctgcagggtatggggctcgggagcctcctgccccccaggcagatccgactgctggaggccacattcctgtccagtgaggcggccaatgtgagggagttgatggaccgagctctggagctagaggcacggcgctgggctgaggatgtgcctccccagaggctggacggccactgccacagcgagctggccatcgacatcatccagatcacctcccaggcccaggccaaggccgagagcatcacgctggacttgggctcacagataaagcgggtgctgctggtggagctgcctgcgttcctgaggagctaccagcgcgcctttaatgaatttctggagagaggcaagcagctgacgaattacagggccaatgttattgccaacatcaacaactgcctgtccttccggatgtccatggagcagaattggcaggtaccccaggacaccctgagcctcctgctgggccccctgggtgagctcaagagccacggctttgacaccctgctccagaacctgcatgaggacctgaagccactgttcaagaggttcacgcacacccgctgggcggcccctgtggagaccctggaaaacatcatcgccactgtagacacgaggctgcctgagttctcagagctgcagggctgtttccgggaggagctcatggaggccttgcacctgcacctggtgaaggagtacatcatccaactcagcaaggggcgcctggtcctcaagacggccgagcagcagcagcagctggctgggtacatcctggccaatgctgacaccatccagcacttctgcacccagcacggctccccggcgacctggctgcagcctgctctccctacgctggccgagatcattcgcctgcaggaccccagtgccatcaagattgaggtggccacttatgccacctgctaccctgacttcagcaaaggccacctgagcgctatcctggccatcaaggggaacctatccaacagtgaggtcaagcgcatccggagcatcttggacgtcagcatgggggcgcaggagccctcccggcccctattttcccttataaaggttggttagcttttcctgtggcctgacctgcctgtgagtgcccagcaagccttgggcacaccccgctgggagctgttaagagcagcgctggttctcggttcctcccgggtctcctgtgctctgatgctacttctgcctagccctggcggaggtgcaggccctgtcagctggaactggacagaccttggtttgtttacatgtccgatgggggcaggagctcccatcctgggcagccaaccaggcaacaccaaggactctttgtaaacgatagctgatcgtgtgcacgcaaggaaagaaccaggagggagagtgcagccaggctcagggatccccggacacctctgtccagagcccctccacagtcggcctcatgactgtcctcctcgtgggtggggccgagggccctcttcagctctctggagacaggggccgagcctcacccatctgccctctgcagcccagggccgccgtgagcgggattcagcaatggtggaatggaagacagaactggaagagaaagaaggaaaagatgagctctcgtctggcaggggcttttagggtcctgtggcgagctgtgagcaccgccagcattagacgtcacatccaggtggccccacggcccctacaggctggccctgcaatggggccctgagccctccctcttcatcccccaaggcctcaactagagggtggtcccccgagggcttggtgtctactaccgaagggcccaagacctcctgggtcctctcaggctcccccttccccaaggcagggacaggccctgggggtgccaccgtgggccctgccacccagaagtctggctgaggtctgggcaggggcagggcaagcttgacctctcactgttgaccctttggcctctgtatttgtttcctattgccgtgacaggtttccacaaacttcgtggatcaaaacgaggtcttccagttctgcgggtcagaaggctgacccggggctcaaatctgggtgtcggcagtcctgcactccttctggaggctctaggggagaattcatttctggccttttcatttttagaggctgaccgtaattcttgacttcaggctcctccatcttcagagccagctgtgggtagttgaatctttttcccgtcacctcattgaggcctcccctctcctgcctccctccaccacttttttttttttttttttgagacagggtcttgctgtgttgcccaggctggagtgcagtggcctggtcatggcatcaaggctcactgcagcctggacctcctggttcaagtgatcctcttgtctcagtcccctgagacaatcccccacgcccagctacatattttttgtggatacagggtctcattctgttgcctaggcttgtctggaactcctgggctcaagggatcttgtagccttagcctcctaaagtgctgggattataggcatgagtcactgtacccggcctgctctaccgcttttaaggacgcttatgatcacattgcgcctacccagagaacccaggtcgtctttctattttcaggtcagctgattagccaccttagttccatctgcaactttagttcccactggctgtgtaacctaacatagtcacaggctctggggactgtcacgtggacatctttgggaggccgttattctgcccaccgcaccctccgttcatcccctgccctgccgggcacctcgctctaccccaggaaaatgtgagctcgttttcctgctcggcatgtgctccccctaaggctctgctcctccctgggcctgaaagttccttctcagcctgagagggggcccttcggactcaggcatgactcagcccggctgatgcctctgcagtgctgagtcaggatttggggccggctctcttgggtccgtccccttttcccaggtactgccttacaaagctgtggccaggaagtggccggtataaaggatgcccaaggtctttgtacgtgtgtaggagttagcgtgtttgatattgttaatataataataattattttttagagtactgcttttgtatgtatgttgaacaggatccaggtttttatagcttgatataaaacagaattcaaaagtg

SEQ ID NO: 163584 - protein, 390 aa, Artificial Sequence
  derived and/or modified sequence
MAVSESQLKKMVSKYKYRDLTVRETVNVITLYKDLKPVLDSYVFNDGSSRELMNLTGTIPVPYRGNTYNIPICLWLLDTYPYNPPICFVKPTSSMTIKTGKHVDANGKIYLPYLHEWKHPQSDLLGLIQVMIVVFGDEPPVFSRPISASYPPYQATGPPNTSYMPGMPGGISPYPSGYPPNPSGYPGCPYPPGGPYPATTSSQYPSQPPVTTVGPSRDGTISEDTIRASLISAVSDKLRWRMKEEMDRAQAELNALKRTEEDLKKGHQKLEEMVTRLDQEVAEVDKNIELLKKKDEELSSALEKMENQSENNDIDEVIIPTAPLYKQILNLYAEENAIEDTIFYLGEALRRGVIDLDVFLKHVRLLSRKQFQLRALMQKARKTAGLSDLY

SEQ ID NO: 163585 - protein, 285 aa, Artificial Sequence
  derived and/or modified sequence
MAVSESQLKKMVSKPQSDLLGLIQVMIVVFGDEPPVFSRPISASYPPYQATGPPNTSYMPGMPGGISPYPSGYPPNPSGYPGCPYPPGGPYPATTSSQYPSQPPVTTVGPSRDGTISEDTIRASLISAVSDKLRWRMKEEMDRAQAELNALKRTEEDLKKGHQKLEEMVTRLDQEVAEVDKNIELLKKKDEELSSALEKMENQSENNDIDEVIIPTAPLYKQILNLYAEENAIEDTIFYLGEALRRGVIDLDVFLKHVRLLSRKQFQLRALMQKARKTAGLSDLY

SEQ ID NO: 163586 - DNA, 1173 bp, Artificial Sequence
  derived and/or modified sequence
atggccgtgagcgagagccagctgaagaagatggtgagcaagtacaagtacagagacctgaccgtgagagagaccgtgaacgtgatcaccctgtacaaggacctgaagcccgtgctggacagctacgtgttcaacgacggcagcagcagagagctgatgaacctgaccggcaccatccccgtgccctacagaggcaacacctacaacatccccatctgcctgtggctgctggacacctacccctacaacccccccatctgcttcgtgaagcccaccagcagcatgaccatcaagaccggcaagcacgtggacgccaacggcaagatctacctgccctacctgcacgagtggaagcacccccagagcgacctgctgggcctgatccaggtgatgatcgtggtgttcggcgacgagccccccgtgttcagcagacccatcagcgccagctaccccccctaccaggccaccggcccccccaacaccagctacatgcccggcatgcccggcggcatcagcccctaccccagcggctacccccccaaccccagcggctaccccggctgcccctacccccccggcggcccctaccccgccaccaccagcagccagtaccccagccagccccccgtgaccaccgtgggccccagcagagacggcaccatcagcgaggacaccatcagagccagcctgatcagcgccgtgagcgacaagctgagatggagaatgaaggaggagatggacagagcccaggccgagctgaacgccctgaagagaaccgaggaggacctgaagaagggccaccagaagctggaggagatggtgaccagactggaccaggaggtggccgaggtggacaagaacatcgagctgctgaagaagaaggacgaggagctgagcagcgccctggagaagatggagaaccagagcgagaacaacgacatcgacgaggtgatcatccccaccgcccccctgtacaagcagatcctgaacctgtacgccgaggagaacgccatcgaggacaccatcttctacctgggcgaggccctgagaagaggcgtgatcgacctggacgtgttcctgaagcacgtgagactgctgagcagaaagcagttccagctgagagccctgatgcagaaggccagaaagaccgccggcctgagcgacctgtactag

SEQ ID NO: 163587 - DNA, 1173 bp, Artificial Sequence
  derived and/or modified sequence
atggctgtgtctgagtcacaattaaaaaaaatggtttctaaatacaagtaccgagatctgacagtaagagagacagtgaacgttattaccctctacaaggatttgaaaccggtccttgattcttatgtatttaacgacggatcatcacgcgagctgatgaatctgaccgggaccattcccgtgccttacagaggaaacacttacaacatccccatctgcttgtggttactggacacctatccttacaacccccctatctgcttcgtcaaacctacgtcatccatgacgatcaaaaccggcaaacacgtcgacgctaacgggaaaatctatctgccatatctccatgagtggaaacacccccagtcagacttgctgggcctgatccaggtgatgattgtggtcttcggtgatgagccacccgttttttctcggcccataagcgctagttatcctccctatcaggcgaccggacctcctaataccagttacatgccaggcatgcctggaggtatcagtccctatcctagtgggtatccccccaatccctcaggatatccaggctgcccatatcccccaggcggcccatatcccgctactacgtcgagccagtatccatctcaaccccccgtgacaacagtgggtccttcacgcgacggaaccatctccgaagacacaatacgtgcctctctgatttccgctgtgagtgacaaattgagatggcggatgaaagaggagatggatcgagcccaggctgagctgaacgcgctcaaaagaaccgaggaagacctcaagaaaggccaccagaaactggaggagatggttacaagactcgaccaggaggtggcggaggtggataagaatatcgagttgcttaaaaaaaaggatgaggaactgagctctgcattggagaaaatggagaatcagtccgagaataatgatatagatgaggtgataatacccaccgcccctctttataaacagattctcaatctgtacgccgaagagaatgcaattgaagacaccatattttacctaggggaagcactccgcagaggagtcatcgatctagatgtgtttctgaaacacgttcgcctgctgtctcgcaaacagttccagcttcgggctctcatgcagaaggccagaaagactgccggcctgtccgatctgtattag

SEQ ID NO: 163588 - DNA, 1173 bp, Artificial Sequence
  derived and/or modified sequence
atggctgtgtctgagagccagctgaagaagatggtgtccaagtacaagtacagagacctgactgtgcgggagaccgtgaatgtcatcaccctgtacaaggacctgaagcctgtgctggacagctatgtgttcaatgatggcagcagccgggagctgatgaacctgaccggcaccatccctgtgccctaccggggcaacacctacaacatccccatctgcctgtggctgctggacacctacccctacaacccccccatctgctttgtgaagcccaccagctccatgaccatcaagacaggcaagcacgtggatgccaacgggaagatctacctgccctacctgcacgagtggaagcacccccagagcgacctgctgggcctcatccaggtgatgattgtggtgtttggagatgagccccctgtgttcagccggcccatcagcgccagctacccaccctaccaggccaccggcccccccaacaccagctacatgcctggcatgcctgggggcatcagcccctaccccagcggctacccacccaaccccagcggctacccaggctgcccctacccacctgggggcccctacccagccaccaccagcagccagtaccccagccagccccctgtgaccaccgtgggccccagcagagatggcaccatcagcgaggacaccatccgggccagcctcatctctgctgtgtctgacaagctgcgctggaggatgaaggaggagatggaccgggcccaggccgagctgaatgccctgaagaggacagaggaggacctgaagaagggccaccagaagctggaggagatggtgacccggctggaccaggaggtggccgaggtggacaagaacatcgagctgctgaagaagaaggatgaggagctgagcagcgccctggagaagatggagaaccagagcgagaacaatgacattgatgaagtcatcatccccacagcccccctgtacaagcagatcctgaacctgtatgcagaagaaaatgccatcgaggacaccatcttctacctgggggaggccctgcggcggggcgtcatcgacctggatgtgttcctgaagcacgtgcggctgctgagcaggaagcagttccagctgcgggccctgatgcagaaggccaggaagacagctggcctgagtgacctgtactag

SEQ ID NO: 163589 - DNA, 1173 bp, Artificial Sequence
  derived and/or modified sequence
atggccgtgagcgagagccagctgaagaagatggtgagcaagtacaagtaccgggacttgacagtacgggagactgttaacgtgatcacattgtataaagatttgaaaccggtgcttgatagttacgtgttcaacgatggttcgagtagagagctaatgaaccttactggcactatccctgtaccttatcgcggcaatacctacaatattcccatctgtctctggctgctcgatacctatccatataatcctcccatttgcttcgtgaaacctaccagctcaatgaccattaagacaggcaagcatgttgacgccaatggaaagatatatctaccttacctgcatgagtggaagcaccctcagtccgatctgctggggttgatccaggtgatgattgtggtgtttggcgacgagcctcctgtgtttagcaggccgatatctgcttcatatccaccttatcaggcgactggacctcctaacacctcttatatgcccggcatgcctggaggtatcagcccctatccatcaggataccctccaaacccaagcggatacccaggttgtccctatcctcctggtggcccttaccctgccaccacgtccagccagtatccctcacagccacccgtcactacagtgggaccaagccgggacggaacgatttcagaagacacaatccgcgcttctctcatcagcgccgtgtccgacaagctgcggtggagaatgaaagaggaaatggaccgcgcccaagctgagctgaatgcgctgaaacgcacagaagaggacctcaagaaaggacatcagaagcttgaagagatggtgactcgacttgatcaggaggtggccgaagtcgacaagaatatcgagcttcttaaaaaaaaagatgaagagttgtcatccgctctggaaaagatggagaatcagagcgagaacaacgacattgacgaggttattatccccaccgcacccttgtataagcagatattgaacctttacgcagaagaaaatgccatcgaggatactatcttttacctgggcgaggcacttcgccggggcgtcatagaccttgatgtgttcttaaagcacgtgcggctgctatcgagaaagcaattccagctacgcgctttaatgcagaaggccaggaaaactgccggattgtctgacctgtactag

SEQ ID NO: 163590 - DNA, 1173 bp, Artificial Sequence
  derived and/or modified sequence
atggccgtgtccgaatctcagctgaagaagatggtgtccaaatataaatacagagaccttactgtgagagagacagtgaacgtgataacgctctacaaagacctgaagcccgtcctggatagttacgtgttcaatgacggatctagtagagaactaatgaaccttaccggtaccatacccgtgccatatcggggaaacacttacaatattcccatctgcttatggctactggatacatacccatataaccccccaatctgttttgtcaagcctacctctagcatgacaatcaagactggtaagcatgtggacgctaacggtaagatatacttaccttacctacacgagtggaaacacccgcagtcggacctacttggccttatacaggtcatgatcgtggtgtttggagatgagcctcctgtgttttctcgaccaatctcggctagctatcccccatatcaagctacggggccacccaacacctcctacatgccgggaatgccaggtggcattagcccatatccatctgggtaccctcccaatccttctggctacccgggatgtccatacccgcctggcggaccatacccagcaacaactagctcccaatatccgtcacaaccacccgtgacaaccgttggaccttcacgcgatggaacgatctcggaggacacgattcgcgcaagcctgatctccgccgtgtccgataagttaagatggcggatgaaagaggagatggaccgggcacaggctgaattgaatgcgcttaaaagaacggaggaggatctcaagaaagggcatcagaagctggaagagatggtaacacgcttagatcaggaggttgccgaagtagataagaatattgaactgttgaagaaaaaggacgaagagcttagctccgcccttgaaaaaatggagaatcagtctgaaaataacgacattgacgaagtcatcattccgactgcccctttatacaagcaaattctcaacctgtacgctgaggaaaatgcaatcgaagatactatcttttacctgggagaggccctgcggcgaggcgtcatcgacctcgatgtgttcctgaagcatgtgaggcttctctctcgtaagcagttccaattgcgagcattaatgcaaaaggccaggaaaacagccggacttagcgacctatactag

SEQ ID NO: 163591 - DNA, 1824 bp, Artificial Sequence
  derived and/or modified sequence
aatcagtcattaaggctcactggcaagcccttcgtacttcttccctctccggcactagcttccttaagtcgactctgtgaaatacctgctaatcttatcctgaaccagagtttcgaccctcggaacagtcttgcccacatctttgggacccgattcgtcctgctgattccggcactcgaggggcgggttggttggaacccaccccaccaggcccctctcaatcccacacggtgtccacccttgcccgcaggacggcggcccggaagtgacgtagtggaagcggaagtggtgtagtggtgccgacttcctgttgtttgaggccgggttgggggtgtgcgattgtgtgggacggtctggggcagcccagcagcggctgaccctctgcctgcggggaagggagtcgccaggcggccgtcatggcggtgtcggagagccagctcaagaaaatggtgtccaagtacaaatacagagacctaactgtacgtgaaactgtcaatgttattactctatacaaagatctcaaacctgttttggattcatatgtttttaacgatggcagttccagggaactaatgaacctcactggaacaatccctgtgccttatagaggtaatacatacaatattccaatatgcctatggctactggacacatacccatataatccccctatctgttttgttaagcctactagttcaatgactattaaaacaggaaagcatgttgatgcaaatgggaagatatatcttccttatctacatgaatggaaacacccacagtcagacttgttggggcttattcaggtcatgattgtggtatttggagatgaacctccagtcttctctcgtcctatttcggcatcctatccgccataccaggcaacggggccaccaaatacttcctacatgccaggcatgccaggtggaatctctccatacccatccggataccctcccaatcccagtggttacccaggctgtccttacccacctggtggtccatatcctgccacaacaagttctcagtacccttctcagcctcctgtgaccactgttggtcccagtagggatggcacaatcagcgaggacaccatccgagcctctctcatctctgcggtcagtgacaaactgagatggcggatgaaggaggaaatggatcgtgcccaggcagagctcaatgccttgaaacgaacagaagaagacctgaaaaagggtcaccagaaactggaagagatggttacccgtttagatcaagaagtagccgaggttgataaaaacatagaacttttgaaaaagaaggatgaagaactcagttctgctctggaaaaaatggaaaatcagtctgaaaacaatgatatcgatgaagttatcattcccacagctcccttatacaaacagatcctgaatctgtatgcagaagaaaacgctattgaagacactatcttttacttgggagaagccttgagaaggggcgtgatagacctggatgtcttcctgaagcatgtacgtcttctgtcccgtaaacagttccagctgagggcactaatgcaaaaagcaagaaagactgccggtctcagtgacctctactgacttctctgataccagctggaggttgagctcttcttaaagtattcttctcttccttttatcagtaggtgcccagaataagttattgcagtttatcattcaagtgtaaaatattttgaatcaataatatattttctgttttcttttggtaaagactggcttttattaatgcactttctatcctctgtaaactttttgtgctgaatgttgggactgctaaataaaatttgttgcataa

SEQ ID NO: 163592 - protein, 890 aa, Artificial Sequence
  derived and/or modified sequence
MALRRSMGRPGLPPLPLPPPPRLGLLLAALASLLLPESAAAGLKLMGAPVKLTVSQGQPVKLNCSVEGMEEPDIQWVKDGAVVQNLDQLYIPVSEQHWIGFLSLKSVERSDAGRYWCQVEDGGETEISQPVWLTVEGVPFFTVEPKDLAVPPNAPFQLSCEAVGPPEPVTIVWWRGTTKIGGPAPSPSVLNVTGVTQSTMFSCEAHNLKGLASSRTATVHLQALPAAPFNITVTKLSSSNASVAWMPGADGRALLQSCTVQVTQAPGGWEVLAVVVPVPPFTCLLRDLVPATNYSLRVRCANALGPSPYADWVPFQTKGLAPASAPQNLHAIRTDSGLILEWEEVIPEAPLEGPLGPYKLSWVQDNGTQDELTVEGTRANLTGWDPQKDLIVRVCVSNAVGCGPWSQPLVVSSHDRAGQQGPPHSRTSWVPVVLGVLTALVTAAALALILLRKRRKETRFGQAFDSVMARGEPAVHFRAARSFNRERPERIEATLDSLGISDELKEKLEDVLIPEQQFTLGRMLGKGEFGSVREAQLKQEDGSFVKVAVKMLKADIIASSDIEEFLREAACMKEFDHPHVAKLVGVSLRSRAKGRLPIPMVILPFMKHGDLHAFLLASRIGENPFNLPLQTLIRFMVDIACGMEYLSSRNFIHRDLAARNCMLAEDMTVCVADFGLSRKIYSGDYYRQGCASKLPVKWLALESLADNLYTVQSDVWAFGVTMWEIMTRGQTPYAGIENAEIYNYLIGGNRLKQPPECMEDVYDLMYQCWSADPKQRPSFTCLRMELENILGQLSVLSASQDPLYINIERAEEPTAGGSLELPGRDQPYSGAGDGSGMGAVGGTPSDCRYILTPGGLAEQPGQAEHQPESPLNETQRLLLLQQGLLPHSSC

SEQ ID NO: 163593 - protein, 111 aa, Artificial Sequence
  derived and/or modified sequence
MAGKQAVSASGKWLDGIRKWYYNAAGFNKLGLMRDDTIYEDEDVKEAIRRLPENLYNDRMFRIKRALDLNLKHQILPKEQWTKYEEENFYLEPYLKEVIRERKEREEWAKK

SEQ ID NO: 163594 - DNA, 336 bp, Artificial Sequence
  derived and/or modified sequence
atggccggcaagcaggccgtgagcgccagcggcaagtggctggacggcatcagaaagtggtactacaacgccgccggcttcaacaagctgggcctgatgagagacgacaccatctacgaggacgaggacgtgaaggaggccatcagaagactgcccgagaacctgtacaacgacagaatgttcagaatcaagagagccctggacctgaacctgaagcaccagatcctgcccaaggagcagtggaccaagtacgaggaggagaacttctacctggagccctacctgaaggaggtgatcagagagagaaaggagagagaggagtgggccaagaagtag

SEQ ID NO: 163595 - DNA, 336 bp, Artificial Sequence
  derived and/or modified sequence
atggcgggcaagcaagccgtctcagccagcggaaaatggcttgatggcatacgcaagtggtactacaatgctgctgggttcaacaaactgggtctgatgcgcgacgacacaatctacgaagatgaggatgtcaaggaggcaatcagaagactgccagaaaacctgtacaatgatcgaatgttccggataaaaagggctctggacctgaacttgaaacatcaaatcctgcccaaggaacagtggacaaaatatgaagaagaaaacttctatctggagccttacttaaaagaggtgattcgggagcgtaaagagcgggaagagtgggccaagaaatag

SEQ ID NO: 163596 - DNA, 336 bp, Artificial Sequence
  derived and/or modified sequence
atggccggcaagcaggccgtgtctgccagcggcaagtggctggatggcatcaggaagtggtactacaatgctgctggcttcaacaagctgggcctgatgagagatgacaccatctatgaagatgaagatgtgaaggaggccatccggcggctgcctgaaaatctctacaatgacaggatgttccgcatcaagagggccctggacctgaacctgaagcaccagatcctgcccaaggagcagtggaccaagtatgaggaggagaacttctacctggagccctacctgaaggaggtgatccgggagaggaaggagcgggaggagtgggccaagaagtag

SEQ ID NO: 163597 - DNA, 336 bp, Artificial Sequence
  derived and/or modified sequence
atggccggcaagcaggccgtgagcgccagcggcaagtggctggacgggataaggaaatggtattacaacgctgctggctttaataagctcggacttatgcgtgatgacacgatctatgaggatgaagacgttaaagaggccattcgcagactgccagagaatctttacaacgataggatgtttaggatcaaacgcgccctcgacctgaacctgaagcaccagatccttcccaaggaacaatggaccaagtacgaagaagaaaatttttacctggaaccttatctgaaagaggtcataagggagagaaaagagagagaggagtgggcaaaaaagtag

SEQ ID NO: 163598 - DNA, 336 bp, Artificial Sequence
  derived and/or modified sequence
atggctggaaaacaggccgtatctgctagcggtaagtggctggatggcatccggaagtggtattacaatgcagctggtttcaacaaactggggctcatgagagacgacaccatatacgaggatgaagatgtgaaagaggctatccggcgattgccggagaacctctacaatgataggatgttcaggattaaaagagcactggatctgaatctgaagcaccagatcctgccgaaggagcaatggaccaagtacgaggaagagaacttttatttagagccttatctcaaggaggtcatcagagagagaaaagaaagagaggaatgggccaagaaatag

SEQ ID NO: 163599 - DNA, 5575 bp, Artificial Sequence
  derived and/or modified sequence
agcggcctttctctgttcgcgatgtgacgtaacgcgcctgcggactgggcccagcttgtcctctatgacttacccagaaggcaacgcttctctttctggtcaaaatggctggtaagcaggccgtttcagcatcaggcaagtggctggatggtattcgaaaatggtattacaatgctgcaggattcaataaactggggttaatgcgagatgatacaatatacgaggatgaagatgtaaaagaagccataagaagacttcctgagaacctttataatgacaggatgtttcgcattaagagggcactggacctgaacttgaagcatcagatcttgcctaaagagcagtggaccaaatatgaagaggaaaatttctaccttgaaccgtatctgaaagaggttattcgggaaagaaaagaaagagaagaatgggcaaagaagtaatcatgtagttgaagtctgtggatgcagctgttatgaagatggttaaacttgaaacaaacaattttaagaattatttggtctgaagatgttttactttaaataaatgtctattgtaatggctggagtttttgaattccaaaccttatactgaataactactgaatccctttactgttaaatttttttccaaactttcaagatatatttagttgtgtttaactgctacttggagctcagaagccactttatcagttttcctcactggttggatagcctatcagtttatggaaggatataacttccgtaagttacatccttatggaagctactgaataaaagaagggggtatgcaccccctagtttgccaagattgagaaatagcctcttcactggtatgcaaacagatttgattttgcatcctatcatttaaaaagaaattatgtctgcaccccaacataggcatacttaagtaatatacatactcctgtgctaacatgtatactagaaaacaaaaagatgttagaaaaataaaagtataaagacaaatcatactgtccccatatcccagtgacttttccactttggaaatgattgttatgaagtttaagggttggatactagtcagttaaaagttttaagattatagggtaatttttaaaaatataaattagaatcattggcaaggcatggtggctcatgcctgtaatcccagcactttgggaggccgaggcgggcgggtcacctgaagtcaggaatttgagaccagcctggccaacatggtgaaaccctgtctctactaaaaatacaaaaaattagctaggcgtgatggtaggcacctgtaatcccagctactcgggaggctgagggaggagaattgcttgaccccaggaggtggaggttgcagtgagcctagatcacaccactgcacttcagcctgagcgacattgactgtctcaaaaaaaaaattaggattattcaatgttgtcatcatttccactcctaaattctgaaatgctttctttggtagaggtgagagtgtggagccacagctagtagagaaggaacagtaggacctgcagcctccctggttttccaggacaagtcattgctgtgtgtggcaggaatgccttacctcaaataacaaaacagtgtgaaaaacgaatttgtgttacatttaaagtttgtaaagcaatgagaaatgtgtgtatcataaagagcatctttaaatttttgctaaaatattagcctcttaaattctctaggaaccccctcccccgcttttttttttcctttcgctggtcgttatttttctaaacctatcctgaaatcatgtcaattttcttttgtatggttgaagacaactagatcacttgataatggttttgctcaggtcacattgtgacaaggttttaatgtagtcctactttgcagaaggaggccaagaagatgggctgtctagaaccccctttaaaagcatttgtctattcagaaaattttcctgagtagatctctgcaaaggctcttttaatagtgatttcaagatcacgtttgcaggactctggtctattcgttcagacgtctactgtgcacaattacaaggagactacaactgaggcatctcaaagagcactgtcaaggtgtgtagggagccgggtgggtggagggaggctgggctctgaccctagaaaccatgcttatgaatgctgttaatgtttaaagcaagcctaagggcactgctgaaggacaggggaacaaatagaactgaccaagactgaggtataacaggaacccccaggctatccacctgctcaaggtaaagtgtggtattacataaggcaacctctgattttgtaagagttcttcctaaagccaaagtgtatgcctattctatgtttccagattacttcattcttctaaatgagaacaagtgtgcaaaagttctttgaacactagatcaatgttttgtgttcattataaattatggttatcgtcctgcttgttatgaagactaagaaagtagatctagtatttggctcacacaggtgaatgggtgagaatttgttaatccatcagtgaagtcctttcatttgaaagagagggcctttctattatcaaaagccgtcctgtgtggaaaatcaccatgagagtgcctgaaacacaggcactctgcattgtcctgtagaccaaatctacattgtcctgtagtctggtctacattgtcctgtagaccgaatggtagagtgattcagagctaattctgggttagactgcacaggtctgaatctatttgctcactgtgtagtgctttaggaatacaatttaacctctccgtgcttcagtttgtttgtccctaagatagagctaatgatagaaacctacttcacccagttgtgaaaattaactgactgcatgtcaagcactaacagtttctggcatatagtatgcataatgtaaattatgtgctgagaagcgagaaagaataacttgggaaaacgctgaatatcatcaatgtcgaatagctaaccagtagctaaggtccaaggtctcctctcttccttctatgtggcactcttgtttctggttcatctactccccttgggtgtcacctccttgagtgaagtacctgctggagatgagaagagtggaactggatctgcatgacagctttgattaggatggagctaagacttggctatctccctgttttgtgttttggatgggtgacattttaaaactgccaatattcaaatcctgctaatttgctttgtacagtttaaaatgtttgatatcttttgttgtttaaagtttgagattggttttgaatatacagttttcctacatcttgaagaaagttatgtttgtttactctgaagtggtctatgttctgtttgtttgttttactatactttgcaaaaaaacagatggctggcttatgttcactgttgtagtgcactacctagtatcacttggccttcctgttgtcaagatgtaggaagcagcgtaagggatgtcgggccttcagacccccaattgccagctgtggtcctagttccagattgcatggaaatatttgataacattcctgcactgagttatcatggtctgaatatttatgtgacgctctacgagtggtaccaaaatgttagtgatggagtttttactaatggcaccttttcctgtttttaaattctagaatcttaataaatccaaagtgtacattttggtagtgatttcatttagttatttactttaaggactcccttttcaagcattaactctgcactaattttgacttatgaaaagattcagcagtaagaataaaaactgggccaaagcccaaagtaataatccttcacaaataggatggagttttaaaaatatgggcatcctgtgtgtagctttgaaaataaccaaactacttggaattaaaaagttaggtgaacatgaagattgtcataaccaaatccttgacagcttgatggatgaagagcagatgggtttatggtgtatgggaggaagcatggattttaggagggacagtatcagagagggatggttagaaagtgagtaagacaggttgctctttggaaaacaaggaaaatccctttattagaacaaggcatgaaattctgccactaggtggcgatgccctataactttacaacttagtgtacatcacacgagcactatggaagatttctccattctgcgccccaccaactccctcccctccttcatttttcaggatgacaacaccttagaggtttatggccatcaggagaatttactactaagctatatactgatgtaatgaaatctaatatatgttgtgcaatgaattatgagatgttatttagtttcaggattttattacttcaatcagttatgaccatatttccttttatatgattgctcactctttaaacataccagatgactgtataaggaacacctaataaagtctatagatgttaaaatattttaaatgttttaatttatatgccataatttgtttacattctggttatactggcgttcatattaaaagccataacatgttagaatctgagatctcaggtcggatagtgcctctaagttatattttgctaagaaattttattgtattagcaattgagcaagaaagaagaactgaatcattatacggtggttaatttttagcatagatgtcagaaagcctgttaatattccagaggcttatgataaactatttaaattgtcattctggattctgattatatctcctacaaagaaagagtgtattatttattgaactttttgtttgaatacatgtgcctatttttgcataaatgtaaaaatgtaattttaaaataaacccctgaaaacttctggtaacattatccagttgaataattgttctgttagtattctaaatattttaagaaaattgtatacatatctgtgacaattgtattcacaagccaaaccaaaaaaagataattatttgttttacaaaggagtcagcttacaatttttctcttatgcatgcatttaaaatgtggtttgccattaaactggaaacactgatctgaggccaatgatttaggcaagtcattagtctaaagattggcttcctcagctagaaaatgaagggctttgactaaaaagtctttttcatttcagtaccaaaacattctgggtctgtgatttaacttacgctctttattgttgggatgaactaatactgatggaatactagctttgtactaggcactgttcgtatgttgtctcttttaatcctccctgcaaccttctggcatggctattataatgcccattgtatggaagaagaaattaggcttcgaaagtccattttatgcttgttcattacataattttctggattttttaaattgatgtatgtgtttatgttccaggctaggcagaagctaggaagaatatagcagcctcgtcactgttgaaatctggggctagataattctttgttgtgggggcctcctctgtgtgttacaggatatttagcagcatcctggcttctacacgataggtaccagtagcgcctcctgcctccaactgtaacaaccaaaaatgttttgagacattgtctggaaatgttcccctgggggagcagaatt

SEQ ID NO: 163600 - protein, 1264 aa, Artificial Sequence
  derived and/or modified sequence
MSTLYVSPHPDAFPSLRALIAARYGEAGEGPGWGGAHPRICLQPPPTSRTPFPPPRLPALEQGPGGLWVWGATAVAQLLWPAGLGGPGGSRAAVLVQQWVSYADTELIPAACGATLPALGLRSSAQDPQAVLGALGRALSPLEEWLRLHTYLAGEAPTLADLAAVTALLLPFRYVLDPPARRIWNNVTRWFVTCVRQPEFRAVLGEVVLYSGARPLSHQPGPEAPALPKTAAQLKKEAKKREKLEKFQQKQKIQQQQPPPGEKKPKPEKREKRDPGVITYDLPTPPGEKKDVSGPMPDSYSPRYVEAAWYPWWEQQGFFKPEYGRPNVSAANPRGVFMMCIPPPNVTGSLHLGHALTNAIQDSLTRWHRMRGETTLWNPGCDHAGIATQVVVEKKLWREQGLSRHQLGREAFLQEVWKWKEEKGDRIYHQLKKLGSSLDWDRACFTMDPKLSAAVTEAFVRLHEEGIIYRSTRLVNWSCTLNSAISDIEVDKKELTGRTLLSVPGYKEKVEFGVLVSFAYKVQGSDSDEEVVVATTRIETMLGDVAVAVHPKDTRYQHLKGKNVIHPFLSRSLPIVFDEFVDMDFGTGAVKITPAHDQNDYEVGQRHGLEAISIMDSRGALINVPPPFLGLPRFEARKAVLVALKERGLFRGIEDNPMVVPLCNRSKDVVEPLLRPQWYVRCGEMAQAASAAVTRGDLRILPEAHQRTWHAWMDNIREWCISRQLWWGHRIPAYFVTVSDPAVPPGEDPDGRYWVSGRNEAEAREKAAKEFGVSPDKISLQQDEDVLDTWFSSGLFPLSILGWPNQSEDLSVFYPGTLLETGHDILFFWVARMVMLGLKLTGRLPFREVYLHAIVRDAHGRKMSKSLGNVIDPLDVIYGISLQGLHNQLLNSNLDPSEVEKAKEGQKADFPAGIPECGTDALRFGLCAYMSQGRDINLDVNRILGYRHFCNKLWNATKFALRGLGKGFVPSPTSQPGGHESLVDRWIRSRLTEAVRLSNQGFQAYDFPAVTTAQYSFWLYELCDVYLECLKPVLNGVDQVAAECARQTLYTCLDVGLRLLSPFMPFVTEELFQRLPRRMPQAPPSLCVTPYPEPSECSWKDPEAEAALELALSITRAVRSLRADYNLTRIRPDCFLEVADEATGALASAVSGYVQALASAGVVAVLALGAPAPQGCAVALASDRCSIHLQLQGLVDPARELGKLQAKRVEAQRQAQRLRERRAASGYPVKVPLEVQEADEAKLQQTEAELRKVDEAIALFQKML

SEQ ID NO: 163601 - protein, 1264 aa, Artificial Sequence [sequence omitted]

SEQ ID NO: 163602 - protein, 366 aa, Artificial Sequence
  derived and/or modified sequence
MSTLYVSPHPDAFPSLRALIAARYGEAGEGPGWGGAHPRICLQPPPTSRTPFPPPRLPALEQGPGGLWVWGATAVAQLLWPAGLGGPGGSRAAVLVQQWVSYADTELIPAACGATLPALGLRSSAQDPQAVLGALGRALSPLEEWLRLHTYLAGEAPTLADLAAVTALLLPFRYVLDPPARRIWNNVTRWFVTCVRQPEFRAVLGEVVLYSGARPLSHQPGPEAPALPKTAAQLKKEAKKREKLEKFQQKQKIQQQQPPPGEKKPKPEKREKRDPGVITYDLPTPPGEKKDVSGPMPDSYSPRYVEAAWYPWWEQQGFFKPEYGRPNVSAANPRGVFMMCIPPPNVTGSLHLGHALTNAIQDSLTR

SEQ ID NO: 163603 - protein, 1183 aa, Artificial Sequence
  derived and/or modified sequence
  misc_feature (1)..(1): Xaa can be any naturally occurring amino acid
XGLGGPGGSRAAVLVQQWVSYADTELIPAACGATLPALGLRSSAQDPQAVLGALGRALSPLEEWLRLHTYLAGEAPTLADLAAVTALLLPFRYVLDPPARRIWNNVTRWFVTCVRQPEFRAVLGEVVLYSGARPLSHQPGPEAPALPKTAAQLKKEAKKREKLEKFQQKQKIQQQQPPPGEKKPKPEKREKRDPGVITYDLPTPPGEKKDVSGPMPDSYSPRYVEAAWYPWWEQQGFFKPEYGRPNVSAANPRGVFMMCIPPPNVTGSLHLGHALTNAIQDSLTRWHRMRGETTLWNPGCDHAGIATQVVVEKKLWREQGLSRHQLGREAFLQEVWKWKEEKGDRIYHQLKKLGSSLDWDRACFTMDPKLSAAVTEAFVRLHEEGIIYRSTRLVNWSCTLNSAISDIEVDKKELTGRTLLSVPGYKEKVEFGVLVSFAYKVQGSDSDEEVVVATTRIETMLGDVAVAVHPKDTRYQHLKGKNVIHPFLSRSLPIVFDEFVDMDFGTGAVKITPAHDQNDYEVGQRHGLEAISIMDSRGALINVPPPFLGLPRFEARKAVLVALKERGLFRGIEDNPMVVPLCNRSKDVVEPLLRPQWYVRCGEMAQAASAAVTRGDLRILPEAHQRTWHAWMDNIREWCISRQLWWGHRIPAYFVTVSDPAVPPGEDPDGRYWVSGRNEAEAREKAAKEFGVSPDKISLQQDEDVLDTWFSSGLFPLSILGWPNQSEDLSVFYPGTLLETGHDILFFWVARMVMLGLKLTGRLPFREVYLHAIVRDAHGRKMSKSLGNVIDPLDVIYGISLQGLHNQLLNSNLDPSEVEKAKEGQKADFPAGIPECGTDALRFGLCAYMSQGRDINLDVNRILGYRHFCNKLWNATKFALRGLGKGFVPSPTSQPGGHESLVDRWIRSRLTEAVRLSNQGFQAYDFPAVTTAQYSFWLYELCDVYLECLKPVLNGVDQVAAECARQTLYTCLDVGLRLLSPFMPFVTEELFQRLPRRMPQAPPSLCVTPYPEPSECSWKDPEAEAALELALSITRAVRSLRADYNLTRIRPDCFLEVADEATGALASAVSGYVQALASAGVVAVLALGAPAPQGCAVALASDRCSIHLQLQGLVDPARELGKLQAKRVEAQRQAQRLRERRAASGYPVKVPLEVQEADEAKLQQTEAELRKVDEAIALFQKML

SEQ ID NO: 163604 - DNA, 3795 bp, Artificial Sequence
  derived and/or modified sequence
atgagcaccctgtacgtgagcccccaccccgacgccttccccagcctgagagccctgatcgccgccagatacggcgaggccggcgagggccccggctggggcggcgcccaccccagaatctgcctgcagcccccccccaccagcagaacccccttccccccccccagactgcccgccctggagcagggccccggcggcctgtgggtgtggggcgccaccgccgtggcccagctgctgtggcccgccggcctgggcggccccggcggcagcagagccgccgtgctggtgcagcagtgggtgagctacgccgacaccgagctgatccccgccgcctgcggcgccaccctgcccgccctgggcctgagaagcagcgcccaggacccccaggccgtgctgggcgccctgggcagagccctgagccccctggaggagtggctgagactgcacacctacctggccggcgaggcccccaccctggccgacctggccgccgtgaccgccctgctgctgcccttcagatacgtgctggacccccccgccagaagaatctggaacaacgtgaccagatggttcgtgacctgcgtgagacagcccgagttcagagccgtgctgggcgaggtggtgctgtacagcggcgccagacccctgagccaccagcccggccccgaggcccccgccctgcccaagaccgccgcccagctgaagaaggaggccaagaagagagagaagctggagaagttccagcagaagcagaagatccagcagcagcagcccccccccggcgagaagaagcccaagcccgagaagagagagaagagagaccccggcgtgatcacctacgacctgcccaccccccccggcgagaagaaggacgtgagcggccccatgcccgacagctacagccccagatacgtggaggccgcctggtacccctggtgggagcagcagggcttcttcaagcccgagtacggcagacccaacgtgagcgccgccaaccccagaggcgtgttcatgatgtgcatccccccccccaacgtgaccggcagcctgcacctgggccacgccctgaccaacgccatccaggacagcctgaccagatggcacagaatgagaggcgagaccaccctgtggaaccccggctgcgaccacgccggcatcgccacccaggtggtggtggagaagaagctgtggagagagcagggcctgagcagacaccagctgggcagagaggccttcctgcaggaggtgtggaagtggaaggaggagaagggcgacagaatctaccaccagctgaagaagctgggcagcagcctggactgggacagagcctgcttcaccatggaccccaagctgagcgccgccgtgaccgaggccttcgtgagactgcacgaggagggcatcatctacagaagcaccagactggtgaactggagctgcaccctgaacagcgccatcagcgacatcgaggtggacaagaaggagctgaccggcagaaccctgctgagcgtgcccggctacaaggagaaggtggagttcggcgtgctggtgagcttcgcctacaaggtgcagggcagcgacagcgacgaggaggtggtggtggccaccaccagaatcgagaccatgctgggcgacgtggccgtggccgtgcaccccaaggacaccagataccagcacctgaagggcaagaacgtgatccaccccttcctgagcagaagcctgcccatcgtgttcgacgagttcgtggacatggacttcggcaccggcgccgtgaagatcacccccgcccacgaccagaacgactacgaggtgggccagagacacggcctggaggccatcagcatcatggacagcagaggcgccctgatcaacgtgcccccccccttcctgggcctgcccagattcgaggccagaaaggccgtgctggtggccctgaaggagagaggcctgttcagaggcatcgaggacaaccccatggtggtgcccctgtgcaacagaagcaaggacgtggtggagcccctgctgagaccccagtggtacgtgagatgcggcgagatggcccaggccgccagcgccgccgtgaccagaggcgacctgagaatcctgcccgaggcccaccagagaacctggcacgcctggatggacaacatcagagagtggtgcatcagcagacagctgtggtggggccacagaatccccgcctacttcgtgaccgtgagcgaccccgccgtgccccccggcgaggaccccgacggcagatactgggtgagcggcagaaacgaggccgaggccagagagaaggccgccaaggagttcggcgtgagccccgacaagatcagcctgcagcaggacgaggacgtgctggacacctggttcagcagcggcctgttccccctgagcatcctgggctggcccaaccagagcgaggacctgagcgtgttctaccccggcaccctgctggagaccggccacgacatcctgttcttctgggtggccagaatggtgatgctgggcctgaagctgaccggcagactgcccttcagagaggtgtacctgcacgccatcgtgagagacgcccacggcagaaagatgagcaagagcctgggcaacgtgatcgaccccctggacgtgatctacggcatcagcctgcagggcctgcacaaccagctgctgaacagcaacctggaccccagcgaggtggagaaggccaaggagggccagaaggccgacttccccgccggcatccccgagtgcggcaccgacgccctgagattcggcctgtgcgcctacatgagccagggcagagacatcaacctggacgtgaacagaatcctgggctacagacacttctgcaacaagctgtggaacgccaccaagttcgccctgagaggcctgggcaagggcttcgtgcccagccccaccagccagcccggcggccacgagagcctggtggacagatggatcagaagcagactgaccgaggccgtgagactgagcaaccagggcttccaggcctacgacttccccgccgtgaccaccgcccagtacagcttctggctgtacgagctgtgcgacgtgtacctggagtgcctgaagcccgtgctgaacggcgtggaccaggtggccgccgagtgcgccagacagaccctgtacacctgcctggacgtgggcctgagactgctgagccccttcatgcccttcgtgaccgaggagctgttccagagactgcccagaagaatgccccaggccccccccagcctgtgcgtgaccccctaccccgagcccagcgagtgcagctggaaggaccccgaggccgaggccgccctggagctggccctgagcatcaccagagccgtgagaagcctgagagccgactacaacctgaccagaatcagacccgactgcttcctggaggtggccgacgaggccaccggcgccctggccagcgccgtgagcggctacgtgcaggccctggccagcgccggcgtggtggccgtgctggccctgggcgcccccgccccccagggctgcgccgtggccctggccagcgacagatgcagcatccacctgcagctgcagggcctggtggaccccgccagagagctgggcaagctgcaggccaagagagtggaggcccagagacaggcccagagactgagagagagaagagccgccagcggctaccccgtgaaggtgcccctggaggtgcaggaggccgacgaggccaagctgcagcagaccgaggccgagctgagaaaggtggacgaggccatcgccctgttccagaagatgctgtag

SEQ ID NO: 163605 - DNA, 3795 bp, Artificial Sequence
  derived and/or modified sequence
atgagtacgctgtacgtgagcccccatcctgacgccttccctagtctccgagccctgatcgcggcgcggtacggggaagccggcgaaggacccggctggggcggcgctcacccacggatttgtctccagcctcctcctactagtaggacccccttcccaccgcccagattacccgcactggagcaaggaccaggtgggctctgggtctggggcgccaccgcagtggcccagctgctttggcccgctggactgggcggccctgggggttccagggccgccgtgttggtccagcagtgggtgtcatacgctgacactgagctgatccccgcagcttgtggtgccaccttaccagcgttgggtctgagatcgtccgcgcaagacccacaggcggttctgggagcccttggcagagccttaagtcccttggaggagtggctgcgcctgcatacatatctggccggcgaggctcctaccctggccgatctggcagcggttaccgcactgttgctcccatttcgctacgttctggacccacctgccagacgtatttggaataatgtcacaaggtggtttgtgacatgtgtgagacaacctgagtttcgtgcagtgctgggagaggtcgttctgtatagcggtgctcgacctctttctcaccaacccggccctgaagcccccgcactccccaaaacagctgctcagctgaaaaaagaggcgaagaagagagaaaagcttgaaaaattccaacagaagcagaagattcagcagcagcagcccccacccggcgagaagaagcccaagccagagaaacgcgagaaaagagaccccggcgtgatcacatacgatctgcctacaccgccgggtgagaaaaaagacgtgtccggcccaatgccggattcttactccccaaggtacgtggaagcggcctggtacccatggtgggagcaacaaggattttttaagcccgagtatggccgccctaacgtgagcgcagccaaccccagaggagtgttcatgatgtgcatcccgccccctaatgtgactgggagcttacatttggggcatgctctgaccaacgctatacaagacagcttgacgcggtggcaccggatgcggggagagactacgctgtggaatccgggatgcgaccacgctgggatcgcaacccaagtggtcgtcgagaagaagctgtggcgagagcaagggctcagccgacaccaactagggagagaagctttcctgcaagaagtatggaaatggaaagaagaaaagggggataggatttaccaccagctcaaaaagctcggctcttctctcgattgggaccgggcttgtttcaccatggaccccaagctgtccgcagccgttactgaggcttttgtccgtctacacgaagagggcataatttataggagcaccagactggtgaattggagttgcaccctgaatagcgcaatttccgatatcgaggtggacaagaaagagttaacggggcgtacccttctatcagtgccaggatacaaagaaaaggttgaatttggagtgctggtatcatttgcctataaggtgcaagggagcgattccgacgaggaggttgttgtggcaacaacacgaatcgaaactatgttgggtgacgttgctgtggcggtgcaccctaaagacacaaggtaccagcacctcaaaggtaagaatgttatccatcctttcttgtcgcgctcccttcccatcgtgtttgacgaattcgtcgatatggacttcggcaccggggccgtaaagattaccccagctcacgaccagaacgactatgaagttggccagcggcatggcctggaggccatcagtataatggactctaggggtgccctaatcaatgtgccacccccattcctgggcctccctagatttgaggcgcgcaaggctgtcttggtcgccttgaaggagaggggcttgttccgcggtattgaagacaaccctatggtggtgcctctttgcaatcgatcaaaggacgtggtggaaccactgttgcgaccccagtggtatgtccggtgcggggagatggcacaagccgccagcgccgctgttacaagaggtgaccttcgcatcctgccagaagcccatcaacgtacctggcatgcttggatggataacattcgggagtggtgcatatccagacaactgtggtgggggcataggatcccagcctactttgtaacagtgtcagacccagcggtacccccaggtgaagatcctgacggaaggtattgggtcagcggccggaatgaagctgaggcccgggaaaaggccgccaaggagtttggagtctcacctgataaaatttctctccagcaggacgaagatgtcctagacacctggttttcatctgggctgttcccgctgtccatattgggatggcccaaccagagtgaagatctcagcgtgttctacccagggaccttgttggagactgggcacgatatattattcttttgggttgcccggatggtgatgctgggactgaagctgaccgggcggttgccatttagggaagtatacttgcacgctatcgtacgagacgcccatggacgaaagatgagcaaaagcctgggtaatgtgatcgaccctcttgatgtgatatacgggatcagtcttcaaggactccataaccaacttctcaattcaaatctggaccccagtgaggtggagaaggctaaggagggccagaaggccgacttcccagccggaatccctgagtgcgggactgatgccctgcggtttgggctgtgtgcgtatatgagccagggcagagacatcaacttggacgtgaacaggattttgggttatcgacacttttgcaataagttatggaatgcaacaaagtttgccctgagagggctcggtaaagggttcgtgccctcgcccacttcccagccgggaggccacgagtccctagtcgatcgttggattagatccagactcacagaagccgtgagactgagtaaccaggggttccaggcctatgactttcccgccgtaaccacagcacagtattccttctggctgtacgagctgtgtgatgtgtacctagagtgcctcaaaccagtgttaaacggcgtggatcaagtagcggctgagtgcgccagacagacattatatacatgcctcgatgtgggcctgaggctgctctctcccttcatgccctttgtgacagaggagctctttcagcggttgccaaggaggatgccccaagccccacccagcctctgtgtgacaccttatcctgagccatccgaatgctcatggaaggacccagaagcagaggcagccttggagttggctctttccatcactagagccgtgaggtcgcttcgcgcagactataacttgaccaggatccgaccagactgcttcctcgaggtggcggatgaggccacgggggcacttgctagcgctgtgagcgggtatgttcaggcattagcaagtgctggcgttgtcgctgttctagccctcggcgctccagccccccagggctgcgccgtggccttagccagcgaccggtgctctattcacctccagctgcagggacttgtggatcctgctagggagcttgggaagttgcaagcaaaacgcgtggaggcgcaacggcaggcacaacgcctgcgggaaagacgcgcggccagcggttatcctgtgaaagttcccttggaggtgcaggaagccgacgaagcaaagcttcaacagactgaggcagaactcagaaaggttgacgaggctatcgctttgttccagaaaatgctgtag

SEQ ID NO: 163606 - DNA, 3795 bp, Artificial Sequence
  derived and/or modified sequence
atgagcaccctgtatgtgagcccccacccagatgccttccccagcctgcgggccctgattgctgcccgctacggggaggccggggagggccctggctggggcggggcccacccccgcatctgcctgcagcccccacccaccagcaggacccccttccccccaccccggctgcctgccctggagcagggccctgggggcctgtgggtgtggggcgccacagctgtggcccagctgctgtggccagctggcctgggcggccctgggggcagcagagctgctgtgctggtgcagcagtgggtgtcctatgctgacacagagctgatcccagctgcctgtggggccaccctgcctgccctgggcctgcggagcagcgcccaggacccccaggccgtgctgggcgccctgggccgggccctgagccccctggaggagtggctgcggctgcacacctacctggccggggaggcccccaccctggccgacctggccgctgtgacagccctgctgctgcccttccgctacgtgctggaccccccagcccggcgcatctggaacaacgtgacccgctggtttgtgacctgtgtgcggcagcctgagttccgggctgtgctgggggaggtggtgctgtacagcggggcccggcccctgagccaccagcccggccctgaggccccagccctgcccaagacagctgcccagctgaagaaggaggccaagaagcgggagaagctggagaagttccagcagaagcagaagatccagcagcagcagcccccacctggagagaagaagcccaagccagagaagcgggagaagagggaccccggggtcatcacctatgacctgcccaccccacctggagagaagaaggatgtgtctggccccatgccagacagctacagcccccgctacgtggaggccgcctggtacccctggtgggagcagcagggcttcttcaagccagaatatggccggcccaacgtgtctgctgccaacccccggggcgtcttcatgatgtgcatccccccaccaaatgtgacaggcagcctgcacctgggccacgccctgaccaatgccatccaggacagcctgacccgctggcacaggatgagaggagagaccaccctgtggaaccctggctgtgaccacgccggcatcgccacccaggtggtggtggagaagaagctgtggagggagcagggcctgagccgccaccagctgggccgggaggccttcctgcaggaggtgtggaagtggaaggaggagaagggggaccgcatctaccaccagctgaagaagctgggcagcagcctggactgggaccgggcctgcttcaccatggaccccaagctgtctgctgctgtgacagaggcctttgtgcggctgcacgaggagggcatcatctaccgcagcacccggctggtgaactggagctgcaccctgaacagcgccatcagtgacatcgaggtggacaagaaggagctgaccggccgcaccctgctgtctgtgcccggctacaaggagaaggtggagtttggagtgctggtgtcctttgcctacaaggtgcagggcagtgacagtgatgaggaggtggtggtggccaccacccgcatcgagaccatgctgggagatgtggccgtggccgtgcaccccaaggacacccgctaccagcacctgaagggcaagaatgtcatccaccccttcctgagccgcagcctgcccatcgtgtttgatgaatttgtggacatggactttggaactggagctgtgaagatcaccccagcccatgaccagaatgactatgaggtgggccagagacatggcctggaggccatcagcatcatggacagcagaggagccctgatcaacgtgcccccacccttcctgggcctgcccaggtttgaggccaggaaggctgtgctggtggccctgaaggagcggggcctcttccggggcatcgaggacaaccccatggtggtgcccctgtgcaacagaagcaaggatgtggtggagcccctgctgcggccccagtggtacgtgcgctgtggggagatggcccaggccgccagcgctgctgtgaccaggggggacctgcgcatcctgcctgaggcccaccagaggacctggcacgcctggatggacaacatccgggagtggtgcatcagccggcagctgtggtggggccaccgcatcccagcctactttgtgacagtgtctgaccctgctgtgcccccaggagaagatcctgatggccgctactgggtgtctggaagaaatgaagctgaggcccgggagaaggccgccaaggagtttggagtgtccccagacaagatcagcctgcagcaggatgaagatgtgctggacacctggttcagcagcggcctcttccccctgagcatcctgggctggcccaaccagagcgaggacctgtctgtgttctacccaggcaccctgctggagactggacatgacatcctcttcttctgggtggccaggatggtgatgctgggcctgaagctgaccggccgcctgcccttccgggaggtgtacctgcacgccatcgtgagagatgcccacggcaggaagatgagcaagagcctgggcaatgtgattgaccccctggatgtgatctacggcatcagcctgcagggcctgcacaaccagctgctgaacagcaacctggaccccagcgaggtggagaaggccaaggagggccagaaggctgacttccctgctggcatcccagaatgtggcacagatgccctgcgcttcggcctgtgtgcctacatgagccagggccgggacatcaacctggatgtgaaccgcatcctgggctaccgccacttctgcaacaagctgtggaatgccaccaagtttgccctgcggggcctgggcaagggctttgtgcccagccccaccagccagcccggcggccacgagagcctggtggaccgctggatccgcagccggctgacagaggccgtgcggctgagcaaccagggcttccaggcctatgacttccctgctgtgaccacagcccagtacagcttctggctgtatgagctgtgtgatgtgtacctggagtgcctgaagcctgtgctgaatggagtggaccaggtggccgcagaatgtgcccggcagaccctgtacacctgcctggatgtgggcctgcggctgctgagccccttcatgccctttgtgacagaggagctgttccagaggctgcccaggaggatgccccaggccccacccagcctgtgtgtgaccccctacccagagcccagcgagtgctcctggaaggaccctgaggccgaggccgccctggagctggccctgagcatcaccagggctgtgcgcagcctgcgggctgactacaacctgacccgcatccggccagactgcttcctggaggtggctgatgaggccactggagccctggccagcgctgtgtctggctacgtgcaggccctggccagcgctggggtggtggccgtgctggccctgggcgccccagccccccagggctgtgctgtggccctggccagtgaccgctgcagcatccacctgcagctgcagggcctggtggaccctgcccgggagctgggcaagctgcaggccaagagggtggaggcccagaggcaggcccagaggctgcgggagaggagagctgccagcggctaccctgtgaaggtgcccctggaggtgcaggaggctgatgaggccaagctgcagcagacagaggccgagctgaggaaggtggatgaggccatcgccctcttccagaagatgctgtag

SEQ ID NO: 163607 - DNA, 3795 bp, Artificial Sequence
  derived and/or modified sequence
atgagcaccctgtacgtgagcccccaccccgacgccttccccagcttgagggccttaatcgccgctcgctacggagaggcaggagaaggtccaggctggggaggcgcccacccaaggatttgcctccagcccccccccacctcccggactccattcccccctccccgtctgcccgccttagagcagggaccagggggtctctgggtctggggagccactgccgtcgctcaactactctggccagcagggctgggcggccctggtggctcacgagccgctgtcctagtccagcaatgggtttcctatgcagatacagagctcatccccgccgcttgtggcgcgacattgcccgctcttggccttcggtcctcggcacaagatccccaagcagtgttgggtgctctcggcagggctctgtccccactggaagaatggttgagattgcatacatatttagctggcgaggcccccaccctggctgatctcgccgctgttactgccctcctgttaccttttagatacgtactggacccccccgcgaggaggatttggaataacgtgactcgctggtttgtcacatgcgtcagacagccagagttcagggcagtgctgggggaagtcgtgctgtatagcggcgccagacccctgtctcaccagcccggacctgaggcaccagcactcccaaagactgctgcccaactgaagaaggaggctaaaaaaagggaaaaattggaaaagttccagcagaagcagaagatccaacagcagcaacctcctcctggggaaaagaaaccaaagccagaaaagcgcgagaagcgggacccaggtgttataacctatgatctcccaacaccccccggagagaagaaggacgtttccggccctatgcccgattcctacagcccacgatacgttgaagctgcgtggtatccctggtgggagcaacaaggtttttttaagccagaatacggccggccaaatgtgtccgccgccaatccgcgcggagtattcatgatgtgtattccgccccctaacgtgacgggcagtctacaccttggccatgccctcacaaacgccatacaggatagtctaacccgctggcaccggatgcggggcgagaccacgctatggaatcctggctgtgatcacgctggcattgcaacacaggtcgtcgtggaaaagaaattgtggagggagcaggggcttagcaggcaccagctggggcgcgaagcgttccttcaagaagtgtggaagtggaaggaggaaaagggagacaggatttaccaccaactaaagaagttgggaagttccctcgactgggatcgtgcttgttttactatggaccccaaactgagtgccgctgttacagaggcatttgtgagactgcacgaggagggcattatatacagatctaccagactggtgaactggtcatgcacattaaacagcgccatatccgacatcgaagttgacaagaaggagctcacagggcggactctgctgagcgtcccagggtataaagaaaaggtggagtttggggtgctcgtgagtttcgcctataaggtgcaggggtcagattccgacgaagaggtcgttgtggcaaccacgcgcatagaaacaatgctgggcgacgtcgctgtcgccgtccaccccaaagatactcgataccagcacctgaaaggcaagaacgtgatccacccatttctgtcccgctcactgcccattgtctttgacgaatttgtggatatggatttcggaaccggagcggtgaaaataacaccagcccatgaccagaacgactatgaggtcgggcaacggcacggcttggaagctatctctatcatggattcccgcggggctctgattaacgtcccccctcccttcctagggcttccccggttcgaagcaagaaaagcagtgctggtcgctctgaaagaaagagggctatttagggggatcgaagataatccgatggtggtgccactgtgtaaccggagtaaagacgtcgtagagccactgctgcgtccccagtggtacgtgcgctgcggtgagatggctcaggctgcaagtgccgctgtgacacgaggggacctgcggatacttccagaggcccatcaacgaacttggcacgcatggatggacaacattcgggagtggtgcatttcaagacaactgtggtggggtcatcgcatcccagcttattttgtcacagtctccgaccctgcagtgcccccaggagaagatcctgacgggcgctactgggtgtccggtcgtaacgaagcagaggcacgcgagaaagctgctaaagagtttggtgtttcccccgataaaatcagtctccaacaggatgaagacgtgctggacacttggttctctagcggtctcttccctctgtcaatcctggggtggcctaaccagtctgaagatctttcagtcttctatccaggaacattactagaaactggtcacgatattctctttttttgggtggcccgaatggtgatgctggggctaaagttgacgggccggttacccttccgggaagtgtatctccacgcgattgtacgggacgctcatggaaggaaaatgtccaagtccctggggaacgttatcgaccccctcgacgttatctacggaatcagcctgcaggggctgcacaatcagctgctgaacagcaatctagatcctagcgaggtcgagaaggccaaggagggtcaaaaagcagacttcccagctggtatacccgagtgtggcactgacgcactgaggttcggcctgtgcgcgtacatgagccagggcagggacataaatctggacgtgaatcgcatcttggggtacagacatttttgtaacaagctatggaacgccacaaaattcgccttgcgcggtctggggaaagggttcgtaccttctcccaccagtcagccaggcggccacgagtccctggttgatcgttggattcgatcaaggctcaccgaagcagtgcgactatctaaccagggttttcaggcctacgatttccctgccgtaacaacagctcagtactctttctggctctacgaactgtgcgatgtttatctggagtgtttgaagcctgttctcaacggagtggatcaggtggcggcagaatgtgctagacagaccctgtatacttgcctggatgtcggcctccgactcctgagtccattcatgcccttcgttacagaggagctctttcagcggctgcctaggagaatgccacaggcccctccttcattgtgtgtgactccatatccggagccttctgagtgtagttggaaagatcccgaggccgaagcagccctcgaacttgcgctgtcgatcactagggcggtgaggtcactcagggccgactacaatctgactcggataagacccgattgcttccttgaggtagccgacgaagctacaggggccctagcttctgcagtgtcggggtacgtgcaggcactagcctccgctggagtcgttgcggtgctagctcttggggctcctgcccctcaagggtgcgcggtcgcccttgcttcagaccggtgcagcattcatctgcagctccagggcctcgtagatcccgcccgggagctgggcaagctgcaagcaaaaagagtggaggcacagcgtcaggctcagagactccgagagcgccgggctgcttcagggtatccagtcaaggttccccttgaggtccaggaagctgatgaagctaagctgcaacagaccgaggccgaactccgcaaggtggacgaagctattgcactgttccaaaagatgttgtag

SEQ ID NO: 163608 - DNA, 3795 bp, Artificial Sequence
  derived and/or modified sequence
atgagcacgctgtatgtctcacctcatccagatgccttcccgagcttaagggccctgatcgccgcaagatacggagaagccggagagggtcctggttggggtggagcccaccctaggatttgcctgcagcctcccccaacctctcgaacgcccttcccaccaccccgattacccgcactggagcaaggacctgggggactttgggtctggggcgctacagcagtggctcagctcttgtggcccgctggcctagggggtcctggcggatcccgggcagctgtgctggttcagcagtgggtgtcatacgccgacacagagctaattcctgccgcttgcggggcaacacttcctgcgttgggattgcggagctctgcgcaggatccccaggccgtcctcggggctcttggcagggctctgtcccccttagaagagtggctgagacttcacacgtacctagccggagaggcacctacactggcagatcttgcggctgtgacggcacttctgctgccattccggtacgtgcttgacccgccagccaggcgaatctggaacaatgttacaaggtggttcgtcacttgtgtaaggcagccggagttccgggctgtgctgggtgaggtcgttctctactcaggagccagaccactatcgcaccagcccggacccgaggctcccgcacttcctaaaacagcagcacagctcaagaaggaggcgaaaaagcgggagaaactggagaagttccaacaaaaacagaagattcagcagcagcagcccccaccaggagaaaaaaagcctaagcctgaaaagcgcgaaaaaagagatcctggcgtgattacgtacgatctacccaccccccctggcgagaagaaggacgtgagcggccctatgcctgacagttactccccaagatatgtcgaagcagcatggtatccctggtgggaacagcaaggcttctttaagcccgaatatggaagacctaacgtctccgctgccaacccacggggtgtgttcatgatgtgtatcccaccgcctaatgtaaccgggtccctccatttgggccacgccctgacaaatgctattcaagattctctcacccggtggcaccggatgcgcggtgaaactacgctctggaaccctggctgtgaccatgccggtattgcaacccaggtagtggtagaaaagaagctttggcgcgaacaaggcctgtcaagacaccagctgggccgagaagcgtttctgcaggaagtttggaaatggaaagaggaaaaaggcgacaggatttaccaccagttgaaaaagctcggcagcagtctggactgggatagagcctgttttactatggatcccaagctcagtgccgcagtgactgaagcgttcgtgcggctgcatgaggagggaatcatatatcgctctactcgtctggtgaactggtcttgtaccctgaactctgccattagcgatatcgaggttgacaaaaaagagttaactgggaggacgctgcttagcgttcccggttataaagaaaaagttgagttcggcgtcctggtttctttcgcttataaagtacagggatcggattcggatgaggaggtcgtggtggccaccacccgtatcgagaccatgctaggagacgtggcggtagccgtacatcccaaggacacacgataccagcacctcaagggcaagaacgtgatccacccttttctgtcgcggtctctgcccattgtgtttgatgaattcgtggatatggacttcggcactggcgcagtgaagattacaccagctcatgatcagaacgactatgaagttggtcagcggcacggattagaggccatctctatcatggacagtcggggagccttaataaacgttcctcccccttttttaggccttccgaggtttgaggcacggaaggcggtcctagtggctctgaaagagaggggactgtttagggggatagaggacaaccccatggttgtccccctgtgcaatcgttccaaagacgtagtggaacctctgttacggccacagtggtacgttcgatgtggagagatggcccaggcagcatctgccgctgttacgaggggcgacttgaggattttgcctgaagcacaccagagaacttggcacgcgtggatggataacattagggagtggtgtatctcacgccagctatggtgggggcatcgtattcccgcttactttgttacggtctccgaccctgctgtccccccaggagaggaccccgatggcagatactgggtttctggtcgaaacgaggccgaagcaagggagaaagcggcaaaagaatttggagtctcccctgataagatctccttgcaacaggacgaggatgtgcttgacacttggttttctagcggcctgttcccactttcaatcttagggtggccaaaccagtctgaggaccttagtgtgttctatcccggaaccctgttggaaacaggccatgatattctgtttttctgggtggctagaatggtgatgcttgggctgaaattgaccggtagattaccctttcgggaagtgtacctgcatgccatcgtgagggacgctcacggacggaagatgagcaaaagtctgggaaacgttatcgacccgctcgatgtgatttacggcatctctctccagggcctccataaccagctgttgaactccaatctggaccccagcgaagtggaaaaagcaaaagaaggtcagaaagccgacttcccagctgggatccctgaatgcggcacagatgctctccgtttcggcctgtgcgcttacatgagccagggacgggatatcaatcttgacgtaaatagaattctcggctatcgccacttctgcaacaagctgtggaatgccaccaagttcgctctgcgcggattgggaaagggctttgtcccttctccaacgagccagccgggaggccatgaaagcctggtggaccggtggatacgtagccggcttaccgaggccgtgcgactatccaatcagggattccaggcctatgacttcccagcagtaactactgctcaatatagtttctggctgtatgaactgtgtgacgtgtacctggaatgtttaaagcccgtcctcaacggcgtcgaccaggtcgctgccgagtgcgccaggcagacactttacacttgcctcgatgtcggcttgaggctgcttagtccttttatgcctttcgttacagaagagctgttccagaggttgccacggaggatgcctcaggccccaccctcactgtgcgtgacaccctaccccgaaccatctgagtgtagctggaaagacccagaggcagaggcggctttggagctggcattgtcaatcacccgtgcagttcgctctctgcgagccgattataacctgaccaggatacgacccgattgctttctggaggtggccgacgaggccactggtgctctggcatccgcggtttcggggtatgtgcaggcgctggcctccgcaggagtagtcgcagtgctggccctcggcgcacccgctcctcagggttgcgccgtggccttggctagcgacaggtgttcgattcatctgcagcttcagggactggtcgaccccgctcgggagctaggcaaattgcaggctaagagagtagaagcccagcggcaggcccaaagactgagagaacgacgggcagcctccgggtacccagtgaaggtgcccctggaggtgcaggaggcagatgaagcgaaattgcagcagaccgaggccgaactccggaaagtcgatgaagccattgctctctttcagaaaatgttatag

SEQ ID NO: 163609 - DNA, 525 bp, Artificial Sequence
  derived and/or modified sequence
atgagcaccctgtacgtgagcccccaccccgacgccttccccagcctgagagccctgatcgccgccagatacggcgaggccggcgagggccccggctggggcggcgcccaccccagaatctgcctgcagcccccccccaccagcagaaccagcttccccccccccagactgcccgccctggagcagggccccggcggcctgtgggtgtggggcgccaccgccgtggcccagctgctgtggcccgccggcctgggcggccccggcggcagcagagccgccgtgctggtgcagcagtgggtgagctacgccgacaccgagctgatccccgccgcctgcggcgccaccctgcccgccctgggcctgagaagcagcgcccaggacccccaggccgtgctgggcgccctgggcagagccctgagccccctggaggagtggctgagactgcacacctacctggccggcgaggcccccaccctggccgacctggccgccgtgaccgccctgctgctgcccttcagatactag

SEQ ID NO: 163610 - DNA, 3795 bp, Artificial Sequence
  derived and/or modified sequence
atgagcaccctgtacgtgagcccccaccccgacgccttccccagcctgagagccctgatcgccgccagatacggcgaggccggcgagggccccggctggggcggcgcccaccccagaatctgcctgcagcccccccccaccagcagaaccagcttccccccccccagactgcccgccctggagcagggccccggcggcctgtgggtgtggggcgccaccgccgtggcccagctgctgtggcccgccggcctgggcggccccggcggcagcagagccgccgtgctggtgcagcagtgggtgagctacgccgacaccgagctgatccccgccgcctgcggcgccaccctgcccgccctgggcctgagaagcagcgcccaggacccccaggccgtgctgggcgccctgggcagagccctgagccccctggaggagtggctgagactgcacacctacctggccggcgaggcccccaccctggccgacctggccgccgtgaccgccctgctgctgcccttcagatacgtgctggacccccccgccagaagaatctggaacaacgtgaccagatggttcgtgacctgcgtgagacagcccgagttcagagccgtgctgggcgaggtggtgctgtacagcggcgccagacccctgagccaccagcccggccccgaggcccccgccctgcccaagaccgccgcccagctgaagaaggaggccaagaagagagagaagctggagaagttccagcagaagcagaagatccagcagcagcagcccccccccggcgagaagaagcccaagcccgagaagagagagaagagagaccccggcgtgatcacctacgacctgcccaccccccccggcgagaagaaggacgtgagcggccccatgcccgacagctacagccccagatacgtggaggccgcctggtacccctggtgggagcagcagggcttcttcaagcccgagtacggcagacccaacgtgagcgccgccaaccccagaggcgtgttcatgatgtgcatccccccccccaacgtgaccggcagcctgcacctgggccacgccctgaccaacgccatccaggacagcctgaccagatggcacagaatgagaggcgagaccaccctgtggaaccccggctgcgaccacgccggcatcgccacccaggtggtggtggagaagaagctgtggagagagcagggcctgagcagacaccagctgggcagagaggccttcctgcaggaggtgtggaagtggaaggaggagaagggcgacagaatctaccaccagctgaagaagctgggcagcagcctggactgggacagagcctgcttcaccatggaccccaagctgagcgccgccgtgaccgaggccttcgtgagactgcacgaggagggcatcatctacagaagcaccagactggtgaactggagctgcaccctgaacagcgccatcagcgacatcgaggtggacaagaaggagctgaccggcagaaccctgctgagcgtgcccggctacaaggagaaggtggagttcggcgtgctggtgagcttcgcctacaaggtgcagggcagcgacagcgacgaggaggtggtggtggccaccaccagaatcgagaccatgctgggcgacgtggccgtggccgtgcaccccaaggacaccagataccagcacctgaagggcaagaacgtgatccaccccttcctgagcagaagcctgcccatcgtgttcgacgagttcgtggacatggacttcggcaccggcgccgtgaagatcacccccgcccacgaccagaacgactacgaggtgggccagagacacggcctggaggccatcagcatcatggacagcagaggcgccctgatcaacgtgcccccccccttcctgggcctgcccagattcgaggccagaaaggccgtgctggtggccctgaaggagagaggcctgttcagaggcatcgaggacaaccccatggtggtgcccctgtgcaacagaagcaaggacgtggtggagcccctgctgagaccccagtggtacgtgagatgcggcgagatggcccaggccgccagcgccgccgtgaccagaggcgacctgagaatcctgcccgaggcccaccagagaacctggcacgcctggatggacaacatcagagagtggtgcatcagcagacagctgtggtggggccacagaatccccgcctacttcgtgaccgtgagcgaccccgccgtgccccccggcgaggaccccgacggcagatactgggtgagcggcagaaacgaggccgaggccagagagaaggccgccaaggagttcggcgtgagccccgacaagatcagcctgcagcaggacgaggacgtgctggacacctggttcagcagcggcctgttccccctgagcatcctgggctggcccaaccagagcgaggacctgagcgtgttctaccccggcaccctgctggagaccggccacgacatcctgttcttctgggtggccagaatggtgatgctgggcctgaagctgaccggcagactgcccttcagagaggtgtacctgcacgccatcgtgagagacgcccacggcagaaagatgagcaagagcctgggcaacgtgatcgaccccctggacgtgatctacggcatcagcctgcagggcctgcacaaccagctgctgaacagcaacctggaccccagcgaggtggagaaggccaaggagggccagaaggccgacttccccgccggcatccccgagtgcggcaccgacgccctgagattcggcctgtgcgcctacatgagccagggcagagacatcaacctggacgtgaacagaatcctgggctacagacacttctgcaacaagctgtggaacgccaccaagttcgccctgagaggcctgggcaagggcttcgtgcccagccccaccagccagcccggcggccacgagagcctggtggacagatggatcagaagcagactgaccgaggccgtgagactgagcaaccagggcttccaggcctacgacttccccgccgtgaccaccgcccagtacagcttctggctgtacgagctgtgcgacgtgtacctggagtgcctgaagcccgtgctgaacggcgtggaccaggtggccgccgagtgcgccagacagaccctgtacacctgcctggacgtgggcctgagactgctgagccccttcatgcccttcgtgaccgaggagctgttccagagactgcccagaagaatgccccaggccccccccagcctgtgcgtgaccccctaccccgagcccagcgagtgcagctggaaggaccccgaggccgaggccgccctggagctggccctgagcatcaccagagccgtgagaagcctgagagccgactacaacctgaccagaatcagacccgactgcttcctggaggtggccgacgaggccaccggcgccctggccagcgccgtgagcggctacgtgcaggccctggccagcgccggcgtggtggccgtgctggccctgggcgcccccgccccccagggctgcgccgtggccctggccagcgacagatgcagcatccacctgcagctgcagggcctggtggaccccgccagagagctgggcaagctgcaggccaagagagtggaggcccagagacaggcccagagactgagagagagaagagccgccagcggctaccccgtgaaggtgcccctggaggtgcaggaggccgacgaggccaagctgcagcagaccgaggccgagctgagaaaggtggacgaggccatcgccctgttccagaagatgctgtag

SEQ ID NO: 163611 - DNA, 1101 bp, Artificial Sequence
  derived and/or modified sequence
atgagcaccctgtacgtgagcccccaccccgacgccttccccagcctgagagccctgatcgccgccagatacggcgaggccggcgagggccccggctggggcggcgcccaccccagaatctgcctgcagcccccccccaccagcagaacccccttccccccccccagactgcccgccctggagcagggccccggcggcctgtgggtgtggggcgccaccgccgtggcccagctgctgtggcccgccggcctgggcggccccggcggcagcagagccgccgtgctggtgcagcagtgggtgagctacgccgacaccgagctgatccccgccgcctgcggcgccaccctgcccgccctgggcctgagaagcagcgcccaggacccccaggccgtgctgggcgccctgggcagagccctgagccccctggaggagtggctgagactgcacacctacctggccggcgaggcccccaccctggccgacctggccgccgtgaccgccctgctgctgcccttcagatacgtgctggacccccccgccagaagaatctggaacaacgtgaccagatggttcgtgacctgcgtgagacagcccgagttcagagccgtgctgggcgaggtggtgctgtacagcggcgccagacccctgagccaccagcccggccccgaggcccccgccctgcccaagaccgccgcccagctgaagaaggaggccaagaagagagagaagctggagaagttccagcagaagcagaagatccagcagcagcagcccccccccggcgagaagaagcccaagcccgagaagagagagaagagagaccccggcgtgatcacctacgacctgcccaccccccccggcgagaagaaggacgtgagcggccccatgcccgacagctacagccccagatacgtggaggccgcctggtacccctggtgggagcagcagggcttcttcaagcccgagtacggcagacccaacgtgagcgccgccaaccccagaggcgtgttcatgatgtgcatccccccccccaacgtgaccggcagcctgcacctgggccacgccctgaccaacgccatccaggacagcctgaccagatag

SEQ ID NO: 163612 - DNA, 525 bp, Artificial Sequence
  derived and/or modified sequence
atgagcaccctgtacgtgagcccccaccccgacgccttccccagcctgagagccctgatcgccgccagatacggcgaggccggcgagggccccggctggggcggcgcccaccccagaatctgcctgcagcccccccccaccagcagaacccccttccccccccccagactgcccgccctggagcagggccccggcggcctgtgggtgtggggcgccaccgccgtggcccagctgctgtggcccgccggcctgggcggccccggcggcagcagagccgccgtgctggtgcagcagtgggtgagctacgccgacaccgagctgatccccgccgcctgcggcgccaccctgcccgccctgggcctgagaagcagcgcccaggacccccaggccgtgctgggcgccctgggcagagccctgagccccctggaggagtggctgagactgcacacctacctggccggcgaggcccccaccctggccgacctggccgccgtgaccgccctgctgctgcccttcagatactag

SEQ ID NO: 163613 - DNA, 3552 bp, Artificial Sequence
  derived and/or modified sequence
tgaggcctgggcggccccggcggcagcagagccgccgtgctggtgcagcagtgggtgagctacgccgacaccgagctgatccccgccgcctgcggcgccaccctgcccgccctgggcctgagaagcagcgcccaggacccccaggccgtgctgggcgccctgggcagagccctgagccccctggaggagtggctgagactgcacacctacctggccggcgaggcccccaccctggccgacctggccgccgtgaccgccctgctgctgcccttcagatacgtgctggacccccccgccagaagaatctggaacaacgtgaccagatggttcgtgacctgcgtgagacagcccgagttcagagccgtgctgggcgaggtggtgctgtacagcggcgccagacccctgagccaccagcccggccccgaggcccccgccctgcccaagaccgccgcccagctgaagaaggaggccaagaagagagagaagctggagaagttccagcagaagcagaagatccagcagcagcagcccccccccggcgagaagaagcccaagcccgagaagagagagaagagagaccccggcgtgatcacctacgacctgcccaccccccccggcgagaagaaggacgtgagcggccccatgcccgacagctacagccccagatacgtggaggccgcctggtacccctggtgggagcagcagggcttcttcaagcccgagtacggcagacccaacgtgagcgccgccaaccccagaggcgtgttcatgatgtgcatccccccccccaacgtgaccggcagcctgcacctgggccacgccctgaccaacgccatccaggacagcctgaccagatggcacagaatgagaggcgagaccaccctgtggaaccccggctgcgaccacgccggcatcgccacccaggtggtggtggagaagaagctgtggagagagcagggcctgagcagacaccagctgggcagagaggccttcctgcaggaggtgtggaagtggaaggaggagaagggcgacagaatctaccaccagctgaagaagctgggcagcagcctggactgggacagagcctgcttcaccatggaccccaagctgagcgccgccgtgaccgaggccttcgtgagactgcacgaggagggcatcatctacagaagcaccagactggtgaactggagctgcaccctgaacagcgccatcagcgacatcgaggtggacaagaaggagctgaccggcagaaccctgctgagcgtgcccggctacaaggagaaggtggagttcggcgtgctggtgagcttcgcctacaaggtgcagggcagcgacagcgacgaggaggtggtggtggccaccaccagaatcgagaccatgctgggcgacgtggccgtggccgtgcaccccaaggacaccagataccagcacctgaagggcaagaacgtgatccaccccttcctgagcagaagcctgcccatcgtgttcgacgagttcgtggacatggacttcggcaccggcgccgtgaagatcacccccgcccacgaccagaacgactacgaggtgggccagagacacggcctggaggccatcagcatcatggacagcagaggcgccctgatcaacgtgcccccccccttcctgggcctgcccagattcgaggccagaaaggccgtgctggtggccctgaaggagagaggcctgttcagaggcatcgaggacaaccccatggtggtgcccctgtgcaacagaagcaaggacgtggtggagcccctgctgagaccccagtggtacgtgagatgcggcgagatggcccaggccgccagcgccgccgtgaccagaggcgacctgagaatcctgcccgaggcccaccagagaacctggcacgcctggatggacaacatcagagagtggtgcatcagcagacagctgtggtggggccacagaatccccgcctacttcgtgaccgtgagcgaccccgccgtgccccccggcgaggaccccgacggcagatactgggtgagcggcagaaacgaggccgaggccagagagaaggccgccaaggagttcggcgtgagccccgacaagatcagcctgcagcaggacgaggacgtgctggacacctggttcagcagcggcctgttccccctgagcatcctgggctggcccaaccagagcgaggacctgagcgtgttctaccccggcaccctgctggagaccggccacgacatcctgttcttctgggtggccagaatggtgatgctgggcctgaagctgaccggcagactgcccttcagagaggtgtacctgcacgccatcgtgagagacgcccacggcagaaagatgagcaagagcctgggcaacgtgatcgaccccctggacgtgatctacggcatcagcctgcagggcctgcacaaccagctgctgaacagcaacctggaccccagcgaggtggagaaggccaaggagggccagaaggccgacttccccgccggcatccccgagtgcggcaccgacgccctgagattcggcctgtgcgcctacatgagccagggcagagacatcaacctggacgtgaacagaatcctgggctacagacacttctgcaacaagctgtggaacgccaccaagttcgccctgagaggcctgggcaagggcttcgtgcccagccccaccagccagcccggcggccacgagagcctggtggacagatggatcagaagcagactgaccgaggccgtgagactgagcaaccagggcttccaggcctacgacttccccgccgtgaccaccgcccagtacagcttctggctgtacgagctgtgcgacgtgtacctggagtgcctgaagcccgtgctgaacggcgtggaccaggtggccgccgagtgcgccagacagaccctgtacacctgcctggacgtgggcctgagactgctgagccccttcatgcccttcgtgaccgaggagctgttccagagactgcccagaagaatgccccaggccccccccagcctgtgcgtgaccccctaccccgagcccagcgagtgcagctggaaggaccccgaggccgaggccgccctggagctggccctgagcatcaccagagccgtgagaagcctgagagccgactacaacctgaccagaatcagacccgactgcttcctggaggtggccgacgaggccaccggcgccctggccagcgccgtgagcggctacgtgcaggccctggccagcgccggcgtggtggccgtgctggccctgggcgcccccgccccccagggctgcgccgtggccctggccagcgacagatgcagcatccacctgcagctgcagggcctggtggaccccgccagagagctgggcaagctgcaggccaagagagtggaggcccagagacaggcccagagactgagagagagaagagccgccagcggctaccccgtgaaggtgcccctggaggtgcaggaggccgacgaggccaagctgcagcagaccgaggccgagctgagaaaggtggacgaggccatcgccctgttccagaagatgctgtag

SEQ ID NO: 163614 - DNA, 894 bp, Artificial Sequence
  derived and/or modified sequence
atgcccgacagctacagccccagatacgtggaggccgcctggtacccctggtgggagcagcagggcttcttcaagcccgagtacggcagacccaacgtgagcgccgccaaccccagaggcgtgttcatgatgtgcatccccccccccaacgtgaccggcagcctgcacctgggccacgccctgaccaacgccatccaggacagcctgaccagatggcacagaatgagaggcgagaccaccctgtggaaccccggctgcgaccacgccggcatcgccacccaggtggtggtggagaagaagctgtggagagagcagggcctgagcagacaccagctgggcagagaggccttcctgcaggaggtgtggaagtggaaggaggagaagggcgacagaatctaccaccagctgaagaagctgggcagcagcctggactgggacagagcctgcttcaccatggaccccaagctgagcgccgccgtgaccgaggccttcgtgagactgcacgaggagggcatcatctacagaagcaccagactggtgaactggagctgcaccctgaacagcgccatcagcgacatcgaggtggacaagaaggagctgaccggcagaaccctgctgagcgtgcccggctacaaggagaaggtggagttcggcgtgctggtgagcttcgcctacaaggtgcagggcagcgacagcgacgaggaggtggtggtggccaccaccagaatcgagaccatgctgggcgacgtggccgtggccgtgcaccccaaggacaccagataccagcacctgaagggcaagaacgtgatccaccccttcctgagcagaagcctgcccatcgtgttcgacgagttcgtggacatggacttcggcaccggccccgcccaggtgtag

SEQ ID NO: 163615 - DNA, 288 bp, Artificial Sequence
  derived and/or modified sequence
tgacccgccggcctgggcggccccggcggcagcagagccgccgtgctggtgcagcagtgggtgagctacgccgacaccgagctgatccccgccgcctgcggcgccaccctgcccgccctgggcctgagaagcagcgcccaggacccccaggccgtgctgggcgccctgggcagagccctgagccccctggaggagtggctgagactgcacacctacctggccggcgaggcccccaccctggccgacctggccgccgtgaccgccctgctgctgcccttcagatactag

SEQ ID NO: 163616 - DNA, 3795 bp, Artificial Sequence
  derived and/or modified sequence
atgtctacactgtatgtatctcctcaccccgacgccttcccatctcttcgcgccctcatagcagcccggtatggcgaagccggggaaggcccaggatggggcggagcccacccacgaatttgcctgcagccccctcccaccagcaggacaccttttccccctcccagacttcccgccttagaacagggtccgggcggtctgtgggtgtggggggctacggctgtggcgcagctcctgtggcctgccggcctgggaggtcctggcggatcccgggcggctgtactcgtgcagcaatgggtgtcttatgcagataccgaactgatccctgccgcctgcggtgctacactgcctgccttgggccttagaagcagtgcgcaagacccacaggcagtcctgggcgctctcggacgagctctgtccccactcgaagaatggctacgtctccacacataccttgccggtgaagctcccactctggctgacttggcagctgtaactgcccttttgctgccttttcgctacgtactggatcctcccgcccgaagaatttggaataacgtcacaagatggttcgtcacctgcgtgcggcaaccagaatttcgcgctgtgctgggtgaagtcgttctttactctggcgcccgccccctctcccaccagcctggccctgaagcaccagccttacctaagaccgcggcacagctgaaaaaggaagctaaaaaacgcgaaaaactagaaaagttccagcaaaagcagaaaattcagcagcagcaaccgccccccggtgagaaaaagcctaagcctgagaagcgcgagaagcgcgaccccggagtgattacctatgacctgccaacgcctcctggtgagaagaaagacgtgtcaggaccaatgcccgacagctattccccccggtatgtggaggctgcttggtacccatggtgggagcagcagggattttttaagcccgaatatggcagacctaacgtgagtgcagcaaacccaagaggcgtgtttatgatgtgcatcccacctcctaatgtaacagggtccctacacttaggacacgcgttgaccaacgcaattcaggattccctcactaggtggcacaggatgcggggcgagacaactctctggaatcctggttgtgatcacgccggaatcgccacacaagtcgtagtcgaaaaaaagctgtggagggagcagggacttagcagacatcaactgggtagagaagccttcctccaggaggtatggaagtggaaagaggagaagggggaccggatctaccaccaacttaagaaactgggatcttcactggattgggatagagcatgttttaccatggatcccaagctgtccgctgctgtgaccgaggctttcgtgagactgcacgaggagggcatcatataccggtccacgagattggtcaactggtcctgtaccctgaacagcgccatctcagatatcgaagttgataaaaaggaactgacgggacggaccctgctgtctgttccagggtataaagagaaagtcgagtttggtgttctggtgtcgttcgcttataaggtgcagggatcggattctgatgaggaagtggttgtagctaccactcggatcgaaaccatgctcggggatgtggcagtcgcagtccatcccaaggacacacgttatcagcatctgaaaggcaagaatgtgatacacccattcctctctcgaagcctgcccatagtcttcgatgaattcgtggacatggatttcggtacaggggccgtgaagatcactccagcccacgaccagaatgactatgaagtcggccagcgtcatgggctggaagccatttcaatcatggacagccgaggcgccctgattaatgtgccaccgccttttttgggtttaccaaggttcgaggccaggaaggcagtgctggtggctctgaaggaaaggggtctattccgcggaatcgaggacaacccaatggtggtcccactttgtaaccgctctaaagacgtcgtggaacccctcctgaggccacagtggtatgtccggtgcggagaaatggcccaggccgctagtgctgccgttacccgcggagacctgcgtattctgcccgaagctcaccagcggacttggcatgcttggatggacaatattcgcgagtggtgcatttctcgtcagctatggtggggacacaggattccagcctatttcgtcacggtgagcgatccagctgtacctcccggagaggatcctgacggccggtattgggttagcggcagaaatgaggcggaagctcgcgaaaaggctgcaaaggagtttggggtttcaccagacaagatttcactccagcaggatgaagatgtactcgacacctggttctcttccggattgttccccctctccatcctgggttggcctaatcagtcagaagacctgagcgtgttttatcctggaaccctcctggaaaccggtcacgatatcctgtttttttgggtggctcggatggtcatgctggggttaaagctgaccgggcggttgccattcagagaagtttatctgcacgccatcgttcgcgatgctcacggaagaaaaatgtctaagtcgctcggaaacgttatcgaccctttagacgtaatctatggcatcagtcttcagggcttgcacaatcagctgctgaactctaacctggacccaagtgaagtggagaaggcaaaggaggggcaaaaggccgactttcctgctggcataccagagtgtggaacagacgcccttcgtttcggcctctgcgcctatatgtcccagggaagggacattaacctcgacgtgaaccggatcctgggctatagacatttttgcaacaaactgtggaatgccactaagtttgcactgcgcgggctggggaagggcttcgtcccctctcccacctcacagcctggaggccacgagagcctcgttgaccgctggattaggtcccggctgactgaggcagttcgactctcaaatcaagggttccaggcttatgatttccccgccgtgacaactgcacagtatagtttttggctatatgaactctgcgatgtttatctggagtgtttaaagcccgtgcttaacggggtggatcaggtggcagccgaatgcgctcggcagacactctacacatgcctggacgtgggactcaggcttctgtctccttttatgcccttcgtcaccgaggagctattccagagattgccaaggcgaatgccccaggcacctccaagtctgtgtgtgactccataccctgaaccttctgaatgctcatggaaagaccctgaggctgaagctgcgctcgaactcgcactgtccatcactcgcgccgtgagatcgctcagggccgactacaatttaacaaggattcgccctgattgctttcttgaagtggctgatgaagccactggagcactagcgagtgctgtgtccggctacgtgcaggctcttgcctctgctggcgtcgtggcggtgctggcactgggggctcccgcaccccagggctgtgctgttgctctagccagtgaccgatgttccattcatctacagctccagggattagtggacccggcgcgagagctgggtaagctgcaggctaagcgagtcgaggcccaacggcaggctcagaggttacgcgagcgacgcgcagcttcaggttaccccgtgaaagtacctctcgaggttcaggaagcagatgaagcgaagctacagcagacagaagctgagctccgcaaggtggacgaggctatagcgctgttccagaaaatgctgtag

SEQ ID NO: 163617 - DNA, 525 bp, Artificial Sequence
  derived and/or modified sequence
atgtctaccttatacgtctccccccatccagacgccttcccctcactgcgagccctaatcgctgccagatacggcgaagccggcgagggcccgggttggggcggagcccaccccagaatctgtctccagcctccgccaactagccgcaccagctttcccccccctcgcctgccagccctggagcaggggcccgggggcctctgggtctggggggcaaccgcggtcgcccagctgctgtggcctgcgggcctcggcgggcccgggggatcccgcgctgccgtgctggtgcaacaatgggtcagctatgctgataccgagttgattcccgcagcatgcggagcaaccctgcctgccctgggcctccgctctagcgcccaagaccctcaggcagtcctgggcgccttgggaagggcattgtcccctttggaagaatggctcaggcttcacacctacctggcaggggaggcaccaaccctggcggatttagcagccgtaacagctttgctcctgccgttccgctattag

SEQ ID NO: 163618 - DNA, 525 bp, Artificial Sequence
  derived and/or modified sequence
atgagcacactttacgtgtccccccatcctgatgctttccctagcttgcgtgctctgatagccgcccggtatggagaggcgggggaagggccaggatggggcggcgcgcacccccggatttgcctgcagcctccaccaactagccgaacttctttccctccgcctcgcctgccagctctggaacagggtcctggcggcctttgggtttggggagcgaccgccgtcgcccaactcctctggcctgctggcctaggcggcccgggaggctcccgggccgcagttcttgtccagcagtgggtaagctacgctgacacagagctaatcccggcagcctgcggtgccaccttgccggcactcgggctgagaagttctgctcaggacccccaggccgtgctgggcgccctgggccgggccctctccccactcgaggaatggttgcgcttgcacacgtacctagctggagaggcgccaacactcgccgacctcgctgcagtgaccgcactcctgctcccttttcgttattag

SEQ ID NO: 163619 - DNA, 3795 bp, Artificial Sequence
  derived and/or modified sequence
atgagcactttgtatgttagtcctcatccggatgcttttcccagcctgagggccctcattgccgcaagatacggcgaggccggcgagggacccggatggggcggtgctcaccccagaatctgccttcagccaccacccacctcccgcacctcatttccgccccccaggctacccgcactggagcagggtccgggcgggctctgggtctggggcgccacagcagtggcccagcttctctggccagctggtctcggaggccccggcgggtccagggctgctgttttagtgcagcaatgggtcagctacgctgataccgagctaattcctgctgcctgcggtgcaacactgcccgccctaggcttgagaagttccgcccaggacccacaggcagtcctgggcgccttaggccgggcattatcaccgttggaggaatggctgaggcttcacacgtatctcgccggggaggcccctacactcgctgacctcgcagccgtgaccgcactcctgctgccctttcgctacgtccttgaccctcctgcccgccgtatatggaacaacgttacccgctggttcgtgacgtgtgtgagacagccggagttccgagcggtactgggcgaggtggtgttgtacagcggagctcgccccctctcccaccagcccgggcctgaggccccggccctgcccaaaaccgcagcgcaactcaagaaagaggccaaaaagagggagaaactggagaagttccagcagaagcaaaaaatccagcagcagcagccacctcctggggagaagaaacccaaacctgagaagcgagagaaaagggatcccggggtgatcacctatgatttacccacaccaccaggtgagaagaaagacgtctctggacctatgcccgactcctattctccaagatacgtcgaggctgcttggtatccctggtgggagcagcaaggcttcttcaaaccagaatacgggcgccccaatgtctccgcagctaatccccgtggcgtttttatgatgtgcatccctcctcctaacgtaaccggctcacttcacctaggacacgctcttactaatgctatccaagactccctaacacggtggcatcgaatgcggggagaaaccacactgtggaatcctggttgtgatcatgccggcatcgccacgcaagtcgtagtggagaaaaaactgtggagagagcaaggcctctcccgccatcagcttgggcgcgaggctttcctgcaagaggtatggaagtggaaggaggagaagggagataggatttatcatcagctcaagaaactgggaagttctcttgattgggatcgcgcatgttttaccatggacccaaagctgtcagctgcggtgactgaagctttcgtcagactacatgaagagggtataatatacagatccactcggttggtcaattggtcatgtacgttaaatagcgcaatctctgatattgaagtggataagaaggagttgactggtcgcacactgttaagtgttccaggctacaaggaaaaggtagagtttggtgtcctcgtgtccttcgcttacaaagtgcaggggagtgattcggacgaggaggtggtcgtggctactacgcgcatcgaaaccatgttgggtgacgttgcagtcgccgtccacccaaaggatactcggtaccagcacctgaaaggtaagaatgttatccatcccttcctgagcagatccctacctatcgtttttgatgaattcgtggacatggactttggcaccggagccgtcaaaataacacctgcccacgatcagaatgactatgaagtgggccagcgtcatggtttagaggcaatctcaatcatggattcacgaggcgccttaatcaacgtcccaccaccatttttggggctaccacggtttgaagctcggaaagccgtacttgtggctctcaaggagagaggcctctttcgtgggatagaagacaatccgatggtggtgccattgtgtaatagatccaaagacgtggtggaacctctcctgcggccacagtggtatgttagatgtggagagatggcccaagcagcgtcagcagctgtgacacgcggggatctgcggatcctccccgaagcccaccaaagaacttggcatgcatggatggacaacattagagagtggtgtatctctcgccagctttggtggggacatagaatccctgcatattttgtaacggtgagtgaccccgcagtgcccccaggagaggatcctgacggtcgatactgggtcagcggcaggaacgaggctgaggcccgcgagaaggcagccaaagagtttggggtgagtccagataaaatttccttacaacaggacgaggacgtccttgacacatggtttagttctggccttttcccacttagtatcctgggctggccaaaccagagcgaggacctgtccgtgttttatccaggaaccttgttagaaaccggccacgatatcctattcttctgggtggcccgaatggtaatgttggggctgaagcttacagggcgcctgccattcagggaggtgtacctccatgcgatcgtaagggatgcacatgggagaaagatgtccaaatccctaggcaacgttattgacccactggatgtaatctacgggatttctctccagggtctgcataaccagctgctgaactctaacctggacccctcagaagtcgagaaggctaaagaaggccagaaggccgactttcctgctggaatcccagagtgcgggactgacgctctcagattcggcctgtgcgcttacatgagccagggacgggacatcaacctcgatgttaataggattctcgggtatcggcacttttgtaacaagctgtggaatgcgaccaagttcgctcttagaggcctgggcaaggggttcgtgccttcgccgaccagtcagccaggcggccacgagtccctggtggatcgctggattcgatcacgattaactgaggcggtgcggctgagtaaccaagggtttcaagcatacgactttccggctgtcacaactgcccagtatagcttttggctgtacgagctctgtgatgtttacctcgagtgcctgaaaccggttcttaacggggtggatcaggtggctgctgagtgtgccagacaaacactgtacacctgcctagacgtggggctgcgcttactctctcccttcatgccattcgttactgaggagctgttccaacggttgcccaggcgaatgccacaggcccctccgagcttatgcgttaccccatatcctgagccttcagagtgttcctggaaggatcctgaggccgaagcagcactggaactggccctatcaataacccgtgcggtgcggtctctccgggctgactacaatctgacccggatccgccctgactgtttcctggaagttgccgatgaggcgaccggggccctcgcgtctgcagtttctgggtatgttcaggctctcgcatcagcaggcgtggtcgctgtgcttgccctcggcgcccccgccccacagggatgcgccgtcgcacttgcctccgaccgctgttcaattcacctgcaacttcagggtttagtcgaccccgcccgggagctaggtaagctgcaggcaaaacgagtcgaagcccaaagacaggcccagaggctgagggagcggcgcgctgcttccggctatcccgtcaaggtaccactcgaggtgcaagaagccgacgaggctaagttacagcagaccgaggctgaacttcgaaaagtcgatgaagccatagccctgttccagaaaatgttgtag

SEQ ID NO: 163620 - DNA, 1101 bp, Artificial Sequence
  derived and/or modified sequence
atgtcgactctctatgtttctccgcaccctgacgcattcccttcgctgagggcactcatcgcggcacggtacggtgaggctggtgaaggccccggatggggcggcgcccaccctaggatatgccttcagccccccccaactagtagaacaccctttccgcctccccggctgccagccctcgaacagggccctggtggcctctgggtttggggagccaccgctgttgcccagctgctgtggcctgccggcctcggcggcccaggaggcagtagggcagccgtgctcgtgcagcagtgggtgagctatgctgacactgagctaattcccgctgcatgtggcgcaaccctccccgccctcgggctgagatctagtgcacaggacccgcaagcagtgctgggcgcgctgggaagagccctgtcacccctggaagaatggttgcgactccatacttacctcgcaggtgaggcgcccacattagccgacctcgccgcggtcactgcgctcctgctccccttccgttacgtgctcgacccccctgcacggcgcatttggaataacgtgacacggtggttcgtgacctgcgtgcgccagccggaattccgcgctgtccttggagaagtagtgttatactctggggctagacctctctcccaccagcctggcccagaggcgcctgccctccctaaaacagctgctcaactgaaaaaggaggctaagaagcgcgaaaaactcgagaaattccagcaaaagcagaagatacagcagcagcaacccccccccggcgaaaaaaagcccaagcccgagaaacgtgagaaaagggacccaggtgttatcacttatgatctccccacccccccaggggagaagaaggacgtaagcgggcccatgccggactcatacagccccagatacgtggaggccgcctggtacccctggtgggagcagcagggcttctttaagcctgaatacggtcgcccaaatgtatctgccgccaatcctcgtggtgtcttcatgatgtgcatacccccacccaatgttacagggagtttgcacctggggcatgccctgacaaacgctatccaggactcgctgacccgatag

SEQ ID NO: 163621 - DNA, 525 bp, Artificial Sequence
  derived and/or modified sequence
atgtctacactttacgtatccccacaccctgacgcctttcctagcctcagagccctgattgcagctagatacggagaggccggggaaggtcccggttggggcggggcccacccaaggatctgcctacagcctccccccacatctaggactccttttcctccgcccaggttgcccgcgttagagcagggccccggaggactgtgggtatggggagctacagctgtcgctcagttattgtggccggccgggctcggaggccctggaggctctcgggccgcggtgctagttcagcagtgggtatcgtacgccgacactgagctgatacctgctgcgtgcggtgccaccttgcccgcccttgggctaagaagtagcgcacaggatccacaggctgtgctgggagcactgggtagagcccttagccctttggaagagtggctacgattgcacacctacctcgccggcgaggccccaacactggctgatctggcggctgtgactgccttgctgcttccgttccgctattag

SEQ ID NO: 163622 - DNA, 3552 bp, Artificial Sequence
  derived and/or modified sequence
tgagggctcggaggtcccggaggctcaagggcggctgtactggtacagcaatgggtctcgtatgctgatacagaattgatacccgccgcttgcggggccactctccccgcacttggcctgcggagctccgctcaggaccctcaggcagtactgggcgctttggggcgggcactgagcccgttggaagagtggttgcgcctgcatacctacttagcaggagaggcaccaacattagctgatctggcagctgtgaccgccctgcttcttccgttccgatacgtgctggacccacctgcacgccgcatttggaacaacgtaacccgttggttcgtgacatgtgtgcggcagcccgagtttcgcgccgtcctaggcgaagtcgtgctctactctggcgctcgccctctgtcccatcagcccggacctgaagcacctgcattgcctaagactgccgcccagctgaagaaagaggccaaaaaaagggagaaattagaaaaatttcagcaaaagcagaagatccaacaacagcagcccccaccaggcgaaaaaaagcccaagcccgagaagagggagaagcgcgatcccggcgtgattacatacgacctgccaacacccccaggtgagaagaaggacgtgagcggaccaatgcctgattcatactcaccacgctatgtcgaagccgcatggtatccatggtgggagcaacagggcttctttaagcctgagtatgggaggccaaacgtctccgctgcaaaccctagaggagtgtttatgatgtgtatccccccccctaatgtcactggctctctccacttaggacacgcgctaacaaacgccatacaggacagcctcactaggtggcacagaatgaggggggagaccacgctctggaaccccgggtgtgatcatgccggcattgctactcaggttgtcgtggaaaaaaagctctggcgcgaacaggggttgagcaggcaccagctgggcagggaggctttcctccaggaggtgtggaagtggaaagaggagaagggagacagaatctaccaccaactgaaaaagctggggtcaagcctggattgggatagggcatgttttaccatggaccctaaacttagcgcggctgtgactgaagcgttcgtccggttgcacgaggaagggataatctatcgatcgacccgccttgtgaattggagttgcactttgaacagcgctatctcagatatagaagtggacaaaaaagagctcacaggcagaacccttctgtccgtccctggctataaagagaaggtggaattcggggtgttggtttcatttgcatataaggtccaaggctctgattctgacgaggaagtggtggttgcaactacgcgcatcgaaacgatgttgggagatgtcgccgtggcagtacacccaaaggatactagataccagcacctcaaagggaaaaacgtgatccatccctttctgtcccggagcctgccaatcgtgtttgatgaatttgtagacatggacttcggtacaggtgctgtgaaaatcactcctgcgcatgaccagaacgactatgaggtgggacagagacatgggctcgaagccatctcaattatggacagtcgaggggccctcatcaacgtcccccccccctttctggggctgccccgcttcgaggctcgcaaagccgtgctggtcgccctgaaagaaagaggactgttccggggaatagaggataatcctatggtcgtccccctctgtaacagatcgaaggatgtggtagagcccctcttgagaccgcagtggtacgtacgatgcggagagatggcacaggctgctagcgccgccgtgacacgtggggacctacgcatcctccccgaggcccatcagagaacatggcatgcatggatggataacattcgggaatggtgcatctctcgccaactatggtgggggcaccgcatcccggcatacttcgtgacagtctccgatccagccgtgccccccggggaagatccagacgggcgctattgggtttctggccgcaacgaagctgaagcccgggaaaaggcggctaaggagttcggcgtttcccctgataagatatccctgcagcaagacgaagacgtgctcgatacctggtttagcagcggcctgttccccctctcaatcctcggctggcctaatcagagtgaggacctgtccgtcttctaccccgggaccctgttggaaacaggccatgatattctctttttctgggtggccagaatggtgatgttagggctgaaactgactggccgcctgcctttccgcgaagtgtatctgcacgcaatagttagagatgcacatggtaggaaaatgagtaagtcattagggaatgtgatcgaccccctcgacgtcatttatgggatctctttacagggactgcacaaccagctccttaactcaaacttagatccttctgaagtggaaaaggccaaagaggggcagaaggccgacttccccgccggtattcctgagtgtggtactgatgcactgaggtttgggctctgcgcctatatgtcacaggggcgcgacatcaacctcgacgtaaatcgcatcctgggataccgacatttctgtaacaaactgtggaacgctaccaagttcgccttgcgcgggctgggtaagggattcgtgccatcccccacttctcagcccggggggcatgaatcactggtggatcgatggatacgttcaagactaactgaagccgtgcggctgtccaatcagggctttcaggcttacgacttccctgccgtgacgacagcccagtacagcttctggctctacgagctatgcgatgtatacctggaatgcttaaagccagtgctcaatggcgtcgatcaggtggcggccgaatgcgcccgacaaactttgtacacctgtctggacgttggactgaggctgctgagccctttcatgccttttgtgacagaggaactctttcagagactgccaagacgaatgccgcaggcccccccttcactgtgcgtgaccccgtatccagaaccctccgagtgttcttggaaggacccagaggctgaggccgcattagaactggccctttcaattacacgcgctgttaggtctctgagggccgactataatctgacaaggattcgacccgactgctttcttgaagtagccgacgaagccactggggccctagccagcgccgtgtcaggttacgtgcaggcactggctagcgccggcgttgtggccgtcctggcgctgggagcaccggccccgcaggggtgcgctgtggcgctagcttccgatagatgtagtatacatctacagttgcagggcctggttgatccagctagagagctgggcaagctacaggccaagagggtggaagcccaacgccaggcgcagaggctgagagagcgcagggcagcctccggatatccggtgaaagttcctctggaggtgcaggaggcggatgaagcaaagttgcagcaaactgaagcggaactgcgcaaggttgatgaggccatcgccctatttcagaagatgttgtag

SEQ ID NO: 163623 - DNA, 525 bp, Artificial Sequence
  derived and/or modified sequence
atgtctacactctatgtctccccccatccagatgccttcccgtcactgagggctcttatcgccgcacggtacggggaggctggggagggacctggctggggtggcgcacatcctaggatctgtttacagcctccccccacgagtcgtacgccctttcccccacctcgcctgccagccctcgagcagggtcccggggggctgtgggtgtggggagcaaccgccgtggcccagctgctgtggccagctggcctgggcgggccaggaggttctagagccgcagtgcttgttcaacagtgggtctcttacgccgatactgagctgattcctgctgcttgcggggcgactcttccagcacttggcctgcgcagctcggctcaggatcctcaggccgtactcggggccctcggccgggccctgtcccccttagaagagtggcttaggctgcacacctatctggcaggagaggcccccaccctcgctgatctcgccgccgtgacagcactgctcctccctttccgatactag

SEQ ID NO: 163624 - DNA, 525 bp, Artificial Sequence
  derived and/or modified sequence
atgtctactctttatgtatctcctcatccagacgcgtttcctagtttgagagctctgatagcagcccggtatggggaagccggcgagggacccgggtggggaggggctcatccacgcatctgtttacaaccacccccaacatcacgcacccccttcccccccccgaggctacctgctctggagcagggaccaggcggcttgtgggtctggggggccactgcagtggcccagctgctgtggccagccggtctgggggggccgggagggtcacgggccgcagtgctcgtgcagcaatgggtaagctacgcagacaccgaactcattcccgcggcatgcggtgccacacttcccgcacttgggctgcgatccagcgcgcaagacccacaggctgtgctgggagccctgggccgggcactgagcccccttgaggagtggttgcgcctccacacttacctggcaggtgaagcaccaacccttgcggacctggcagccgttactgctcttttgcttccctttagatattag

SEQ ID NO: 163625 - DNA, 3795 bp, Artificial Sequence
  derived and/or modified sequence
atgtctacactgtacgtatcgcctcatcccgatgcattcccaagtctgagggcactgatcgcagctcgctatggtgaagccggggaaggccctgggtgggggggcgcccacccacgcatctgtttacagcctccaccgacttcccgtacaagcttccctcctcctaggctacctgctcttgagcaggggcctgggggcttgtgggtctggggcgccaccgcggtggcgcaactgctgtggccggccgggctgggggggccaggaggaagtcgcgcagcagtgctggttcagcagtgggtgtcatacgccgataccgagctcattcccgctgcctgtggtgctaccttaccagccctaggactgcgttcatctgcccaagacccacaggccgtcctcggcgctttgggacgtgccctcagccccttggaagaatggctgagactccatacctatctcgccggggaggctccgactctggctgacctggccgccgtcactgcactgctactgccgtttcgctacgtgttggacccacctgcgcgtcgaatctggaataatgtgacaagatggttcgtgacctgtgtgcggcagccggagtttcgtgcagtgttgggcgaggttgttctatactcaggtgctcgtcccctgtctcaccagcccggccctgaggcgccagcactgcctaagacagccgcccaactgaagaaagaggcaaagaaacgggaaaaactcgagaaattccagcaaaagcagaaaattcagcagcagcaaccaccccctggtgagaaaaaacccaagccagaaaagagggaaaaaagggaccctggggtaataacatatgacctgcccacgccacctggcgagaagaaggatgtgagcggccccatgcccgattcctattccccccggtatgtcgaggctgcctggtacccctggtgggaacaacagggattcttcaagccagaatatgggcgccccaatgtctcagctgctaatccaaggggggtcttcatgatgtgcattcctccaccgaatgtcacagggtctctccacttgggacatgctctgaccaatgctatccaagattcattgacacgatggcataggatgcgtggcgaaaccaccctgtggaacccaggctgcgaccatgctgggatagctactcaggtcgtggtggagaaaaaattatggcgtgagcagggcctttctcgccaccagctcggccgggaagccttcctccaagaagtctggaagtggaaagaggaaaaaggagaccgcatctaccaccaattaaagaagctggggagctctttggactgggaccgcgcctgttttacgatggatcccaagctctctgctgccgtaactgaggccttcgtgcgcctccatgaagaaggtattatttatcgctctactagactggtgaattggtcctgcaccctgaattcagcaatctctgatattgaagtggacaaaaaggagcttaccggtcgtacccttctgagcgttccaggatataaggagaaggtagagtttggcgtcctcgtgagctttgcttacaaggtgcaggggtccgactcagatgaggaagtcgtggtggctaccacccggattgagactatgttaggcgatgtcgcagtggccgtacaccccaaggacaccaggtatcagcacctcaagggtaagaacgtcattcaccccttcctgagcagaagcctccctatcgtgtttgacgagtttgtggacatggacttcggcaccggtgccgtgaagattactccggcacatgatcaaaatgactacgaggtgggtcaacgccatggactggaagcaatttcaatcatggacagtaggggggcgttgataaacgtgcctccgccgtttctgggccttccccgatttgaggcacggaaggccgtactggtcgccctcaaggagaggggtcttttcagaggtattgaggacaatcccatggttgttcccctgtgcaatcgttcaaaggacgtggtcgagccactgttgagaccgcagtggtatgtccggtgcggtgaaatggctcaggcggccagtgcagccgtcacaagaggggacttacggatactgcccgaggcccaccaacgtacatggcatgcctggatggacaatatccgagagtggtgcatctcccgccagctatggtggggtcatcgtattccggcctactttgtgacagtatccgatccagcagtcccgccaggcgaggatcctgacggtaggtattgggtcagtggtagaaacgaggccgaggcccgcgaaaaagccgccaaggagttcggggtctcacccgacaagatcagcctccaacaggacgaggacgtgctggacacctggttttcttctggtctgtttcccttatctatacttggttggccaaaccagtccgaggacttgagtgtgttttaccccgggacactcttggagaccggccatgacatactttttttctgggttgctaggatggtgatgctgggactgaaacttaccgggcgcctcccctttcgggaggtgtatttgcacgcaatcgtaagggacgcccacggccgcaaaatgtccaagtctctcggaaacgtgattgaccccctggatgtgatctatggcatttccctgcagggactgcacaaccagctgctcaacagcaatctcgatccatccgaagtggagaaagccaaggaaggtcagaaagctgacttcccggcaggcatccctgagtgcggaacagacgcactgcgcttcggactgtgcgcctatatgagccagggtagagacattaacctggatgttaatagaattctcggctatcgccacttctgtaacaaattatggaacgcaactaaatttgcactgcggggcttgggaaaaggattcgtccccagccctaccagccaacccggtggacacgaaagtttggtggataggtggatccgctcaaggttgactgaggccgtgaggctgtcaaatcagggcttccaggcatacgacttccccgctgtgactaccgcgcagtatagtttttggttgtacgagctgtgcgacgtatacctggagtgtttgaaaccagtgttgaatggcgttgaccaggttgcggccgagtgtgcgcggcagactctctacacctgcctagacgtagggttgaggctgttgtccccattcatgcctttcgtgaccgaagaactgttccagcgccttcctagaaggatgccccaggccccgccctcattatgtgtaacaccctatcccgaaccctctgagtgctcctggaaagatccagaagctgaggccgctcttgaactagccctcagcattactagagctgtgaggtcactgcgcgctgactacaacctcacaaggatcagacccgactgcttcctggaagtcgccgacgaagccaccggcgcacttgcaagcgccgtgagtgggtatgtccaggcattagcttctgccggagtggtcgctgtcctagcactcggagcccccgccccccaaggatgcgccgtggcccttgcttcagataggtgttctattcatttgcagctgcagggcctcgttgaccccgccagggagttgggcaaactgcaggctaaacgagtagaagcccaaaggcaggcacagagactccgagaaaggcgggccgcctctggttacccagtcaaagtgccgctggaggttcaagaggccgacgaggctaagctgcaacaaactgaggcggaattgaggaaggtggatgaggcaatcgccctctttcagaagatgctgtag

SEQ ID NO: 163626 - DNA, 525 bp, Artificial Sequence
  derived and/or modified sequence
atgtctaccctgtacgtttctcctcaccctgacgccttcccaagtcttcgtgccttaattgccgctcggtatggggaggctggggaaggccccggctggggcggagcacacccacgcatctgtcttcagcccccaccgacctcacgaaccccgtttccccctccaagattgccagctctggagcaaggcccaggcggcctgtgggtgtggggcgctaccgctgtagcccagcttctgtggccagccgggctgggggggcctggcggcagcagggccgcagtactcgtacagcagtgggtttcgtacgccgacactgagctgataccagccgcctgtggagcaacgttaccggcattgggacttcgtagttccgcccaggatccccaggcagtcttaggtgctctcgggagggccctctcccctctggaagagtggttacgccttcatacctatctggccggtgaggcccctacgctggccgacctcgcggctgtgacggcactactccttccttttcgatattag

SEQ ID NO: 163627 - DNA, 894 bp, Artificial Sequence
  derived and/or modified sequence
atgcccgattcttatagcccacgttatgtggaggctgcctggtatccctggtgggagcagcagggcttttttaagccggaatatggtaggcccaatgtaagcgctgctaacccgcgtggagtgtttatgatgtgtatcccaccacccaacgtgacaggctcactacatctcggccacgcactaactaacgccatacaagattctctgaccaggtggcatcggatgcggggggagacaactctatggaaccctggctgcgaccacgccggtatcgctacgcaggttgtggtcgagaaaaagctctggcgagaacagggcctgagcagacaccagttagggcgcgaagcgtttttgcaggaggtttggaagtggaaggaggagaagggagataggatttaccatcagttgaagaaactcggcagcagtctcgactgggatagggcgtgtttcaccatggaccccaagttgtccgcagctgtgacagaggccttcgtgagactgcacgaggaaggaattatttacaggtcgacacggcttgtaaactggagctgtactctcaactctgccatctccgatatcgaggttgacaagaaagagctgactgggcggaccttgctgtccgtcccagggtataaagagaaagtggagttcggagttctcgtgagttttgcctacaaagtccaggggtccgattcagatgaagaagtagtagttgccacaacacgcattgaaactatgcttggtgatgtggccgttgctgttcaccccaaggatacaagatatcagcatctgaaggggaagaatgtcattcacccttttctgagcaggagcctcccgatcgttttcgacgaatttgtcgatatggactttggcaccgggcccgcccaggtatag

SEQ ID NO: 163628 - DNA, 288 bp, Artificial Sequence
  derived and/or modified sequence
tagccagcaggtcttggcgggccagggggctctcgtgccgccgttctcgtccagcagtgggtctcatacgctgatactgaactaattcccgctgcctgtggcgctaccctcccggcgctaggccttaggtccagcgcgcaggacccgcaggccgtgctgggggccctaggcagagccctaagtcctttggaggagtggttacggctccacacatatctagcgggcgaggctccgactctcgccgaccttgcagcggtgacagcgcttctgctcccctttaggtattag

SEQ ID NO: 163629 - DNA, 3795 bp, Artificial Sequence
  derived and/or modified sequence
atgtccactctatatgtgagtcctcaccccgacgcattccccagtctacgggctctgatcgctgcacggtatggcgaagcaggagaaggaccgggttggggtggagcccatccacgaatctgccttcagcccccccccactagtaggaccccgttccctccaccgcgcttgcctgctctggaacagggcccaggaggcctgtgggtatggggggcaacagcggtagctcagctactgtggccggcagggctagggggccctggcggctccagagctgcagtcctcgtgcagcagtgggttagctatgctgacacggagctcatcccggcagcatgcggagcaaccctgcccgccttagggttgaggtccagtgcacaggaccctcaggccgttctgggcgctcttggcagggctttgagcccgttggaggaatggctgcgtcttcacacctatctggccggtgaagctccaacgctcgccgatcttgctgccgtcacagccttgttgctacctttcaggtatgtcctggaccctcctgcgaggcgcatctggaacaatgtgactcgctggttcgtgacttgtgtgaggcagcccgagttccgagcagtcctcggagaagtggtgctctattcaggggcccgcccgctgagccatcagcccggccccgaagcaccggccctgccaaagacagccgcacagctgaagaaggaagccaaaaagagagaaaagctggaaaagttccaacagaaacagaagatacagcagcagcagcctcctcctggagaaaagaaacctaagcccgaaaaacgggagaaacgggaccctggtgtgattacgtatgacctcccaacccccccaggcgagaaaaaggacgtgagcgggcccatgccagactcctatagtccccggtatgtagaagccgcatggtacccttggtgggagcagcaggggttttttaagcccgaatatgggaggcctaacgtgtcagcggctaacccccgcggggtctttatgatgtgtattccacccccaaacgtgacaggtagcctgcatctgggtcatgctctgaccaacgccatccaggacagtttgactcgctggcatagaatgaggggcgagacaactctttggaatccggggtgtgatcacgccgggatcgcaacacaggtggttgtggaaaagaagctgtggagagagcaaggtctcagcaggcaccagctaggaagagaagcatttctgcaggaagtgtggaaatggaaagaggaaaaaggtgataggatctaccatcaactcaagaaacttggctcctctctggattgggaccgcgcttgcttcaccatggatcctaaattgtccgccgcggtcaccgaggcgtttgttcgccttcacgaagagggaattatatatcgatcaacaaggctggtcaactggtcctgtaccctcaacagtgctatcagtgacatcgaagtagacaaaaaggaacttaccggacggaccctgctctccgtgcccggatataaggaaaaagtcgagtttggagtgcttgtgagtttcgcctacaaagttcagggctccgattctgacgaagaggtggtggttgccaccacgagaatagaaacaatgctcggtgacgttgctgtggctgtccatcccaaggatacgcgttatcagcacctgaaaggcaaaaacgttatacatccgttcttgtctagaagcctgcctattgtgttcgacgaatttgtagacatggactttggaaccggggccgtcaagattacgcccgctcacgatcagaacgactacgaggtgggacagcgtcatggacttgaagctatctccataatggatagccgtggggcacttatcaacgtcccaccaccttttctcggtctgccccggttcgaggctcgtaaagcagttctcgtcgctcttaaggagcggggcctatttagaggcatcgaagacaatccgatggtggttccactgtgcaacagatcaaaggacgtggtggagcctctgctgcgtcctcagtggtatgttcggtgcggcgagatggctcaagccgcatccgcagccgtgactcgcggtgaccttcgtatcctgcccgaggcccatcaaaggacctggcacgcgtggatggataatattagggaatggtgcatcagcaggcagctgtggtggggacaccggatccccgcatatttcgtcacagtgtctgaccctgccgtgcctcctggagaggatcccgacggaaggtattgggtttcagggagaaacgaggcggaggctagagaaaaagccgcgaaggaattcggagtctctccagacaaaatcagtctgcaacaggatgaagacgttctggatacgtggttctcttcaggcctttttccactgtccatcctcggctggcccaaccagtccgaggatctgagcgtcttctatcccggcactctcctggagactggacatgatatcctgttcttctgggtggcaaggatggtgatgctcggtctaaagctgactgggagactgccctttagagaggtgtaccttcatgccatcgttagagatgcccatggtcgaaagatgtctaaatctctagggaatgtgattgaccccctggacgttatttacggcatcagtctgcagggcctccacaaccagctgctgaattctaacttggaccccagtgaggtcgaaaaggcaaaagaaggccagaaggccgactttccggccggaattcctgaatgcggcacagatgcgctccgcttcggcctgtgcgcctatatgtcccaaggacgcgacattaacctggatgtgaaccgtattttagggtatcgccatttttgtaacaagctctggaacgcaaccaagttcgcgttgcgggggctggggaaagggttcgtgccttcgccaacttcccaacctggcggccacgaatcactggtggaccggtggatcagaagccgtctgacagaggcagtccggctgtcaaaccaggggttccaggcgtatgactttcccgccgttacaactgctcagtacagcttctggttatacgagctatgcgatgtgtatctggagtgcctgaaacccgtacttaatggagtcgaccaggtcgcagccgaatgtgcaagacagaccctgtacacctgcctggatgtggggttgaggctgttaagccccttcatgccttttgtgactgaggagctgtttcagcgtctgccccgtcgaatgcctcaggctcctcctagtttgtgcgttactccgtaccctgaaccctccgaatgcagctggaaggacccagaagctgaggccgccctggagctggccctttctattacccgcgccgttcgatcattgagggctgattataatctcactaggataaggcccgattgctttctggaggtcgccgatgaggctactggagcacttgcatcagctgtgtccggctatgtgcaggcactcgcgagcgctggggttgtggcagtgctggccttaggcgcacctgctccccaaggttgtgcagtagctttagcttcagaccggtgttcaatccacctccagctgcagggactggttgacccagcaagggaacttgggaagttgcaggccaaacgcgtggaggcccaaaggcaggcccaaaggctgagagagaggcgagccgcatctggctaccctgtgaaggtgccactcgaggtccaggaagccgatgaagctaaattacagcagacagaagctgagctccgcaaagtggatgaagctatcgccctgttccagaagatgttatag

SEQ ID NO: 163630 - DNA, 894 bp, Artificial Sequence
  derived and/or modified sequence
atgcctgattcctatagtccccgatatgtcgaggcagcttggtacccgtggtgggagcaacagggcttttttaagccggaatacggcagaccgaacgtgagcgcagctaatccacgaggagtgttcatgatgtgcattcccccccctaatgtcacaggttccctacatcttggccatgcactcactaacgcaatacaggatagcctgacacgctggcacagaatgaggggcgaaacgactctgtggaacccagggtgcgatcacgcgggcatcgcaacacaagtagtcgttgaaaagaagctctggcgcgagcaggggctgagtcggcaccagctcggtagagaggctttcctccaggaggtttggaagtggaaggaagagaaaggagatcgaatctaccaccagctgaagaaactaggctcttccctggactgggacagagcttgttttactatggatcccaaactttcagcagctgttaccgaggcatttgtacggctacacgaggaggggatcatctacagaagcacgagactggtcaactggagctgtacactgaattctgccattagtgacattgaggtggataaaaaggaactcacaggcagaacgctcctgtccgtgccagggtacaaagagaaagttgaattcggagtgctggtttctttcgcttacaaagtgcaggggtcggactccgatgaagaagtcgtggtggccaccaccagaattgagaccatgctgggagacgtggcagtcgccgttcatcctaaggacacccggtaccagcacttgaaagggaagaacgtcatccacccgtttctgagtagatccctccctatagtgttcgacgagttcgtagacatggactttggcacagggccggcgcaggtctag

SEQ ID NO: 163631 - DNA, 894 bp, Artificial Sequence
  derived and/or modified sequence
atgcctgattcctacagtcctaggtatgtggaagccgcatggtacccgtggtgggaacagcagggcttttttaagcctgaatacggacgacctaacgtgagcgccgccaatccaagaggagtgttcatgatgtgcattccaccaccaaacgtcacagggtcactgcaccttgggcatgctcttacaaacgccatacaagactctttgacccgctggcaccgtatgcgaggcgagacaacactctggaaccctgggtgcgatcatgctgggatcgccacccaggtggttgtcgagaagaaactctggcgggagcaaggactgtcaagacatcaacttgggagggaggctttcttacaagaggtctggaaatggaaggaagaaaagggcgaccgtatttatcatcaactaaagaaactgggttcaagcctagactgggatagggcgtgttttactatggatccgaagctcagtgccgccgttactgaggcctttgtgaggttacatgaggaggggatcatctaccgtagcacccgcctcgttaattggtcatgcaccctgaacagtgccatctcggatatcgaggttgataagaaagaactcactggtagaacgctcctttctgtccccggctataaagaaaaggtggaattcggagtccttgtatcgtttgcttataaggtgcaggggtctgactccgacgaagaggttgtggtcgccacgactagaatagagaccatgctcggggacgttgccgtggcggttcatccaaaggacacgcgataccagcacctgaaaggaaaaaacgtgattcacccctttctgagcaggtcactgcccattgtcttcgacgaattcgtcgatatggattttgggacagggcccgcccaggtgtag

SEQ ID NO: 163632 - DNA, 894 bp, Artificial Sequence
  derived and/or modified sequence
atgcccgacagctactctccccggtatgtcgaggctgcatggtatccttggtgggaacaacaagggttctttaagccggagtacgggcgcccaaatgtatcggcagccaatccacgcggcgtgtttatgatgtgcatacccccccctaatgtgaccggcagcttacaccttggacacgcgctgactaacgcgattcaggactccttgacaagatggcatagaatgagaggcgagacgaccctgtggaaccccggatgtgaccacgcaggcatcgctacccaggtcgttgtggagaaaaagctctggcgggagcagggactgagtaggcatcagctaggccgagaagcttttctgcaggaggtttggaaatggaaggaagaaaagggggatagaatataccaccagttaaagaagttgggtagtagcctggactgggatcgggcctgcttcacaatggacccgaaactcagtgctgctgtgactgaagctttcgtaaggctacatgaggaaggcattatttaccgctctactagattggtgaattggagctgcacactcaacagcgcaatctccgatattgaggtcgataagaaagaactgacagggcggacactcttaagcgttccgggctacaaggaaaaagttgagtttggagtcctagtctctttcgcctataaggtgcaggggtctgacagcgacgaggaagttgtagttgccaccactcgcattgaaactatgctcggtgacgtggctgtggctgtgcatcctaaagatactaggtaccagcacttgaaaggtaaaaacgtcattcatcctttcctcagccgtagtctgcccatcgtcttcgatgagttcgtggacatggactttggaacgggcccagcccaggtgtag

SEQ ID NO: 163633 - DNA, 894 bp, Artificial Sequence
  derived and/or modified sequence
atgcccgattcctattcaccacggtacgtggaggccgcttggtacccatggtgggaacaacaaggcttctttaagcccgagtatggtcggcccaacgttagcgccgccaacccaagaggcgttttcatgatgtgcattcccccccccaatgtgaccggcagcttgcacctgggccacgcactcaccaacgcgatacaggattctctcacacgctggcacagaatgcggggcgaaactactctttggaacccaggctgtgaccacgccggtattgccacccaggttgtggtggaaaaaaaactgtggagagagcagggcctttctagacaccagctgggtagagaagctttcctgcaggaggtctggaagtggaaggaagagaagggagatcggatttaccatcagctgaagaaactggggagttcactcgattgggaccgagcctgtttcaccatggatcctaagcttagtgcagccgttacagaggccttcgtcaggctacacgaggaagggattatctaccgttctactaggctggttaattggtcctgcaccttgaatagcgctatcagcgatattgaggtggacaaaaaagagctgacgggacggacgctgctcagcgtgcctggctataaagagaaggttgaattcggtgtactcgtctcgttcgcttataaggtccagggctccgactccgacgaggaggtcgtcgtagccaccactcgtatcgaaactatgctgggggacgtggccgttgccgtgcacccaaaggataccaggtaccagcacctgaagggcaaaaacgtaattcacccatttctgtctcgaagcctcccaattgtgttcgacgagttcgtcgacatggattttgggacagggcctgcgcaggtatag

SEQ ID NO: 163634 - DNA, 525 bp, Artificial Sequence
  derived and/or modified sequence
atgagcaccctgtatgtgagcccccacccagatgccttccccagcctgcgggccctgattgctgcccgctacggggaggccggggagggccctggctggggcggggcccacccccgcatctgcctgcagcccccacccaccagcaggaccagcttccccccaccccggctgcctgccctggagcagggccctgggggcctgtgggtgtggggcgccacagctgtggcccagctgctgtggccagctggcctgggcggccctgggggcagcagagctgctgtgctggtgcagcagtgggtgtcctatgctgacacagagctgatcccagctgcctgtggggccaccctgcctgccctgggcctgcggagcagcgcccaggacccccaggccgtgctgggcgccctgggccgggccctgagccccctggaggagtggctgcggctgcacacctacctggccggggaggcccccaccctggccgacctggccgctgtgacagccctgctgctgcccttccgctactag

SEQ ID NO: 163635 - DNA, 3795 bp, Artificial Sequence
  derived and/or modified sequence
atgagcaccctgtatgtgagcccccacccagatgccttccccagcctgcgggccctgattgctgcccgctacggggaggccggggagggccctggctggggcggggcccacccccgcatctgcctgcagcccccacccaccagcaggaccagcttccccccaccccggctgcctgccctggagcagggccctgggggcctgtgggtgtggggcgccacagctgtggcccagctgctgtggccagctggcctgggcggccctgggggcagcagagctgctgtgctggtgcagcagtgggtgtcctatgctgacacagagctgatcccagctgcctgtggggccaccctgcctgccctgggcctgcggagcagcgcccaggacccccaggccgtgctgggcgccctgggccgggccctgagccccctggaggagtggctgcggctgcacacctacctggccggggaggcccccaccctggccgacctggccgctgtgacagccctgctgctgcccttccgctacgtgctggaccccccagcccggcgcatctggaacaacgtgacccgctggtttgtgacctgtgtgcggcagcctgagttccgggctgtgctgggggaggtggtgctgtacagcggggcccggcccctgagccaccagcccggccctgaggccccagccctgcccaagacagctgcccagctgaagaaggaggccaagaagcgggagaagctggagaagttccagcagaagcagaagatccagcagcagcagcccccacctggagagaagaagcccaagccagagaagcgggagaagagggaccccggggtcatcacctatgacctgcccaccccacctggagagaagaaggatgtgtctggccccatgccagacagctacagcccccgctacgtggaggccgcctggtacccctggtgggagcagcagggcttcttcaagccagaatatggccggcccaacgtgtctgctgccaacccccggggcgtcttcatgatgtgcatccccccaccaaatgtgacaggcagcctgcacctgggccacgccctgaccaatgccatccaggacagcctgacccgctggcacaggatgagaggagagaccaccctgtggaaccctggctgtgaccacgccggcatcgccacccaggtggtggtggagaagaagctgtggagggagcagggcctgagccgccaccagctgggccgggaggccttcctgcaggaggtgtggaagtggaaggaggagaagggggaccgcatctaccaccagctgaagaagctgggcagcagcctggactgggaccgggcctgcttcaccatggaccccaagctgtctgctgctgtgacagaggcctttgtgcggctgcacgaggagggcatcatctaccgcagcacccggctggtgaactggagctgcaccctgaacagcgccatcagtgacatcgaggtggacaagaaggagctgaccggccgcaccctgctgtctgtgcccggctacaaggagaaggtggagtttggagtgctggtgtcctttgcctacaaggtgcagggcagtgacagtgatgaggaggtggtggtggccaccacccgcatcgagaccatgctgggagatgtggccgtggccgtgcaccccaaggacacccgctaccagcacctgaagggcaagaatgtcatccaccccttcctgagccgcagcctgcccatcgtgtttgatgaatttgtggacatggactttggaactggagctgtgaagatcaccccagcccatgaccagaatgactatgaggtgggccagagacatggcctggaggccatcagcatcatggacagcagaggagccctgatcaacgtgcccccacccttcctgggcctgcccaggtttgaggccaggaaggctgtgctggtggccctgaaggagcggggcctcttccggggcatcgaggacaaccccatggtggtgcccctgtgcaacagaagcaaggatgtggtggagcccctgctgcggccccagtggtacgtgcgctgtggggagatggcccaggccgccagcgctgctgtgaccaggggggacctgcgcatcctgcctgaggcccaccagaggacctggcacgcctggatggacaacatccgggagtggtgcatcagccggcagctgtggtggggccaccgcatcccagcctactttgtgacagtgtctgaccctgctgtgcccccaggagaagatcctgatggccgctactgggtgtctggaagaaatgaagctgaggcccgggagaaggccgccaaggagtttggagtgtccccagacaagatcagcctgcagcaggatgaagatgtgctggacacctggttcagcagcggcctcttccccctgagcatcctgggctggcccaaccagagcgaggacctgtctgtgttctacccaggcaccctgctggagactggacatgacatcctcttcttctgggtggccaggatggtgatgctgggcctgaagctgaccggccgcctgcccttccgggaggtgtacctgcacgccatcgtgagagatgcccacggcaggaagatgagcaagagcctgggcaatgtgattgaccccctggatgtgatctacggcatcagcctgcagggcctgcacaaccagctgctgaacagcaacctggaccccagcgaggtggagaaggccaaggagggccagaaggctgacttccctgctggcatcccagaatgtggcacagatgccctgcgcttcggcctgtgtgcctacatgagccagggccgggacatcaacctggatgtgaaccgcatcctgggctaccgccacttctgcaacaagctgtggaatgccaccaagtttgccctgcggggcctgggcaagggctttgtgcccagccccaccagccagcccggcggccacgagagcctggtggaccgctggatccgcagccggctgacagaggccgtgcggctgagcaaccagggcttccaggcctatgacttccctgctgtgaccacagcccagtacagcttctggctgtatgagctgtgtgatgtgtacctggagtgcctgaagcctgtgctgaatggagtggaccaggtggccgcagaatgtgcccggcagaccctgtacacctgcctggatgtgggcctgcggctgctgagccccttcatgccctttgtgacagaggagctgttccagaggctgcccaggaggatgccccaggccccacccagcctgtgtgtgaccccctacccagagcccagcgagtgctcctggaaggaccctgaggccgaggccgccctggagctggccctgagcatcaccagggctgtgcgcagcctgcgggctgactacaacctgacccgcatccggccagactgcttcctggaggtggctgatgaggccactggagccctggccagcgctgtgtctggctacgtgcaggccctggccagcgctggggtggtggccgtgctggccctgggcgccccagccccccagggctgtgctgtggccctggccagtgaccgctgcagcatccacctgcagctgcagggcctggtggaccctgcccgggagctgggcaagctgcaggccaagagggtggaggcccagaggcaggcccagaggctgcgggagaggagagctgccagcggctaccctgtgaaggtgcccctggaggtgcaggaggctgatgaggccaagctgcagcagacagaggccgagctgaggaaggtggatgaggccatcgccctcttccagaagatgctgtag

SEQ ID NO: 163636 - DNA, 1101 bp, Artificial Sequence
  derived and/or modified sequence
atgagcaccctgtatgtgagcccccacccagatgccttccccagcctgcgggccctgattgctgcccgctacggggaggccggggagggccctggctggggcggggcccacccccgcatctgcctgcagcccccacccaccagcaggacccccttccccccaccccggctgcctgccctggagcagggccctgggggcctgtgggtgtggggcgccacagctgtggcccagctgctgtggccagctggcctgggcggccctgggggcagcagagctgctgtgctggtgcagcagtgggtgtcctatgctgacacagagctgatcccagctgcctgtggggccaccctgcctgccctgggcctgcggagcagcgcccaggacccccaggccgtgctgggcgccctgggccgggccctgagccccctggaggagtggctgcggctgcacacctacctggccggggaggcccccaccctggccgacctggccgctgtgacagccctgctgctgcccttccgctacgtgctggaccccccagcccggcgcatctggaacaacgtgacccgctggtttgtgacctgtgtgcggcagcctgagttccgggctgtgctgggggaggtggtgctgtacagcggggcccggcccctgagccaccagcccggccctgaggccccagccctgcccaagacagctgcccagctgaagaaggaggccaagaagcgggagaagctggagaagttccagcagaagcagaagatccagcagcagcagcccccacctggagagaagaagcccaagccagagaagcgggagaagagggaccccggggtcatcacctatgacctgcccaccccacctggagagaagaaggatgtgtctggccccatgccagacagctacagcccccgctacgtggaggccgcctggtacccctggtgggagcagcagggcttcttcaagccagaatatggccggcccaacgtgtctgctgccaacccccggggcgtcttcatgatgtgcatccccccaccaaatgtgacaggcagcctgcacctgggccacgccctgaccaatgccatccaggacagcctgaccaggtag

SEQ ID NO: 163637 - DNA, 525 bp, Artificial Sequence
  derived and/or modified sequence
atgagcaccctgtatgtgagcccccacccagatgccttccccagcctgcgggccctgattgctgcccgctacggggaggccggggagggccctggctggggcggggcccacccccgcatctgcctgcagcccccacccaccagcaggacccccttccccccaccccggctgcctgccctggagcagggccctgggggcctgtgggtgtggggcgccacagctgtggcccagctgctgtggccagctggcctgggcggccctgggggcagcagagctgctgtgctggtgcagcagtgggtgtcctatgctgacacagagctgatcccagctgcctgtggggccaccctgcctgccctgggcctgcggagcagcgcccaggacccccaggccgtgctgggcgccctgggccgggccctgagccccctggaggagtggctgcggctgcacacctacctggccggggaggcccccaccctggccgacctggccgctgtgacagccctgctgctgcccttccgctactag

SEQ ID NO: 163638 - DNA, 3552 bp, Artificial Sequence
  derived and/or modified sequence
tgaggactgggcggccctgggggcagcagagctgctgtgctggtgcagcagtgggtgtcctatgctgacacagagctgatcccagctgcctgtggggccaccctgcctgccctgggcctgcggagcagcgcccaggacccccaggccgtgctgggcgccctgggccgggccctgagccccctggaggagtggctgcggctgcacacctacctggccggggaggcccccaccctggccgacctggccgctgtgacagccctgctgctgcccttccgctacgtgctggaccccccagcccggcgcatctggaacaacgtgacccgctggtttgtgacctgtgtgcggcagcctgagttccgggctgtgctgggggaggtggtgctgtacagcggggcccggcccctgagccaccagcccggccctgaggccccagccctgcccaagacagctgcccagctgaagaaggaggccaagaagcgggagaagctggagaagttccagcagaagcagaagatccagcagcagcagcccccacctggagagaagaagcccaagccagagaagcgggagaagagggaccccggggtcatcacctatgacctgcccaccccacctggagagaagaaggatgtgtctggccccatgccagacagctacagccccaggtatgtggaggccgcctggtacccctggtgggagcagcagggcttcttcaagccagaatatggccggcccaacgtgtctgctgccaacccccggggcgtcttcatgatgtgcatccccccacccaacgtgacaggcagcctgcacctgggccacgccctgaccaatgccatccaggacagcctgacccgctggcacaggatgagaggagagaccaccctgtggaaccctggctgtgaccatgctggcatcgccacccaggtggtggtggagaagaagctgtggagggagcagggcctgagccgccaccagctgggccgggaggccttcctgcaggaggtgtggaagtggaaggaggagaagggggaccgcatctaccaccagctgaagaagctgggcagcagcctggactgggaccgggcctgcttcaccatggaccccaagctgtctgctgctgtgacagaggcctttgtgcggctgcacgaggagggcatcatctaccgcagcacccggctggtgaactggagctgcaccctgaacagcgccatcagtgacatcgaggtggacaagaaggagctgactggaagaaccctgctgtctgtgcccggctacaaggagaaggtggagtttggagtgctggtgtcctttgcctacaaggtgcagggcagtgacagtgatgaggaggtggtggtggccaccaccagaattgagaccatgctgggagatgtggccgtggccgtgcaccccaaggacacccgctaccagcacctgaagggcaagaatgtcatccaccccttcctgagccgcagcctgcccatcgtgtttgatgaatttgtggacatggactttggcaccggggctgtgaagatcaccccagcccatgaccagaatgactatgaggtgggccagagacatggcctggaggccatcagcatcatggacagcagaggagccctgatcaacgtgcccccacccttcctgggcctgcccaggtttgaggccaggaaggctgtgctggtggccctgaaggagcggggcctcttccggggcatcgaggacaaccccatggtggtgcccctgtgcaacagaagcaaggatgtggtggagcccctgctgcggccccagtggtacgtgcgctgtggggagatggcccaggccgccagcgctgctgtgaccaggggggacctgcgcatcctgcctgaggcccaccagaggacctggcacgcctggatggacaacatccgggagtggtgcatcagccggcagctgtggtggggccaccgcatcccagcctactttgtgacagtgtctgaccctgctgtgcccccaggagaggaccctgatggccgctactgggtgtctggaagaaatgaggccgaggcccgggagaaggccgccaaggagtttggagtgtccccagacaagatcagcctgcagcaggatgaagatgtgctggacacctggttcagcagcggcctcttccccctgagcatcctgggctggcccaaccagagcgaggacctgagcgtcttctacccaggcaccctgctggagaccggccatgacatcctcttcttctgggtggccaggatggtgatgctgggcctgaagctgaccggccgcctgcccttccgggaggtgtacctgcacgccatcgtgagagatgcccacggcaggaagatgagcaagagcctgggcaatgtcatcgaccccctggatgtgatctacggcatcagcctgcagggcctgcacaaccagctgctgaacagcaacctggaccccagcgaggtggagaaggccaaggagggccagaaggctgacttccctgctggcatcccagaatgtggcacagatgccctgcgcttcggcctgtgtgcctacatgagccagggccgggacatcaacctggatgtgaaccgcatcctgggctaccgccacttctgcaacaagctgtggaatgccaccaagtttgccctgcggggcctgggcaaaggatttgtgcccagccccaccagccagcccggcggccacgagagcctggtggaccgctggatccgcagccggctgacagaagctgtgcggctgagcaaccagggcttccaggcctatgacttccctgctgtgaccacagcccagtacagcttctggctgtatgagctgtgtgatgtgtacctggagtgcctgaagcctgtgctgaatggagtggaccaggtggccgcagaatgtgcccggcagaccctgtacacctgcctggatgtgggcctgcggctgctgagccccttcatgccctttgtgacagaggagctgttccagaggctgcccaggaggatgccccaggccccacccagcctgtgtgtgaccccctacccagagcccagtgaatgttcctggaaggaccctgaggccgaggccgccctggagctggccctgagcatcaccagggctgtgcgcagcctgcgggctgactacaacctgacccgcatccggccagactgcttcctggaggtggctgatgaggccaccggggccctggccagcgctgtgtctggctacgtgcaggccctggccagcgctggggtggtggccgtgctggccctgggcgccccagccccccagggctgtgctgtggccctggccagtgaccgctgcagcatccacctgcagctgcagggcctggtggaccctgcccgggagctgggcaagctgcaggccaagagggtggaggcccagaggcaggcccagaggctgcgggagcggcgggccgccagcggctaccctgtgaaggtgcccctggaggtgcaggaggctgatgaggccaagctgcagcagacagaagctgagctgaggaaggtggatgaggccatcgccctcttccagaagatgctgtag

SEQ ID NO: 163639 - DNA, 894 bp, Artificial Sequence
  derived and/or modified sequence
atgccagacagctacagccccaggtatgtggaggccgcctggtacccctggtgggagcagcagggcttcttcaagccagaatatggccggcccaacgtgtctgctgccaacccccggggcgtcttcatgatgtgcatccccccacccaacgtgacaggcagcctgcacctgggccacgccctgaccaatgccatccaggacagcctgacccgctggcacaggatgagaggagagaccaccctgtggaaccctggctgtgaccatgctggcatcgccacccaggtggtggtggagaagaagctgtggagggagcagggcctgagccgccaccagctgggccgggaggccttcctgcaggaggtgtggaagtggaaggaggagaagggggaccgcatctaccaccagctgaagaagctgggcagcagcctggactgggaccgggcctgcttcaccatggaccccaagctgtctgctgctgtgacagaggcctttgtgcggctgcacgaggagggcatcatctaccgcagcacccggctggtgaactggagctgcaccctgaacagcgccatcagtgacatcgaggtggacaagaaggagctgactggaagaaccctgctgtctgtgcccggctacaaggagaaggtggagtttggagtgctggtgtcctttgcctacaaggtgcagggcagtgacagtgatgaggaggtggtggtggccaccaccagaattgagaccatgctgggagatgtggccgtggccgtgcaccccaaggacacccgctaccagcacctgaagggcaagaatgtcatccaccccttcctgagccgcagcctgcccatcgtgtttgatgaatttgtggacatggactttggcaccggccctgcccaggtgtag

SEQ ID NO: 163640 - DNA, 288 bp, Artificial Sequence
  derived and/or modified sequence
tgaccagctggcctgggcggccctgggggcagcagagctgctgtgctggtgcagcagtgggtgtcctatgctgacacagagctgatcccagctgcctgtggggccaccctgcctgccctgggcctgcggagcagcgcccaggacccccaggccgtgctgggcgccctgggccgggccctgagccccctggaggagtggctgcggctgcacacctacctggccggggaggcccccaccctggccgacctggccgctgtgacagccctgctgctgcccttccgctactag

SEQ ID NO: 163641 - DNA, 3795 bp, Artificial Sequence
  derived and/or modified sequence
atgagcaccctgtacgtgagcccccaccccgacgccttccccagccttcgagcactgatcgccgccagatatggcgaagcgggcgagggtccggggtgggggggagcccaccctagaatttgcctccagccccctccaacgtctcgcacacccttccccccccctcgcctcccagccctagagcagggaccgggtggcctttgggtttggggggctaccgccgtcgctcaactcctgtggcccgccggcctcggaggcccaggggggtcgagggcggctgtgctggttcaacagtgggtgagctacgccgacactgagctgatcccggcagcctgtggtgcaaccctccccgccctgggccttcgcagctccgcccaagatcctcaggcagtgctcggcgcactgggcagagccctaagtccccttgaggagtggcttcgtctgcacacgtatcttgccggtgaggcaccgacacttgccgacctggcagctgtcaccgcattgttgctgccatttagatatgtgttggacccaccagcgagacgcatctggaataacgtgaccagatggtttgttacctgcgtgcgtcagccagaattccgcgctgtgctcggcgaggtggtgctgtattccggagcaaggcccttgtcacaccagcccggtcctgaagcccccgctcttcccaaaacggctgctcagctcaagaaagaagcaaagaagcgggagaagttggagaaattccagcagaagcagaaaattcagcagcagcagccaccccccggcgagaagaaaccaaagcctgaaaaaagagagaaacgagaccctggagtgattacctacgacctgccgaccccacccggcgagaagaaggacgtgtccggtccgatgcccgacagctattctcccaggtacgtggaggctgcatggtacccttggtgggaacagcaggggttctttaaaccagagtatggacggcctaacgtgtctgctgcgaatcccaggggagtcttcatgatgtgtattcctcctcctaatgtgactggtagcttacacttgggccacgctctgacaaatgcaatccaggactcactgacaaggtggcataggatgcgaggcgagacaacgttatggaatccaggctgtgaccacgccggaattgctacacaagtggtggtggaaaagaagctgtggcgggaacagggccttagtcggcaccaattgggtcgggaggcatttcttcaagaagtttggaagtggaaggaagagaagggtgatcgcatttatcatcagctgaaaaagctgggaagctctttagattgggatcgcgcctgcttcaccatggatcctaaactcagcgccgctgtaactgaagcatttgtccgacttcacgaggagggcatcatctatagatctacgaggctcgtgaactggagctgcaccctcaattctgcgataagtgacatcgaggtggacaaaaaagagctgaccggcagaacactgctcagtgtgcctggctataaggaaaaggtagagttcggagtgctggtgagctttgcatacaaagtccaagggagcgacagtgatgaggaggtggttgtggctactacaagaattgagaccatgttaggagatgttgccgtcgccgtgcacccgaaggatacacgttatcagcacctgaaagggaagaacgtgatacacccgtttctgagtcggtccctacccatagtattcgacgagtttgtcgatatggactttgggacaggagctgtgaagattacccccgctcacgaccagaacgactatgaggtggggcagcggcacggactcgaagccatctctatcatggatagcagaggggctctgatcaatgtgccgcctccctttttaggcctgccaaggttcgaggctcggaaagctgttctggttgccctgaaggagcgtgggctttttcgtggaatcgaggacaacccgatggttgtccccctttgcaataggtctaaagatgttgtggaaccgcttctccgtccgcagtggtatgtgcgctgcggagagatggcccaggccgcatcagctgcagtgacccgaggcgatcttaggatcttaccggaggcccaccaacgaacctggcacgcatggatggataacattcgcgagtggtgcatctcacgccagctttggtggggacaccgaattcctgcatatttcgtgaccgtctccgatccagccgtccctcctggtgaggatccagacgggcgttactgggtctcaggccgcaatgaggccgaggcgcgagagaaagcagctaaagagtttggggtgagccccgacaaaatctccttacaacaggacgaggacgtcctcgatacatggttcagctccggtctgtttccacttagcattctcggatggcccaatcagtccgaggatctgagtgtgttttacccgggaactctcctagagaccggacatgacatactcttcttttgggtggccagaatggtgatgctgggcctgaaactcactggaagacttccttttcgggaggtctatctgcacgccattgtgcgggatgctcacggtaggaaaatgagcaagagcttgggcaatgtgatcgatccattagacgtgatctatggaatctccctgcaaggcttgcataatcagctgctgaactctaatctggatccatctgaggtggagaaagctaaggaaggacagaaagctgacttccccgctggcattccagaatgcggcacagacgcgctgaggttcgggttatgcgcatacatgagtcagggaagggatattaatctggatgtcaatagaattttaggctaccggcatttctgcaacaagctgtggaatgcgaccaagtttgccctccgcggcctgggtaagggttttgtgccctcgcccacgagccagcctggggggcatgagtcactcgtggatcggtggatcagatcaagactgaccgaagctgttcggttgtccaatcaagggttccaggcctacgattttcccgctgtcaccaccgcacagtactccttctggttgtacgagctctgtgatgtctacctagagtgtcttaagccagtgctcaacggagtggatcaggtggctgcagaatgcgcccgtcagactctgtacacatgtctcgacgttgggctaaggctccttagtccttttatgccatttgttactgaggagctgttccagagactcccccgccggatgccccaggctccgccttctctttgtgtgaccccctaccccgagccttccgaatgctcctggaaggatccggaggctgaagcagctctcgagctggccctgagcatcacgcgggccgtccggtcattaagggccgactacaacctcaccaggattagaccggattgtttcctggaagtagcggatgaggcaactggggctctggcatctgccgtcagcggctatgtgcaggccttggcgagcgccggcgtcgtagctgtgctggctctcggagcccctgcccctcagggctgcgcagtggcactggcctctgatcggtgctcaattcacttgcaacttcaagggctcgtggatccagctcgagagttggggaaactccaagccaagcgggtggaggcacagagacaagcccaacgccttcgcgagagaagggcggccagcggttatcccgttaaagtacctttggaggttcaggaggccgatgaggcgaagttgcagcagacagaggcagagctgaggaaggtcgacgaagctatcgcactgtttcagaagatgctgtag

SEQ ID NO: 163642 - DNA, 525 bp, Artificial Sequence
  derived and/or modified sequence
atgagcaccctgtacgtgagcccccaccccgacgccttccccagcctgcgggccctgatcgccgctcgttacggggaggccggagagggaccagggtggggtggcgcccatccacggatatgtctgcagccgcctccaaccagccgcacctccttcccaccaccacgcttacccgccctggagcagggccctggcggattatgggtatggggggccacagctgtcgcacagttactctggccagctggtctcggaggaccaggcggctcaagggccgcagttctggtgcagcagtgggtgtcttacgccgataccgaactgattccagctgcttgtggagccacactccctgcgttaggactaaggtcgtcggcacaggaccctcaggcagtgctcggggcattaggccgtgccctgagtcccttggaagagtggctcagactccacacatacctggcaggcgaagcaccgactttggccgacttggccgccgttaccgccctgctgctacctttccggtattag

SEQ ID NO: 163643 - DNA, 525 bp, Artificial Sequence
  derived and/or modified sequence
atgagcaccctgtacgtgagcccccaccccgacgccttccccagcctgcgtgccctcattgcagcaaggtatggggaagcgggggagggcccaggatggggcggtgctcaccctcggatatgcctccagcctccgccgactagtaggacatcgtttcccccaccccgcctgccagcccttgaacaggggcccggaggactgtgggtgtggggcgcgacagcagttgctcagctcttatggcccgccggcctgggtggacctggtggaagccgggccgccgtgctggtgcagcagtgggtttcttatgcagatactgagctgatccctgccgcatgcggggctacccttcctgcgctcggtttgagaagcagtgcccaggacccccaggccgttctcggggccctgggtagggctctaagtccactagaggaatggctgcgtttgcatacctatctggctggcgaggctccaactcttgctgatcttgctgccgtcacagcgctcctgcttccctttaggtattag

SEQ ID NO: 163644 - DNA, 3795 bp, Artificial Sequence
  derived and/or modified sequence
atgagcaccctgtacgtgagcccccaccccgacgccttccccagcttgagagcgctcatagcagctcggtacggggaggcgggagagggcccaggatgggggggggctcaccctcggatctgcctgcagccaccccctacatcgaggacgtctttccccccacctcgactgcctgctttggaacagggtcccggtggactatgggtgtggggggccacggctgtggcacaactgttgtggcccgctggcctcggtggaccgggcggatctcgggccgcggtgctcgtgcagcagtgggtgagctatgcggacaccgagctgattccagctgcctgtggggctaccctgccagctctaggacttagatcgtccgcccaggatcctcaagccgttttgggtgcactgggtagagcgctttctcctctcgaagagtggcttcggctgcacacctatttagcaggcgaggctcctacattggccgacctcgcagccgttaccgcccttttgttgccattcaggtacgttcttgacccccctgcccgcagaatctggaataatgttacccgatggtttgtaacttgcgtccgtcagcccgagtttcgggctgtgttaggcgaggtcgtactttacagcggcgctcgccctttgagtcaccaaccaggccctgaagccccagcacttcccaaaactgccgcccagctgaagaaagaagctaaaaaaagggagaagctcgaaaagtttcagcagaaacaaaaaatccagcagcagcagccacctcctggtgaaaaaaagcccaagcctgagaaaagggagaagagggaccccggcgtgatcacatacgatcttcccaccccccctggtgaaaaaaaggatgtgtccggaccgatgccggatagctactcaccacgatacgtcgaggccgcctggtacccttggtgggagcaacaggggttcttcaaacctgagtacggacgcccgaacgtctcggccgccaaccccagaggagtctttatgatgtgcattccgccccctaatgtcactgggtccttgcacctcggccatgcccttaccaacgctatccaagactccctgactcggtggcacagaatgcgcggtgagacaacactttggaatcccgggtgcgaccatgccgggattgcgacacaggttgttgtggagaaaaaactgtggagagaacaagggctttcacggcaccagctggggagggaagcctttttacaggaagtgtggaagtggaaagaagaaaagggtgacaggatttaccatcagttaaaaaaactcgggagttctctggactgggatagagcatgtttcactatggaccccaaactgtctgctgctgtaacagaagcatttgtgaggcttcacgaggaagggatcatttatagatccactaggctggtgaattggagctgcactctgaattctgccatatctgacattgaggttgacaagaaggaactgacaggtcgaacactgctttctgtgcctggttacaaagagaaggtcgagttcggtgttctggtaagctttgcatacaaagtacagggcagcgactctgacgaagaagtggtagtagcaaccacgcggatcgagactatgcttggcgatgttgccgtggctgtgcaccccaaggatacaagataccagcatctaaaggggaagaacgtgattcaccctttcctgtcccggtccttgccgatcgtgtttgatgagttcgtggacatggattttgggaccggggcagtgaaaataacacccgctcacgatcagaatgattatgaagtcggtcagcggcatggactggaagctataagcatcatggactcccggggcgccttgattaacgttccccccccttttctgggtctgcctagattcgaagcccgcaaagccgtccttgtagccttaaaggaaaggggactgttccgcggaattgaagacaatcccatggttgtcccactgtgtaacagatctaaagacgttgtggaaccgttgctcagaccccagtggtatgtgcgctgtggtgaaatggcgcaggcagcctcagcagccgtgacaaggggggacctgcgtatcttacccgaggcacaccagaggacgtggcatgcctggatggataatatccgcgagtggtgtatatcccggcagctatggtggggtcaccgaatcccagcatattttgtcactgtttccgaccctgccgtgcctcctggagaagatccagatggacgttactgggttagtggacgtaatgaggccgaagctcgcgagaaagccgcgaaagaatttggagtgtcccctgataaaatatcactccaacaggatgaggacgtgctggacacatggttctccagcggcctcttcccgctcagcattcttggctggcctaaccagagcgaggatctgtcggtcttttaccccggcaccctcctggagactgggcacgacattctgttcttctgggttgcacggatggtgatgctcggtttaaaacttacaggccgattgcccttccgtgaagtctatctccatgcaatcgtgcgcgacgcccacggaaggaaaatgtcgaagagtttgggtaatgtgattgatcccttggatgtaatctatgggatctcactgcagggccttcataaccagctcctgaactctaatctggatccctctgaagtggagaaggcaaaggaaggccagaaagctgattttccagcgggaattcccgagtgcggcactgacgcattgaggtttggactgtgcgcatacatgtcacagggcagagacatcaatctcgatgttaaccggattctgggttacaggcacttctgcaacaagctttggaatgctactaaatttgcattacgtgggctcggtaaggggtttgtcccttcccctacgagccaacctggaggccacgaatccctggtggatcggtggataaggagtcgactgaccgaggcagttaggctctccaaccagggcttccaggcctatgacttcccggcagtgacgactgcacagtacagcttttggctttacgagctctgcgatgtctacttggaatgcttgaaaccagtactgaacggagtcgatcaagtggctgccgaatgtgcaaggcaaacactgtacacatgccttgatgtcggtctgcgtcttcttagtccttttatgccatttgttactgaagagctgttccagagattgcctagacggatgccacaggctcccccctcactgtgtgtgaccccctatcctgagcctagtgagtgtagttggaaggacccggaggccgaagccgcgctcgaactggcactgtcgattacgcgcgcggttaggtctttgcgtgcggattacaatctgactaggatccgccccgactgttttctggaggtcgccgacgaggctacaggagccctggccagtgcggttagtgggtacgtgcaggctttggccagtgcaggagttgtggcagtccttgctttgggcgccccagcacctcagggctgtgctgtcgctctggctagtgacaggtgcagcatccatctgcagctgcagggcctggtcgatcccgcccgggagctggggaagctccaggcgaagagggtagaagcccagaggcaggcacaaaggctcagagagagaagggccgcctcaggctaccctgtgaaagtgccattggaggttcaggaagcagacgaggccaagctgcagcagactgaagctgagctgcggaaggttgatgaggcaattgcattgtttcagaagatgttgtag

SEQ ID NO: 163645 - DNA, 1101 bp, Artificial Sequence
  derived and/or modified sequence
atgagcaccctgtacgtgagcccccaccccgacgccttccccagccttagggctctaattgccgcaagatacggagaggcaggggaaggacccggctggggaggcgctcatcctcgaatctgtctccagccacctcctacctccagaacaccgtttccacctcctcgactgcctgccctcgagcaggggcctggaggactttgggtgtggggcgcaactgccgttgctcaactgctctggcccgccggactgggcggacccggagggagtcgcgccgctgtgctggttcaacagtgggtgtcctatgctgataccgagcttatccccgccgcctgcggggcgacactgccagccctaggtctgcggtctagtgcgcaggacccacaggcagtcctgggtgcacttgggcgcgccctgtcccccttagaggagtggctgaggctccacacttacctggctggagaggcccctactctggcagacctagctgcagttaccgccctgcttctgccttttcggtatgtgctggatccacctgccaggagaatttggaataatgtcacgcgatggtttgtgacctgtgttcgtcagcctgagttccgagccgtgcttggggaagtcgtgctgtacagcggagccaggcccctgagccaccagcccggccctgaggctcccgcactgcccaagaccgctgcccaactgaagaaggaggcaaagaaaagggagaagctcgaaaagttccagcagaaacagaaaatccaacagcagcagccaccacctggagagaaaaaaccaaaacccgagaagcgggagaaacgtgaccctggtgttatcacttacgatcttcctacaccacccggggaaaagaaagacgtttcaggtcccatgcccgatagttatagcccgcggtacgtggaggcagcctggtacccctggtgggagcaacaaggatttttcaagcccgaatatggccgccccaacgtctcagccgcaaatccaagaggagttttcatgatgtgtattcccccaccgaacgttacaggttcccttcacttaggccacgcactgacgaacgctattcaggatagcctaactcgctag

SEQ ID NO: 163646 - DNA, 525 bp, Artificial Sequence
  derived and/or modified sequence
atgagcaccctgtacgtgagcccccaccccgacgccttccccagcctccgggcacttatcgccgcccgctacggcgaggccggcgaaggccccggctgggggggtgcacatccacggatctgcttacagccaccccctacatcccgcactccatttcccccccctcgactccctgccctggaacagggcccaggcgggctttgggtctggggggcaaccgctgtggcccagcttttatggcccgccggcctgggcgggccaggcggatctagagctgctgtattagttcaacaatgggtgagctatgcggacaccgagctgattcccgcggcttgcggcgctactcttcccgccctcggcctgcgcagcagcgcccaggatccgcaggcagtactgggcgcactgggacgagccctgtccccactggaagagtggctcagactccatacctacctggctggagaggccccgacactcgcggacctcgccgcagtcacggccttactgctccccttccggtactag

SEQ ID NO: 163647 - DNA, 3552 bp, Artificial Sequence
  derived and/or modified sequence
tgaggcctgggcggccccggcggcagccgggccgccgtgctggtgcagcaatgggtgtcatatgccgataccgagctgataccagccgcttgtggcgctaccctgcccgcccttggattgcgttcctctgcacaggacccccaagccgtgcttggggccttgggaagagctctcagtccattagaggagtggctccggctacatacatacttggctggcgaggcacccacgcttgccgacctggctgccgtcacagcgttactgctgccattcagatatgttcttgacccccctgctcgccgtatatggaacaatgtgactcggtggttcgttacctgtgtccggcagccagagttccgcgccgtgctgggggaggtggtgctgtactctggcgcaaggccgctgtcacatcagccaggccccgaagcccccgctctgcctaaaaccgccgctcagctcaagaaagaggccaaaaagcgggagaaactggagaagtttcagcagaagcagaaaattcagcagcagcagccacctcccggggagaaaaagcctaagccagagaagagggagaagcgagacccaggagtgattacctatgatctcccaacaccgccaggcgagaaaaaggacgtgtccggaccaatgcccgactcctattccccacgctatgtcgaggctgcctggtacccatggtgggagcagcagggcttctttaagccagaatacgggaggccaaacgtgagcgcagcaaatccgcgaggcgtctttatgatgtgcattccgcctcctaatgtgactgggagcctgcatctgggacacgctctcacaaatgccatccaagattccctcacccgctggcatagaatgagaggcgagacaacactgtggaatccagggtgtgaccacgccggcattgccacccaggtagtggtcgagaaaaagctttggcgagagcagggcctctccaggcatcagttgggaagggaggcgttcctgcaggaagtgtggaaatggaaagaggaaaaaggtgacaggatttaccatcaactcaaaaagttaggctcgagcctggattgggacagggcctgtttcacaatggatccaaagttgtcagccgctgtaactgaagcttttgtgagactacatgaagagggcatcatctatcgctcaaccaggcttgttaactggtcgtgcactttgaattctgcaatcagcgacattgaggtcgataaaaaagagcttacagggagaaccttactatctgtccctggctacaaagaaaaggtggaatttggcgtcctggtgagctttgcttacaaagttcaaggctcagactctgacgaggaggtagtcgtggcgactactcggatcgaaacaatgctaggcgatgtcgctgtggccgtccaccccaaggatactagatatcagcacttaaaagggaaaaacgttattcacccatttcttagtcgctccctgccaatcgtttttgatgaattcgtcgatatggatttcgggacgggcgctgttaaaataaccccagcccacgaccagaacgattacgaagtgggccagaggcacggactcgaggcgatctcaatcatggacagccggggcgcccttataaacgttcctccaccctttctcggtctgccccgctttgaagcgagaaaggctgtgcttgtggcccttaaggaaagaggcctctttaggggaatagaagataaccccatggtggtgccattgtgtaatagatctaaggacgtcgtggagcctttgctgcggccacaatggtatgtccgctgtggcgaaatggcccaggccgcttctgcggccgtgacaagaggtgacctgcgcatcctcccagaagcgcatcaacgaacctggcatgcctggatggacaacatccgtgagtggtgtatttctcgccagctttggtggggccacagaatccccgcatattttgtgactgtgtctgaccccgctgtgccccccggcgaggaccccgatggtcgctactgggttagcggcagaaacgaagctgaggctagggagaaggccgcaaaggagtttggtgtctctcccgacaagatcagtctgcagcaggatgaggatgtgctggatacatggttttccagcgggctgttccccctgagcatactaggctggcccaatcagtcagaggacctctccgtgttttatcccggcactctcctggagactggccacgacatcttgtttttctgggtcgctagaatggttatgctcgggctgaaattgaccggccgacttccatttcgggaagtctatttgcatgcaatcgtgagggacgcccacgggcgtaagatgtcgaagagtttgggcaatgtaatcgatccacttgacgtgatttacgggataagccttcagggtttgcacaatcagctcctgaattctaatctagacccatctgaagttgaaaaggccaaggagggtcagaaggctgatttccctgcgggaattcccgaatgtgggacggacgccctgagatttggactgtgcgcttatatgtcccaggggagagacattaacctcgacgtgaacagaatacttggttaccgccacttttgtaacaaactgtggaacgccacaaagttcgctttacgggggctgggtaagggatttgtgccatctcctacaagccagccgggaggtcatgagagtctcgtggataggtggataaggtcccgcctgaccgaggccgtccgactgtccaaccagggatttcaggcatacgattttccagccgtgactactgcccagtactcgttctggttgtacgaactgtgcgacgtgtatcttgaatgcctcaaacctgtgctgaatggagtcgaccaggtggcagctgaatgtgcccgccagaccctgtacacatgcctcgatgtcggtctacgactgttgagccccttcatgccattcgtgacagaggagttattccaaagactaccacggcgtatgccccaagcccctccgagcctttgtgtgaccccctatcctgagccaagtgaatgtagttggaaggaccccgaggcagaggcagccttggagctggccctatccatcacaagagcagtccgcagcttgcgcgctgattacaacctgacaaggatccgccccgattgttttctggaggtggccgacgaggccactggcgccctggcaagtgcagtctccggctacgtgcaggcgttggccagcgccggagttgtagcagtgttggccctcggcgccccggcaccacagggctgcgccgtcgccctggcgtctgaccggtgctcgatacacctgcagctgcagggtttggtggaccctgctagggaactcggaaaattacaggccaagagagtcgaggcacagaggcaggctcagagactcagagagaggcgcgccgccagcggttatccagttaaagtccccctggaagtgcaggaggctgacgaggccaaactccaacagacagaggccgagttgcgcaaggttgatgaggcaatcgcactatttcagaaaatgctgtag

SEQ ID NO: 163648 - DNA, 525 bp, Artificial Sequence
  derived and/or modified sequence
atgagcaccctgtacgtgagcccccaccccgacgccttccccagccttcgagccctaatcgccgctcgctacggggaggcaggtgaaggacctggatggggtggcgcacatccccgtatctgtcttcaacccccacccacatctcgcaccccttttcctccccccagactacctgccttggagcagggtcctgggggcctgtgggtgtggggcgccactgccgtcgcccagttgttgtggcccgcagggctcggaggacctggggggtctagagccgctgtactcgtgcagcagtgggtctcttatgctgatacagaactcatcccggccgcgtgtggcgccaccctgccagcactcgggctgcgctcatctgcccaagacccccaggctgtgctaggagcgttgggacgggcactgagcccattagaagagtggctcagacttcatacgtatctcgcgggagaagctcccactctcgcagatcttgctgcggtgactgcgctgctactcccgttcaggtactag

SEQ ID NO: 163649 - DNA, 525 bp, Artificial Sequence
  derived and/or modified sequence
atgagcaccctgtacgtgagcccccaccccgacgccttccccagcctgcgggctcttattgccgctcgctatggagaggctggcgaagggcccggctgggggggcgctcacccacgcatttgtcttcagccgcctcccacaagccggactccattccctcctcccaggcttcccgcactcgaacagggacctggaggtctgtgggtgtggggtgcaacggcggtggcacagctgctgtggccggcagggctgggtggccctggcggcagtagggctgccgtcttagtgcagcagtgggtgtcctacgccgatactgagctgatcccagctgcctgtggagccacacttcccgctctaggcctccggagtagtgcacaagacccgcaagcagtgctgggagccctgggtcgcgccctgagtcctttggaggaatggcttaggctccatacctacctggccggagaggcgccaacactggccgatttggcggcagtgacagcactactgttgccctttcgctactag

SEQ ID NO: 163650 - DNA, 3795 bp, Artificial Sequence
  derived and/or modified sequence
atgagcaccctgtacgtgagcccccaccccgacgccttccccagcttaagagcacttatcgcagccagatatggggaagctggggaagggcccggatggggaggagcccacccgaggatttgcttgcagccccccccaacctcacgaacgtcttttccacccccaagactccccgccttggaacagggaccaggtggcctgtgggtctggggtgcaacggcagtggcgcagctgctttggccagctggactcggaggacccggaggctcaagggccgccgtgcttgtacaacagtgggtgtcatatgctgacaccgagctgattcccgcggcatgcggggctactctgcctgccctggggctgaggagctcggcacaggatcctcaggccgtcttgggcgccctcggtcgggcgctcagtccactcgaggaatggctgcggctgcatacctacttagccggggaagcgcccacccttgccgaccttgccgccgtgacggcactgctgctgcctttccgttacgtattggacccacccgcaagacgaatctggaataatgtgacacgctggttcgtgacttgtgtaaggcaaccagagtttcgtgcagttttgggcgaagtggttttgtacagtggcgccagacctctgtctcatcagcccggccctgaggcgccggccctccccaagacagccgctcagctgaaaaaagaagcaaagaaacgggaaaagctggagaagtttcagcagaaacagaaaatccagcagcagcagcctccccctggtgaaaaaaagcctaaaccagagaaacgggagaagcgtgacccaggtgtgataacatacgatttacccactcctcccggcgagaaaaaggacgtgtccggaccaatgcctgactcttattccccacggtatgttgaggccgcctggtatccttggtgggagcagcagggtttctttaagccagagtacggcagacccaacgtctcggccgcgaaccctcgaggcgtgtttatgatgtgcattcctcccccaaatgtgactggaagcctccacctgggacacgcactgaccaacgcgatccaagatagccttacccgctggcatcgaatgcgaggcgaaaccaccctatggaatccagggtgtgatcatgccggtatcgccactcaggtagttgttgagaagaaactttggcgggagcagggactgagcagacatcagctaggccgggaggcattcttgcaggaggtgtggaagtggaaggaagaaaagggggaccgaatttatcaccaactcaagaaactagggtctagcttggattgggaccgggcctgtttcaccatggatcctaagttatctgctgcagtgaccgaagctttcgttagactgcacgaggagggcatcatctaccgctcaaccagattagtgaactggtcatgcaccctgaattccgctataagcgacatagaggtcgacaagaaggaactgacaggaagaacgctgttaagcgttcccggttacaaagaaaaagttgaatttggtgtgcttgttagctttgcatataaagttcagggcagcgactctgatgaggaggtggttgttgccactactcgcattgaaaccatgctcggagacgtcgccgtggctgtccacccaaaagataccaggtaccagcatctgaagggcaagaacgtgatccaccccttcctgtcacgctccttacccattgtcttcgacgaattcgtggatatggatttcggtaccggggcagtgaaaataacacctgctcacgatcagaacgattacgaggtcggtcagaggcacggcctggaagctatctctataatggacagtcgaggagctcttatcaatgtgccaccaccattcctggggttgccccggtttgaagcccgcaaggctgtgctcgtggcattgaaggaacgggggcttttccgcggaatcgaagacaatcccatggttgtgcccctctgcaatcggtctaaggatgtggtggagcccctgctcaggcctcagtggtacgtgcggtgtggagaaatggcccaggcggcctcagcagctgtcactcggggcgatcttaggatcttgcccgaggcacaccagagaacttggcacgcgtggatggacaatataagggagtggtgtatatccagacagctatggtgggggcacaggatccccgcttattttgtcacagtcagtgatcctgccgttccccccggagaggacccagatggtcgctattgggtgtctggtcgaaatgaggcggaagcccgagaaaaggccgcaaaggaatttggagtctcccccgacaagataagcctgcaacaggatgaagacgttctggacacatggttttcctccgggttgtttcctctgtctattctagggtggccgaatcagagcgaagatctgtccgtgttctaccctggaactttgctcgaaaccgggcacgacatcttgtttttctgggttgcccgcatggtgatgctgggtctaaagttaaccggacgactaccctttagggaagtgtatcttcacgcaatcgtgagggacgctcatggccgaaagatgagcaaatccctgggcaacgtaattgatcctctggacgttatctacgggatttcactgcaggggctgcacaatcagctccttaactccaacctggacccatcagaagtggaaaaggccaaggagggtcaaaaagccgattttcccgctgggatcccagagtgcggaactgatgccttgagattcgggctctgcgcatatatgtcacaggggagggatatcaacctggatgtcaataggatcctgggctatagacatttttgcaacaagctgtggaacgcaaccaaattcgcccttagaggtctgggtaagggcttcgttccctcccccacgagccagcctggcggtcatgagtcgctagtggatagatggatacgctcccgactcaccgaagcagtgcgcttgtccaatcagggcttccaggcttacgactttccagcggttactacagcccaatacagcttctggctgtatgagctttgtgatgtgtaccttgagtgtctgaagccagtgctgaatggagttgatcaggtggcagcggagtgcgctcgccagaccctgtacacgtgcctggacgtgggactcaggcttctgagcccttttatgccttttgttacagaggagttgtttcagaggctgccaagacgaatgccacaagctccaccaagcctgtgcgtaactccataccctgagccaagcgagtgttcctggaaggatcccgaggccgaggcagctctggagcttgccctcagtattacaagggcagttaggagtctcagggcggattacaatctgacacggattcggcctgactgctttcttgaggtggccgatgaggccacaggcgcactcgcctctgccgtctccgggtatgtccaggctctggcctctgctggggtggtggcagttcttgcactgggagctccagccccacagggctgtgccgtcgctctggcttctgaccgctgtagcattcatttgcagcttcaagggcttgtggaccctgctcgagagctgggaaaactccaggccaaaagggtcgaggcccagcgccaggcgcagcgtctaagagagcgacgcgccgcaagcgggtacccagtaaaagtccctctggaagttcaagaggccgatgaggctaaactgcaacagacagaagcagagctccgcaaggtggatgaggcgatcgctttattccagaagatgctctag

SEQ ID NO: 163651 - DNA, 525 bp, Artificial Sequence
  derived and/or modified sequence
atgagcaccctgtacgtgagcccccaccccgacgccttccccagcttgcgagctctgattgccgctagatatggagaagctggcgaggggcccggctggggcggtgcacaccctagaatttgtcttcagcccccgccaacgtcaaggactccttttcccccacccaggttgcccgcgctggagcaggggcctggcggtctctgggtgtggggagccactgccgtggcacaactgctttggccagccggtttgggcggtcccggtggatctcgtgctgcagtgctcgtgcaacagtgggttagctatgccgacaccgaactaatcccagcagcttgcggggccacgttgccggctctggggctgcgctcatctgcccaggatccacaggcagtgttgggcgccctcggccgggccctatcaccgctcgaagaatggctgagactccatacatacctcgccggcgaagctccaacccttgcggatctcgctgccgtgactgctctcctcctacccttccggtactag

SEQ ID NO: 163652 - DNA, 894 bp, Artificial Sequence
  derived and/or modified sequence
atgcccgacagctacagcccccggtacgtggaggccgcctggtacccctggtgggaacagcagggtttctttaaaccagagtatggaaggcccaatgtgtcggccgccaacccacggggtgtgtttatgatgtgcatccctcctcccaatgtgactggtagccttcacctcggacatgccctcaccaatgccattcaggattcccttactagatggcaccgcatgcgcggcgaaacaaccttatggaatcccgggtgcgaccatgcgggaattgctacacaggttgttgtggaaaaaaagctgtggcgtgagcagggtctcagccgccatcagcttggccgggaagcgttcctgcaggaagtgtggaaatggaaggaggaaaaaggtgaccgcatctaccatcaactgaagaagctgggctcttcattagactgggatagggcgtgcttcacaatggaccccaagctgtctgctgcagtgactgaggctttcgtgcggttacacgaggaaggcatcatctaccgcagcacacgcctggtgaattggtcttgcactcttaactcagctatttctgacattgaggtggacaaaaaagagctgacaggtcgcaccctgctgtcggtgcccggctataaggaaaaagtggaattcggcgttctggtttcttttgcctataaggtgcaaggatcagattcagatgaggaggtcgtggtcgctaccacccgcatcgagaccatgttgggtgacgtagcagttgccgtgcacccaaaggacaccagataccaacatttgaaagggaagaatgtgattcatccattcttaagtagaagcttgccaattgtgttcgatgaattcgttgacatggactttgggacaggacccgcccaggtctag

SEQ ID NO: 163653 - DNA, 288 bp, Artificial Sequence
  derived and/or modified sequence
tgacccgccggcctgggcggccccggcggcagccgggccgccgtgctggtccagcagtgggtgtcttatgcagacacagagctcattccagctgcctgtggagccactctgcccgctctggggcttcgttcgagcgcccaggatcctcaggctgttctcggagccttagggcgagctctttcacctctagaagaatggctacggctgcacacctatcttgccggggaggctcctacgcttgctgaccttgctgccgtaaccgccctgctcctcccgttcaggtattag

SEQ ID NO: 163654 - DNA, 3795 bp, Artificial Sequence
  derived and/or modified sequence
atgagcaccctgtacgtgagcccccaccccgacgccttccccagcttaagggcgctgatcgcggcccggtacggggaggcgggcgaagggcctggatggggcggtgcccaccctcgaatttgtctacagccaccccccacctcccggacccctttcccccctccccggctgcccgctcttgagcaaggccctggaggtctctgggtatggggggcaacagctgtcgcccagttactgtggcccgcagggctgggcgggccgggtggctcacgggctgctgtcttagtacaacagtgggttagctatgccgataccgagttgattcccgctgcatgtggtgccacattaccagcactggggctcaggagcagcgcgcaggaccctcaggcggtgctgggggccttgggccgcgccctatcacccctggaggagtggctgcgcttacatacttatctggctggggaagccccaactctggcggacttggctgccgttactgctttactcctgcccttcagatacgtgttggaccctcccgctcgtaggatctggaataatgttacaagatggttcgttacatgtgttaggcagccagaattccgtgcagtgctgggggaagtggtgctatactcaggggctcgaccactctctcaccagcctggccctgaagcccctgccctgcccaagaccgccgcgcagctcaaaaaggaagcaaaaaaaagagagaagctggaaaagttccagcagaaacagaaaatccagcagcaacaaccccctcctggcgagaaaaaacccaaacccgagaaacgggagaagcgcgaccccggcgtcattacatatgacctcccaacaccacctggggaaaaaaaagacgtgagtgggccgatgcctgatagttacagtccgcgttacgttgaagccgcatggtatccatggtgggagcagcaagggttcttcaagcccgagtacggaagacccaatgttagcgccgccaacccgcgtggggtgttcatgatgtgcataccacctcctaacgtcaccgggtctctacatctgggacatgcattaaccaatgcaatccaggatagccttaccagatggcacaggatgaggggggaaaccacattgtggaatcccggatgtgaccacgctggcatcgccacacaggtggttgtggaaaagaagctctggcgggagcagggactgtctagacaccagctagggagggaagcttttctccaggaggtgtggaagtggaaggaagagaagggggaccggatatatcatcagctgaagaagctcggtagctcattggactgggaccgggcctgctttactatggatcccaagttgtcggcggcagtaactgaagcttttgttaggctccacgaggaagggatcatctataggtcaacacggttggtgaattggtcctgcacattgaacagcgccatttcagacatcgaagtggataagaaggaactgaccggacgcacacttcttagcgtgccaggatataaagagaaagtggaatttggagttctcgtgtcctttgcgtataaggtgcagggctcagacagtgacgaagaggtggttgttgccactacgcgcatagagaccatgctgggcgatgttgctgtcgctgtgcacccaaaggacaccaggtaccagcacttaaaaggtaaaaatgtgattcatcccttcctgtccagatccctgccaattgtgttcgatgagtttgttgatatggacttcgggaccggggccgtcaaaatcacaccagcccacgatcaaaatgactacgaagtaggtcagaggcacggcttggaagcgatttcaattatggacagccgtggggccctgattaatgtgccccccccatttctcggactccccaggttcgaagccagaaaagctgtgcttgtagcgctcaaggagagggggctcttcagagggattgaggacaatccaatggttgttccactctgcaaccggtctaaggacgttgttgagccgctactgagaccccagtggtacgtaaggtgcggggagatggcccaggcggcatctgcggctgtaacccgaggggatctcagaatcctgcccgaggctcaccagcggacatggcacgcttggatggacaacataagggagtggtgtatatcccgacaactctggtggggccaccggatcccggcttactttgtgactgtgtcggaccccgcagtcccccctggcgaggatccagatggaagatactgggtgtctggcaggaatgaagctgaggcacgagagaaggctgccaaggagtttggggtctcgcccgacaaaatatctcttcagcaagacgaagatgtcctggacacatggttttcaagcgggttgtttcccctctctattctggggtggcccaatcaaagcgaggacttaagcgtgttctatccagggaccttactggagactggccatgatatcctgtttttttgggtggcgagaatggtgatgttggggctgaaactgacaggtcggctcccatttagagaggtttacctgcacgccatagttagagacgcccatggacgcaagatgtcgaaaagcctgggaaacgtcatcgatcctctggacgtaatatatgggattagcctgcagggcctgcacaaccaactgctgaattccaacctcgacccctccgaagttgaaaaggctaaagagggccagaaggccgattttcctgctggcatacccgagtgtgggaccgatgccctaaggttcggcctctgcgcctacatgtcccaggggcgggatatcaatctggatgtgaacaggatactgggatatagacatttttgcaataaattgtggaatgcaaccaagtttgccttgaggggtctcggaaaggggtttgtgcctagcccaacaagccaacccggggggcatgaaagtcttgtagaccggtggatccgcagcagattaacagaagccgtgcgcttaagcaatcagggattccaggcatatgacttcccggccgtgaccaccgcccagtatagcttttggttatatgaactttgtgatgtttacttggaatgcttgaaacctgttctgaacggagttgatcaggttgccgccgaatgcgcacgacagacgctgtatacctgcctggacgtcgggttaagactgctgtctcctttcatgccgtttgtgacagaggagttgtttcagcggctgcctcgcagaatgcctcaggctcccccgagcctgtgcgtgacaccttaccccgagccttctgagtgttcctggaaagaccctgaggctgaggctgccctggagctagccttgtctattactagggcggtccgcagcctgagagctgattataatctgaccagaatacgtccggattgcttcctagaggtcgcagacgaagctactggcgcactggcttccgccgtgtcgggttatgtgcaggctctggcctccgctggggtggtggccgtgctggccttaggcgctcccgcgccgcagggttgcgccgtagctctggccagcgaccggtgcagcattcatctgcaactccagggactcgtcgacccagccagagagctcggcaagctgcaggcaaaacgggtggaggcacaacgacaggcacagagactgcgtgagcgacgcgctgcctctggctacccagttaaagttcctctcgaagtacaggaagctgatgaagccaaacttcaacagacagaggccgaactgagaaaagtggatgaagccattgccctgttccaaaaaatgctgtag

SEQ ID NO: 163655 - DNA, 894 bp, Artificial Sequence
  derived and/or modified sequence
atgcccgacagctacagcccccggtacgtggaggccgcctggtacccttggtgggaacagcagggtttctttaagccagagtatggccgtcccaacgtaagtgccgctaaccctagaggtgtgtttatgatgtgtattccacctccaaacgtgactggatcactccatctaggccacgctctcacaaatgctattcaggacagcttgacaaggtggcacagaatgcgcggcgagactacgctttggaacccaggatgcgaccatgccggcatagccactcaagttgttgtggaaaagaaactgtggagggagcagggcctgtctagacatcagcttggacgcgaagccttcttgcaagaagtgtggaaatggaaagaagagaaaggcgacaggatctatcaccaactgaagaagctggggagctctttagactgggacagagcttgctttacaatggatcccaagctatcagctgcagtcactgaggcctttgtccgcctgcatgaggaggggatcatctacagatcaacacggctggtcaattggtcctgcacactaaactccgctatctctgatattgaagtcgacaaaaaagagctgaccggccgtaccctgctctccgtgcctggttataaagagaaggtggaatttggagtgctcgtatcttttgcttataaggtgcagggcagtgactccgacgaagaagttgtggtggctacgacacgcatcgaaacaatgcttggcgatgttgctgtcgccgtgcatccaaaggacacccgttatcagcatctcaaaggcaagaacgtgatccacccttttctttctaggtcactgccgattgtctttgatgaattcgtcgatatggacttcggaacgggtcctgcccaggtctag

SEQ ID NO: 163656 - DNA, 894 bp, Artificial Sequence
  derived and/or modified sequence
atgcccgacagctacagcccccggtacgtggaggccgcctggtacccctggtgggagcagcagggattcttcaaacctgagtacggccgccctaacgtgtcagccgccaaccctcggggcgtctttatgatgtgcatcccgccgcccaacgtcacaggttcattacacctggggcacgccctgacaaatgccatccaagactcactcaccagatggcatcgcatgcgcggagaaacaactttgtggaacccgggttgcgaccatgcaggaatagccactcaggtcgtggtcgagaagaaactgtggcgggaacagggtcttagccgccaccagttaggccgagaagcatttctccaggaagtatggaagtggaaggaagagaagggcgatcggatctaccaccaacttaagaagctggggagcagcctggactgggatcgagcctgcttcactatggatccgaagctctctgccgccgtcacagaggcctttgtccgtctgcatgaagaaggaatcatttatagaagcacacgactagtcaactggtcatgtacccttaacagcgctatttctgacattgaggtggacaaaaaagaattaaccggccgcaccttgctctctgttcctgggtataaagagaaggtggagtttggcgtactggtgtcattcgcatataaggtccagggttcagattctgacgaggaggtggtcgtggcaaccacccgtatcgagactatgttgggcgacgttgccgttgctgtgcacccaaaggatactcgttatcaacatttaaaaggaaaaaatgtaattcacccattcctgtctagatctctgcccattgtattcgatgagttcgtggacatggattttggaacaggaccagctcaggtttag

SEQ ID NO: 163657 - DNA, 894 bp, Artificial Sequence
  derived and/or modified sequence
atgcccgacagctacagcccccggtacgtggaggccgcctggtacccatggtgggagcaacaggggttctttaaacctgaatatggcagacctaatgtgtccgcagccaacccacgaggggtgttcatgatgtgtatccccccccccaacgtgaccggatccttacaccttggacacgctctgacaaacgcaatccaggactctctcaccagatggcatcggatgcggggcgagacgacattgtggaatccagggtgcgaccatgccggaattgcaactcaggttgtggttgagaaaaaattgtggcgggaacaggggctgagtcgacatcaactcgggcgcgaggcctttctccaagaggtgtggaaatggaaggaagagaaaggggacaggatttatcatcagctcaagaagttgggtagcagccttgattgggaccgggcttgttttactatggatcccaagctcagtgccgccgtgactgaagctttcgtgcggctgcacgaagaaggcatcatctatcgttcaactcggttggttaattggtcttgcacactaaattctgcgatttccgacattgaagtggataagaaggaattgacaggtagaacactgttaagtgttcccgggtataaagagaaagttgaattcggggtcctggttagcttcgcgtataaggttcaggggtccgacagcgacgaggaagtggtagtggcgacgacccgaattgagactatgctcggggatgtggccgtagccgtacaccccaaggatactcgataccagcacctgaaaggcaaaaatgtcattcatccctttctctcccgaagcctgcctatcgtattcgatgaattcgtcgacatggactttgggacaggacctgcccaggtgtag

SEQ ID NO: 163658 - DNA, 894 bp, Artificial Sequence
  derived and/or modified sequence
atgcccgacagctacagcccccggtacgtggaggccgcctggtacccttggtgggaacagcagggattctttaagcccgagtacggcaggcccaacgttagcgccgcaaaccccaggggagtctttatgatgtgtatcccgccccccaatgtgaccgggtccctgcacttgggccacgccctgacaaacgccatccaggattctctcacccgttggcatcgaatgaggggagaaacaacgttgtggaaccccgggtgtgatcacgctggaattgccactcaggtcgtggtggaaaaaaaactctggagggaacagggtctgtcaaggcatcagctgggtcgcgaagccttcctgcaggaggtatggaagtggaaggaagagaaaggggaccgtatctaccaccagcttaagaaattaggctcatccctcgattgggaccgagcttgcttcaccatggatcctaaactgagtgcggcggttaccgaagcctttgtcagactgcacgaagaaggcattatctacagatccactaggcttgtgaactggtcatgtactcttaacagcgccatctcagatatcgaggtggataaaaaagagctgacaggccgaaccctgttaagcgtcccgggctataaagagaaggtggagtttggagtgctcgtatccttcgcctataaagtacagggatctgactcagacgaggaagtggtcgtagccacaacacggatcgaaacaatgttgggggacgtggcagtggcggtgcatcctaaagacacccgctatcagcacctgaagggtaagaacgtaattcacccattcctaagcaggagcttaccgatcgtgtttgatgagtttgtggatatggatttcgggaccggccccgcccaggtttag

SEQ ID NO: 163659 - DNA, 3795 bp, Artificial Sequence
  derived and/or modified sequence
atgtccacattgtacgtctccccacaccccgatgcttttccctctctccgggcactgatcgccgcaaggtacggagaggcaggagaaggcccaggatgggggggtgcccacccccgaatctgcctccaaccaccacccaccagccgaacacccttccccccaccacgactcccggcactggaacagggccctgggggattgtgggtttggggggcaactgcagtcgctcagctgctgtggcccgctggtctgggaggtcccggtggtagcagggctgcggtgctggttcaacagtgggtcagctatgctgatactgagcttatccctgccgcttgtggagccacgctgccggctctcggcctaaggagcagcgcacaagatccgcaagccgtgctgggcgctttgggccgtgcgctctctccactcgaagagtggctccggttacacacctatcttgccggagaggcacctacgctggcagacttagcagccgtgacggccctgcttttgccttttcgctacgtcctcgatccacctgcccgacggatctggaacaacgtgacaaggtggtttgtgacttgtgtccggcaacccgagttccgggcagtgttgggcgaggtggtcctctattccggcgcacggcctctgagtcaccaaccaggaccggaagcaccagccctgcctaaaactgcggctcagctgaagaaagaggcaaagaagcgcgagaaactcgagaagtttcagcagaagcaaaaaattcagcagcagcaaccacccccaggagagaagaaacccaagccggaaaaaagggagaagcgcgatcctggggtgattacttacgatctcccgacacctcctggcgagaaaaaggacgtgtcgggcccaatgcccgacagctactcacctagatacgtggaagccgcatggtacccctggtgggagcagcaggggttctttaagcccgagtacggccgacctaacgtttccgctgctaacccgaggggcgtcttcatgatgtgcatccctccccctaatgtaaccggaagcctccatcttggccatgcgttaacgaatgccattcaggatagtcttacgagatggcatcggatgcggggtgaaactaccctctggaatccaggttgtgaccacgcagggattgcaactcaggtggtggtggaaaagaaactatggcgtgagcaggggctttcacggcatcaactgggaagggaagcattcttgcaggaggtatggaaatggaaggaagaaaaaggtgatcggatctaccaccagctgaagaagctgggctcctcattggattgggacagggcgtgtttcaccatggatcccaagttatctgccgctgttacggaggctttcgtcagactacacgaagaaggtatcatatatcgcagtacccgactcgtcaactggagttgcacactaaactctgccatctccgatatagaagttgacaagaaggagctcacaggcaggactctcctgtccgttcccggatacaaggagaaagttgaattcggagtgctcgttagctttgcctacaaagtccaggggtccgattcagatgaggaggtcgttgttgcgaccacacgcatcgagacaatgctgggagacgtggccgttgccgtgcaccccaaggacacccggtaccagcatctaaagggtaaaaacgttatccatccctttttgtctcgatccctgccaattgtgtttgacgaatttgtggacatggactttggaaccggagcagtaaaaataacccccgctcatgaccagaacgattatgaagtcggacagcggcacggactggaggccattagcattatggattcccgcggagccctgattaacgttccgcctccctttctgggccttccaaggttcgaagctcgcaaagccgtgctggtggcgctgaaagagcgagggctgtttcgagggattgaggataatccaatggtggtgcctctatgtaaccgaagcaaagatgtggtggaaccgttgctgcgacctcagtggtacgtgcgctgcggggaaatggcccaggcagcgtcagccgctgtgacccggggagatctgcggattctgcccgaggctcaccaacggacatggcacgcatggatggataatatacgtgagtggtgtatctcacggcagctatggtgggggcataggattcctgcttattttgtgaccgtctccgacccagcggtgcctcccggtgaagatccagacgggagatattgggtcagcgggcgtaacgaggctgaggcgagggagaaagcagccaaggagttcggcgtgtctcctgacaagatcagccttcagcaggacgaggatgtgctcgatacgtggttcagctctggcctcttcccactgtctatccttggctggcccaatcagagtgaggatttgtcagtattctaccccggaaccctattggagaccgggcatgacatcctgtttttctgggtggctcggatggtgatgctcgggctgaagctgaccggacgcctgcccttccgtgaggtctacctgcacgccattgtccgcgatgctcatgggaggaagatgtctaagagcttaggcaatgttattgaccccttagacgtaatctatggcatttccctccaaggactccacaatcaactgctgaatagtaaccttgacccctctgaggtggagaaggccaaggaagggcagaaagccgatttccctgcaggcattccagaatgtggaacagacgctctgagatttggcctttgcgcttatatgagccaaggtcgcgacatcaaccttgatgttaataggattctgggataccgccacttttgcaacaaattgtggaacgctaccaaatttgcactgcgcggtcttgggaagggcttcgtgccttcaccaacttcccagcctggtggacatgaatccctggtcgaccggtggatacgaagccgcttgaccgaagcggttcgactctctaaccaaggatttcaggcatacgactttcccgctgtaactaccgcccagtacagtttctggctgtacgagttatgtgatgtttatctcgaatgcctgaagcccgtattgaacggtgttgaccaggtcgccgctgagtgcgccaggcagacgctgtacacttgcctggatgtgggcctgcgcctgctcagtccatttatgccattcgtaactgaagagttgttccaaagattacctcggagaatgccccaggccccaccttctctctgcgtgacgccctaccctgagcccagcgagtgttcctggaaggacccagaggctgaggcggctctggaattggccctgtccatcacccgagccgttaggagccttcgagccgattataacctgactcgaatccgccctgactgttttcttgaagtggcggatgaggcaacaggggctctggcgtccgcagtcagtgggtatgtacaggccttagcttccgcaggcgtagtcgccgtgttggcccttggcgctcccgctcctcaaggctgtgccgttgccctcgccagtgaccgttgtagcatacatcttcaactgcaaggcctagtggacccagctcgtgagttaggcaagctgcaggcaaaacgggtggaggcccagagacaggcacagcggctgagagagcgtcgcgcagcatccggctatccagtcaaagtgccactggaggtgcaggaggcggacgaggcaaaactgcagcagaccgaagctgaactgcgtaaagtcgacgaagcaatagcactcttccagaagatgctgtag

SEQ ID NO: 163660 - DNA, 525 bp, Artificial Sequence
  derived and/or modified sequence
atgtccactttatacgtctccccacatcctgatgctttcccatccctgagagccctgatcgctgccaggtacggggaggcaggtgagggtcctgggtggggcggagcacatcccaggatctgcctccagccaccacccacatcccggacaagcttcccacccccacggctgccagccttagagcagggacccggaggtctttgggtgtggggtgctacggctgtggcccaactcctctggcccgcaggactgggcggtcctggtggctcaagggcagctgtgctggttcagcaatgggtgtcttacgccgacactgagttaatccccgctgcctgtggcgctactctccccgcactggggctgcggtcctccgcccaggacccccaggccgtgttaggagctctcggaagggccctctccccgctggaggagtggcttcggctacatacctacctagctggtgaggccccaaccctcgctgatctggctgccgttacggctcttcttttaccttttcggtactag

SEQ ID NO: 163661 - DNA, 525 bp, Artificial Sequence
  derived and/or modified sequence
atgtcaactttgtatgtgtctcctcatcctgacgcctttcccagtcttcgggcattgattgctgctagatacggcgaggctggcgaaggccctgggtggggcggagcccatccacggatatgcctgcagcctcctccgacttccagaacctccttccccccaccacggctgcctgctctggagcaaggcccaggcggactatgggtgtggggggcaaccgctgttgcacagctcctttggccagccggattgggcggaccagggggatctagagctgccgtgctcgtgcagcagtgggtgtcttacgctgataccgagctgattcccgctgcttgtggggctactctgcctgcgctgggcttaaggagcagtgcacaagaccctcaggccgtcctcggagccctgggaagagctctcagccctctggaggaatggctgcggctccatacataccttgccggtgaggcaccaacccttgcagatcttgcggcagtgaccgctctcctactgccttttcggtattag

SEQ ID NO: 163662 - DNA, 3795 bp, Artificial Sequence
  derived and/or modified sequence
atgagcaccttgtatgtgtccccacacccggacgccttccccagtctccgggcacttatagccgctcgctatggtgaggcaggcgaaggcccaggctggggaggagcacacccacgaatctgcctccagccccctccgacgagccgcacctcttttcctcctcccagactgccggctctggaacaaggacccggagggctgtgggtttggggcgctacagctgttgcccagctcctgtggccggcaggtctcggaggtcctggcggatcacgcgctgcagtgttagtgcagcagtgggtgagctacgctgacacagaactgatcccagctgcatgcggggcaacgctgcctgcacttggcctgaggtcgtcagctcaggacccgcaggctgtcttgggcgctcttggaagggcactgtctccgctcgaagagtggttgcgcctccatacctacctggcgggtgaagcaccgactctggcagatcttgccgcagtcacagctttgctactgcctttccggtacgtgctcgaccccccagcacgcaggatctggaacaatgtgacccgctggtttgtcacttgcgtcagacagcccgagttcagagccgtgttgggcgaggttgtgctgtatagtggagcgcgaccactgagccatcaaccgggtcccgaggcccctgctttgcccaaaaccgccgctcagttgaagaaggaggcaaagaagcgggagaagctggaaaaattccagcagaagcagaaaattcagcagcagcaaccgccacctggtgagaaaaagcccaaacctgagaaacgggagaagcgcgatcccggtgtgatcacatatgacctacccacccctcccggagaaaagaaggatgttagcggaccaatgcctgacagttactctcccaggtacgtggaggcagcttggtatccatggtgggagcagcaggggttttttaagcctgaatatggtaggcccaacgtgtctgctgctaaccccaggggtgttttcatgatgtgtattccccctcctaacgtgacgggtagtctgcacctaggccacgccctgaccaatgctatacaggactctctcacacgctggcaccgaatgcgcggtgaaaccactctgtggaatccgggttgcgatcacgccggtatcgcaactcaggtcgtcgtggagaagaagctatggcgcgagcaaggactcagcaggcaccagcttggcagggaagccttcttgcaggaggtttggaaatggaaagaggagaaaggggataggatatatcaccagctgaagaagcttggctctagcctagattgggacagagcctgctttactatggatcctaagctgagcgccgctgtcaccgaagcctttgtaagactccatgaggagggaatcatctaccggagtactcggttagttaactggagctgcaccctgaacagtgctatttcagacatcgaggttgacaaaaaagagctcactggacgcacgttgctgagcgttccaggctacaaggagaaggtggaatttggcgtcctggtctcgtttgcgtacaaggtacagggatcggactcagatgaagaagtagttgtggctactactcggatcgagactatgctgggtgacgtggcggtcgctgtgcatcctaaggacacacggtatcagcatttaaaagggaagaacgtgatccacccattcctgagtaggtcactccccatagtgttcgacgaatttgtcgatatggattttggtactggcgctgtgaagattaccccagcacacgaccagaacgattacgaagttgggcagaggcacggattagaagcaataagcatcatggacagccgcggagccctcatcaacgtcccccctcccttcttgggactgcccaggtttgaggcccgtaaggctgtgttggtcgccctgaaagagaggggactgttcaggggcattgaagataaccccatggtagtgccactgtgcaacagatctaaggacgtggtggagccgcttctgcggcctcagtggtacgttcggtgtggtgagatggcccaggctgcctccgcagccgtgactaggggggacctgcgcatactgccagaagcgcatcagcggacctggcatgcctggatggacaatatccgcgagtggtgcatctccaggcagttgtggtgggggcacagaatccctgcttacttcgtcacagtatccgacccagcagttccacctggggaagaccccgatggacggtactgggtttcagggcgtaacgaggccgaggctagagagaaggccgctaaagaatttggagtcagtccggacaagatctcacttcagcaggacgaagatgtcctggacacctggttctccagtggcctcttcccactcagtatcctaggctggccaaaccagtcagaggacctgagcgtgttttatcccggtacgctgctcgagactgggcatgatatcctgttcttctgggtcgccaggatggtgatgttgggcctgaagttgacgggccgtctccccttccgagaggtatacctccatgcgatagtcagggacgcccatggaaggaagatgtctaaaagcctcggtaacgtgattgatcccttggatgtgatctatggaatttccctgcagggcctgcataaccagctacttaactctaacctagaccccagcgaggtggaaaaggcgaaagaggggcagaaagcagactttcccgctggcatcccagaatgcggaactgacgctctaaggttcggcctgtgtgcgtacatgagtcaggggagggatatcaacctggacgtgaaccggatcctgggctaccgacatttctgcaacaaactgtggaatgctacgaaattcgccctccggggtctggggaaagggtttgttccatcccccacctcccagccagggggacacgagtcactcgttgatcgctggatcaggtcccgcctgaccgaggcagtccggttgtctaaccaaggtttccaggcatatgacttcccagcagtgactaccgcacagtatagcttctggctgtacgaactgtgtgacgtatatcttgagtgtttgaagcctgtattaaatggcgtcgatcaggtggccgcagaatgcgcgaggcagaccctgtatacgtgcctggatgtagggttgcgactactctcacctttcatgcctttcgttacagaagagctgtttcagcgcttgcctcgccgaatgcctcaagcacctcctagcctgtgtgtgacaccgtaccccgagccctcagaatgctcttggaaagacccagaggcggaagctgccctggagttggccctctcaataaccagggccgtacgctccctccgagcggattataacctcactaggattaggcccgactgcttccttgaggtggcggatgaggccaccggcgctttggcgagtgcagtgagtggatatgtgcaagctctggccagcgcaggtgtcgtggccgtgctggctctgggggctcccgcaccacagggatgcgccgttgcgctggcctcagatcggtgtagtatccacctacaattgcaaggtttggttgatcctgcgagagagctcgggaaactccaggcaaaacgtgtcgaggcacagagacaagctcagcgcctgcgggagcggagagccgcaagcggataccctgtaaaagtgcctttagaagtacaggaagccgacgaggccaagctccaacagacagaagcggagctgagaaaagttgatgaggcgatcgcattatttcagaagatgctgtag

SEQ ID NO: 163663 - DNA, 1101 bp, Artificial Sequence
  derived and/or modified sequence
atgagcacactgtacgtgtctcctcatccggatgcattcccctctctgagagctctcatcgcagccaggtacggagaagctggtgaaggcccaggctggggcggtgcacacccccgaatctgcctgcaacctcctccaaccagcagaaccccttttcctcctcctcgtctccccgctttggaacaggggccagggggactgtgggtgtggggcgcaacggccgtcgcccaactgctgtggccggctggtctcggaggtcctgggggaagtcgggctgcggtgctggttcaacaatgggtctcctacgccgacacagagctgatcccagcagcctgtggggctactttacccgctctcggactacggagcagtgctcaggatccacaggccgtcctgggtgccctgggacgggctctgtcccctctcgaggagtggctgaggctccatacgtatttggccggtgaagcacctacgctggctgacctagccgcagttaccgccctgcttctccccttcaggtacgtcttggatcctcccgctagacgcatctggaacaacgtaaccagatggttcgtaacatgcgttaggcagccggaatttagggcggtattaggtgaggtggtcctttattcaggagcacgcccactgtcacaccagcctggacccgaggccccagccttacctaaaactgccgctcaattgaaaaaagaagccaagaaacgtgaaaagctggaaaagttccagcagaagcagaaaatacagcagcagcagcctccccctggggaaaagaagcctaagcctgaaaagagggaaaaaagagatcctggcgtgatcacatacgacctccctacccccccaggcgagaagaaggatgtttccggcccaatgcccgactcctattccccacggtacgtggaagcagcctggtacccctggtgggagcagcagggcttctttaaacctgagtacgggagacctaatgtatctgccgctaaccctaggggggtgttcatgatgtgcatcccccctcccaatgtgaccggatcactccacttgggacacgctctgactaatgcaatccaggactcactgacccgctag

SEQ ID NO: 163664 - DNA, 525 bp, Artificial Sequence
  derived and/or modified sequence
atgagtacactctacgtctcaccacatccagatgcctttccttcccttagggcgctgatagcagccaggtatggcgaggccggtgagggcccaggatgggggggagctcatccaaggatttgtctgcaaccccctcctacgtcccgcacaccatttccacctcccagactgcctgcattggagcagggaccgggagggctgtgggtgtggggcgctaccgccgtggctcaactactgtggccagcgggactcggagggcctggcggttcacgcgcagctgtattagtgcaacagtgggtcagttatgcagataccgagctgatccccgctgcttgcggggcaactctaccggctctgggtctgaggtcgtctgcgcaagacccccaggccgtcttgggtgctcttggtcgagccctctctcccttggaggagtggctgcgcctgcacacatacctggccggagaggccccaactttagctgatctcgcggctgttaccgcgttgctgttgccattcaggtactag

SEQ ID NO: 163665 - DNA, 3552 bp, Artificial Sequence
  derived and/or modified sequence
tgagggctgggtggccctggaggatcacgtgccgctgtactagtacagcaatgggtgagctacgccgacaccgaactgatacccgcagcgtgcggagctacactgccagccctggggctaagatctagtgctcaggaccctcaggcagtgctcggagcacttggacgggcattgtcccctcttgaggagtggctacgccttcatacctacctagccggagaagcacctacactcgctgacctggctgctgtgaccgccctcttactgccttttcgctatgtcctggaccctccagcacgcagaatttggaataacgtgaccagatggttcgtgacgtgcgtgagacagccggagtttcgtgctgtgctgggggaggtggtcctgtattcaggcgcaaggcccctgtcccatcaaccaggcccagaggctccggctttaccgaaaaccgctgcccaactgaagaaagaggccaaaaagcgcgagaaactagaaaagtttcagcagaagcagaagatccagcaacagcagccaccacccggagaaaagaaacctaaacctgagaagagagagaagagagaccctggcgttatcacatatgatctgcccactcctcctggcgagaagaaagacgttagtgggcctatgcccgactcctattcgccaaggtacgtggaggcagcctggtacccctggtgggaacagcaaggcttcttcaagccagaatacgggaggcccaatgtgagtgccgctaaccctagaggcgtgttcatgatgtgcatcccgcctcctaatgtcacgggcagtctacatctgggccatgcattaactaacgcaatccaagactccctgactcgctggcataggatgcggggagaaaccacgctatggaaccccggttgcgatcatgctggaatcgccacccaagtcgtggtggagaaaaagctgtggagagaacagggcttgtcccgtcatcaattaggaagagaagcctttctgcaagaagtgtggaagtggaaggaggaaaagggagatcgtatctatcatcaacttaaaaaacttggtagcagcctggattgggaccgggcatgcttcacaatggatccgaagttgtccgcggctgtcacagaggccttcgttagactgcacgaagaagggatcatctacaggtcaactagattggtgaactggtcttgcacgctgaattctgctatctctgacattgaagtcgataagaaagagctgacaggcagaactcttctcagcgtgcccggttacaaggagaaggtggagttcggagtcttagtctcttttgcgtacaaggtgcaagggtccgattcagatgaggaggtagtggttgctaccacacggatcgagacaatgttgggcgatgtggcggtggctgtacaccccaaagatacgcgttatcaacatctcaaagggaaaaacgtcattcaccctttcctgagtaggtctcttcctatcgttttcgacgagttcgtggacatggattttggcacaggcgcagtcaaaatcacaccagcccatgaccagaatgactatgaagtggggcagcgccacggactcgaggccatttccatcatggatagtagaggggcactcatcaatgtgccacctcccttcctcggcttaccccgtttcgaggcccgtaaagctgtgttagtcgccctgaaggagagaggactgttcagaggtatcgaagacaatcctatggtcgtccctctgtgtaatagatctaaggacgttgtagagcccctgcttcggccacagtggtacgtgcgatgtggcgaaatggcgcaggcggctagtgctgctgtgacacggggtgacctacgtatcttgcctgaggcgcaccaacgcacatggcacgcttggatggataacatacgtgagtggtgtatctccagacagctatggtggggccaccgtatccccgcttacttcgtgacagttagcgaccctgctgtgccgccaggggaggatcccgatggcagatattgggtgtcgggtcgaaatgaggcggaagccagagagaaagccgctaaggaattcggcgtttctcccgacaagattagtttgcagcaggatgaggacgtcctcgatacctggttttcctccggacttttcccccttagtatccttggatggccaaaccagagtgaagacctgtcagtgttctaccccggaacactactcgagaccgggcatgacattctgttcttttgggtcgctcggatggtgatgctgggtctcaaactgacagggaggctgcccttcagagaggtctacttgcatgccattgtccgggacgcccacggtagaaagatgagtaaatcccttgggaatgtgatcgatcccctggacgtcatctatggaatctcactgcaggggctccacaaccaactgttgaactcaaatctggacccgtctgaggtcgagaaagctaaggagggccagaaggcagatttcccggctggcattccagagtgtggcacggatgccctacgctttggcctctgcgcttatatgtcacagggcagagatatcaatctggatgtgaatagaatactcgggtacaggcacttttgtaacaaactctggaatgccaccaaatttgcactgcggggactcggcaaggggttcgtcccaagccctacaagccagcccggaggtcacgagtcattggtggatagatggatcaggtcgcggttgaccgaggcagttaggctgtccaaccagggttttcaggcctacgatttccccgctgtcacaaccgcacagtattctttttggttatacgagttgtgcgacgtgtacctcgagtgcttgaaacccgtgctcaacggagtggaccaggtagcagcagagtgcgcaaggcagaccttgtatacatgtctggatgtgggtcttaggcttctgtcgccttttatgccctttgtgaccgaggaactgttccagcggctccctcgccgtatgccacaggcgcctccaagcctgtgcgtgacgccctatccagaacctagcgagtgctcttggaaagatcctgaggctgaggctgccttggaactcgctctatccattacccgggcagttagatcacttcgggctgattacaatctgacccgaatacgcccagattgctttttagaggtcgccgatgaggctacaggagctttagcttccgcagtaagtggctatgtgcaggccttggctagtgccggtgttgtggccgtgctggctctgggggctcccgcaccacagggatgcgcagtggcattggcctctgatcggtgctctatccacctgcagctgcagggcttggtagatccggcacgcgagttggggaaactgcaggctaaaagagtggaagctcaacgccaggcccagaggttgcgcgaaagacgcgctgccagcggttatcccgtgaaagtccctctggaagtacaagaggccgacgaagctaagctgcaacaaaccgaagcggaactccgcaaggtagatgaagccattgctctgtttcagaagatgctctag

SEQ ID NO: 163666 - DNA, 525 bp, Artificial Sequence
  derived and/or modified sequence
atgagtacactttacgtgtcacctcaccccgatgcttttccatccctgcgtgcactcatcgccgcaaggtacggtgaagcgggagagggcccaggctggggtggagcccatccaaggatctgtctccaacctcctcccactagccgcacacccttcccgcctcccagattaccggctctggagcaaggtcctggcggtctgtgggtttggggcgcaacagcggtggcacaactgctgtggcctgcaggtttgggaggtccaggcggttctcgagcagccgttctggtacaacagtgggtaagctacgccgacactgaactaatacctgctgcttgtggagccacactgcccgctttaggattacgcagcagcgcacaagatccccaggccgtgttgggggcactcggacgtgctctatcccccctggaggaatggttgagactgcacacatatctggcaggcgaggccccaacattggcagacctggcggctgtgacagcccttctcctcccattccgctattag

SEQ ID NO: 163667 - DNA, 525 bp, Artificial Sequence
  derived and/or modified sequence
atgagtaccctgtatgtttccccccatccagatgcgttcccgtctctgcgagctcttatcgcagcacgttatggagaggcaggagaaggaccgggatggggcggagctcatcctcgcatctgtttgcaaccccctcctactagccgcacgcctttcccgccacccaggcttcccgctctggagcaggggcctgggggactttgggtctggggagccacagctgttgctcagctgctgtggcccgcagggctgggtgggccaggcggatcaagggcagcagtgttggtgcagcagtgggtctcctatgcggataccgagttaattcccgcagcttgtggcgctaccttacccgcattaggcctgcgctctagcgcacaggaccctcaagccgtcctcggcgcactggggagagctctgagcccactggaggaatggctgcgtctgcacacatacctggccggagaggcacccaccctcgctgacctggcagcggtgacagctttactgctaccttttcgctattag

SEQ ID NO: 163668 - DNA, 3795 bp, Artificial Sequence
  derived and/or modified sequence
atgtcgacgctgtacgtttcaccccatccggatgcattcccatccctcagggccctgattgccgctagatatggcgaggccggtgaaggtccaggctggggcggagctcatcctcgcatatgcttgcagcctcctccaacatcacgaacaagttttccccctcctcggttgccagcgctcgaacagggtcctggcggactttgggtgtggggagccacagccgtggcacagcttctttggcctgccggattgggaggccctgggggaagccgcgctgctgtcctggttcaacagtgggtcagttatgcagacactgagctcataccagctgcttgcggcgctactctacctgccctggggctgcgcagcagtgctcaggacccccaagcagttttgggcgcacttggacgggcactgtctcccctggaagagtggctcaggctccacacgtatctcgcaggtgaagcccctacactagctgatctcgccgctgtgaccgccttattattgccttttcggtacgtgcttgatccgccagccaggaggatatggaataatgtgactagatggttcgtgacatgtgttagacagccagagtttcgagcggtgctgggcgaagtcgtcctttactctggcgctcgaccgctctctcatcagccaggacctgaggcccctgcgctgcccaagaccgctgcgcaactcaagaaggaagctaaaaagcgggagaagctcgaaaaattccagcaaaaacaaaaaatccagcagcagcagccaccacccggtgagaagaagcctaagccggagaagagggagaagcgggacccaggagttatcacctacgacctgcctacccctcccggagagaaaaaggacgtgtcagggccaatgcccgactcttacagccccaggtacgtggaagcagcttggtacccttggtgggaacagcagggcttctttaagcctgaatatggacggcctaacgtgagtgcagccaacccccgtggcgtgttcatgatgtgtatccctccacctaacgtgacaggcagcctgcatctcggtcacgctctgactaatgctattcaggattccctgaccaggtggcaccggatgcgaggcgaaacaacgctttggaaccccggttgcgatcacgccggtattgcaactcaggtggtagtggaaaaaaaactctggcgtgagcagggactaagcaggcaccagctaggcagagaagcctttcttcaggaggtttggaagtggaaagaggaaaaaggagatcggatttaccatcagctcaagaagcttgggagtagcttggattgggaccgtgcctgctttactatggacccgaaactgtcggctgccgttacggaagccttcgtgaggctacacgaggaaggcataatctatagatccaccaggctggtgaactggtcttgcacactcaacagcgccataagcgatattgaagtagacaagaaagagttgacaggcaggaccctgctgtcagttcctggttacaaggagaaagtagaattcggagtactcgtgtcttttgcttacaaggtgcagggatcagacagcgatgaagaagtcgtcgttgccacaacacgcatagagacaatgctgggcgacgtcgcagtagcagtgcaccccaaagacacgcgataccagcacctgaaaggaaagaacgttattcatccctttctttcccggtccttgcccatcgtgttcgatgagttcgtcgacatggatttcggaactggtgcagtgaaaataacacccgctcacgaccagaacgattacgaggtaggtcagagacacggcttagaagccattagcattatggacagtaggggcgctctgattaatgtgccgcctccgttcctcggcctacctcgcttcgaagcgcgtaaggccgtgcttgtggctttaaaggagagaggcctctttcggggtatcgaagacaaccccatggtcgtccctctgtgcaacaggagcaaggatgtggtggaacctttactgcggcctcagtggtacgtccgttgcggagagatggcacaggccgcaagtgcagccgtgactaggggcgatctgaggatcctccccgaggcgcaccagcgcacatggcacgcctggatggataacatcagggagtggtgtataagtcggcagctgtggtgggggcacagaatcccggcatattttgtcacggtgtccgaccctgccgtgccccctggcgaggaccctgacgggaggtattgggttagtggacggaatgaagcagaggcccgagaaaaggctgcaaaagagttcggcgtgtccccggataagatatcactgcagcaggatgaagacgtgctggatacgtggttttccagtggccttttccccctatctatactgggctggcctaatcagtcagaggatttgagcgtattttatcccggaaccttactggaaactggccacgacatactgtttttctgggtcgcccgaatggtcatgcttggccttaaactgaccggtagattaccgttccgcgaggtctaccttcacgccatcgtccgggatgctcacggaaggaaaatgagcaaatccctgggcaacgtcattgatcctctcgacgttatatatggcatatctttgcagggactccataatcagctgctgaattccaacctcgatccaagtgaagtcgagaaggccaaagaagggcagaaggcagattttcccgctgggattccagaatgtggtactgacgctctaagattcggcctttgcgcgtacatgtcccagggcagggatattaatctggatgtgaatcgcatccttggttaccgccacttttgcaataaactgtggaatgctaccaagttcgctctacgtgggctggggaaaggcttcgttccctctcccacttcacaaccgggtgggcacgagtccttagtggatcgatggattcggtccaggttgacggaggctgtccgactgtctaatcaggggttccaggcctacgacttcccagccgttaccaccgctcaatattccttttggctttacgaactgtgtgatgtgtacctcgagtgtctgaagccagtgctcaacggagtagatcaggtggcagccgaatgcgccaggcagaccttatatacttgcctcgatgttggactcaggctgctgtcacccttcatgccgtttgttacagaggagttgtttcaacgcctgccccgacggatgccccaggctcctccctccctgtgcgttacaccatatcccgagccatccgagtgctcttggaaggacccagaagcagaggccgcactggagctggcattgagtattaccagggctgtgcgcagtctgcgggctgactataacttaactaggattaggcccgattgctttcttgaagttgctgacgaggctaccggagcactggcttccgccgtctccggctatgtacaggccctagcgagtgcaggtgttgtggccgtgttagccctgggagcacccgctccgcaggggtgtgccgtggctcttgcaagcgaccgctgttctatacatttgcagcttcagggtctggtcgatcccgcaagagaactgggcaaactgcaagccaaaagagtggaggcccagagacaggcccagagattgagggaaagacgggctgctagcggatatcctgtgaaggtgccattggaggtacaggaggccgacgaggccaagctacagcagacagaagcggagctgaggaaagtggacgaagctatcgccttgttccagaagatgctgtag

SEQ ID NO: 163669 - DNA, 525 bp, Artificial Sequence
  derived and/or modified sequence
atgagcactctgtatgtctcaccccatcctgacgctttcccaagtctgagggccctgattgctgcgcgttacggagaggccggtgagggaccaggttggggaggcgctcacccacggatctgcttgcagccgcctcctacgtcccggactccttttcctccccctagactccctgcattagaacaggggccagggggactctgggtgtggggtgcaacagcagtggcccagctgctctggccagccggactgggcggaccaggagggagccgagcagccgttttggtccagcagtgggtgagctacgcagataccgaactgatcccggctgcctgcggtgctactttgccggctctgggtctgagaagctcagctcaggatccacaggccgttttgggcgcactcggcagggctttgagcccacttgaagagtggcttcgcctgcatacttatctggctggcgaagctcccacactggccgacttggctgctgtgacagccctgctgttacccttcagatactag

SEQ ID NO: 163670 - DNA, 894 bp, Artificial Sequence
  derived and/or modified sequence
atgccggactcttatagcccacgctacgtggaggctgcttggtatccctggtgggaacaacagggattcttcaaacccgaatatgggcgtccgaacgtctctgctgccaatccgagaggtgttttcatgatgtgtatcccgccacccaacgtcacaggtagtctgcacctcggtcatgcacttaccaacgcaatacaggattcgctgactcggtggcatcggatgaggggggaaaccaccttgtggaaccccggatgcgaccacgctggaatcgccacacaagtggttgtagaaaaaaaattgtggagggagcaaggcctgagcagacatcagctgggacgcgaagcattcctgcaggaggtttggaaatggaaggaagaaaagggggacaggatttaccaccagctgaagaagttgggctctagtttggattgggatcgtgcatgcttcactatggatcccaagctttcagccgcagtcaccgaggccttcgtccgtttgcatgaagagggcatcatctatcgctctaccaggctggtgaactggtcatgtaccctgaattccgccataagcgacatagaggtcgataagaaagagcttacagggaggactttgctgtctgtgcccggatacaaggaaaaggtggaatttggggtgctggtgtcttttgcatataaggtgcaaggtagcgactctgacgaggaggtggtcgttgccacgacccggatcgaaaccatgttaggcgacgtcgccgtcgctgttcaccccaaggatactagataccaacatctcaaggggaagaatgtgattcaccccttcctgtcaaggtccctgcccatcgtgttcgacgaattcgtcgacatggacttcggaactggacccgcacaggtatag

SEQ ID NO: 163671 - DNA, 288 bp, Artificial Sequence
  derived and/or modified sequence
tagcccgcaggcctcgggggtcccggaggcagtcgcgcagccgtactggtacagcagtgggtctcttatgcggataccgagttgataccagccgcatgcggagcaactctgcctgctctaggcctgcggtctagcgcgcaggatccccaggcggtgttgggggctcttggacgtgcactttctcccctggaggagtggctgcgtcttcacacgtatctggcaggggaggcaccaaccttggccgaccttgcagccgtgaccgccttgctcctaccctttcgttattag

SEQ ID NO: 163672 - DNA, 3795 bp, Artificial Sequence
  derived and/or modified sequence
atgtccacactctatgtgtccccccaccccgacgcctttcccagcctcagggccctgatagcggctaggtacggagaggccggagagggtccaggctggggtggcgcacatcctaggatctgcttgcaacctccacccacctcacgcaccccgtttcctcctcctcgcttacccgcattggaacagggcccaggtgggctctgggtatggggcgctaccgctgtggcccagctgctatggcctgccggtttagggggtcctgggggatcacgtgcagccgtgctagtgcagcaatgggtgagttatgcagacactgagttaatccccgcagcctgtggtgcgacccttcccgcactgggtcttcggagtagtgctcaggatccacaggccgtattgggggcattggggagagcactgtctccgttggaagaatggctgcggcttcatacctaccttgctggtgaagcccctaccctcgccgatcttgccgcagtgacagcgctcttgctccccttcagatacgtgcttgatcctccagccaggagaatatggaataacgtgactcggtggtttgtgacttgcgttaggcagcctgagttccgcgctgtgcttggagaggttgttctgtattccggtgcccgacctctcagccatcagcccggacccgaggccccagctctgcccaagaccgcagcccaattgaaaaaggaggctaagaagcgggagaaactggaaaagtttcagcaaaagcagaaaatacaacagcagcagcctccacctggagagaaaaaaccgaagcctgaaaagcgggagaagagagacccgggtgtcattacttatgacctccccacacctcctggggaaaagaaagacgtgagcggcccaatgcctgactcttattcccccaggtacgtggaagctgcttggtacccatggtgggagcagcagggattcttcaagcccgagtatggacgcccaaacgtgagcgctgccaatcccagaggagtcttcatgatgtgtataccacccccaaatgtgacgggctctctgcatctgggacacgctctgaccaatgccattcaggactccctgactcgctggcaccgcatgcggggagagactacgctgtggaatcccggatgtgatcatgcagggattgcaactcaggtggtggtggagaagaagttatggcgggaacaagggctttcccgtcatcagctgggacgggaggcatttcttcaggaggtttggaagtggaaggaagagaagggcgaccggatctaccatcagctgaaaaagctgggctcatcgctagactgggaccgtgcatgtttcaccatggatccaaaacttagtgcagctgtgaccgaggcctttgtacgtctgcacgaggaaggaatcatttaccgcagcacccgtctggttaactggagctgtaccttgaactcagccatcagcgacatagaggtagacaagaaagagctcaccggtcggaccttactgtccgtgccaggatataaagaaaaagttgagttcggcgtgctggtgagttttgcgtacaaggttcaggggtctgacagcgacgaagaagtggttgttgccaccacccgcatcgaaactatgttgggtgatgtggccgttgcagtccatcctaaggacacaagatatcagcacctgaagggtaaaaacgtcatacatcccttcctgtccaggagcctgcctattgtatttgatgaatttgtcgacatggattttggtaccggggcagtcaagattacccctgcccatgatcagaatgactatgaggtaggccagaggcatggacttgaggcaattagcattatggatagtaggggagcgctcatcaacgttcctccacctttcttaggcctgccccgattcgaagcaagaaaagcagtcctggttgccctgaaggaaaggggactgtttcgtgggattgaagacaacccaatggtcgtgcccctgtgcaatagaagcaaagatgtagtggaaccgttgctccggccacagtggtatgtgaggtgtggggaaatggcccaggctgcttctgctgccgtgacaagaggcgacctaagaattttgccagaggctcaccagaggacatggcatgcttggatggataatattcgggaatggtgcatctcacgccagctctggtgggggcaccgcatcccagcatacttcgtcactgttagcgatcctgctgtgccccctggcgaggaccctgatggccgttactgggtaagcggccgaaatgaagcagaggcacgagagaaggcagccaaggagttcggcgtgtctccggacaagatttcactgcagcaggacgaggacgtcctggatacctggtttagttctggcctttttcccctgagtatcctgggatggccaaatcagtctgaggatctttctgttttttacccaggaacactcctagagaccggtcatgacatactgttcttctgggtggccagaatggtcatgctgggcctgaaactgacagggaggctgccgtttagggaggtttacctgcacgccatcgtgcgtgacgctcatggacggaagatgtccaaatccctgggaaacgtcattgatccactggacgtgatttacggtatctccctgcaaggcctgcataatcagctgttgaactcgaacttggatccttcggaggtagagaaggccaaggagggacaaaaggctgacttccccgcagggatacctgagtgtgggactgacgccctgagatttggtctgtgcgcctatatgtctcagggcagggacattaacctcgacgtgaacaggattcttggctatcgtcacttttgtaacaaactctggaacgcgacaaagtttgctctccggggactcggcaagggattcgtcccttccccaactagccagccgggaggtcatgaaagcctggtcgatcggtggatccgtagccgcctgacagaggccgtgaggttgagcaaccagggctttcaggcgtacgacttccctgccgtgactactgcccagtactctttttggctttacgaattgtgtgatgtctatttagaatgcctgaagccagtactgaacggggttgaccaggttgcagcagagtgtgccaggcagactctatacacctgcttagacgtcggactgcggcttttatcgccattcatgcctttcgttacagaagagctgtttcagagattacccaggaggatgcctcaagctcctccatccctgtgtgtgactccttacccggagcccagtgagtgtagctggaaagaccctgaagcggaggccgctctggaattggctctcagcataacgagggcagtgcgtagtcttagggccgattataacctgacgcgcatccgcccagactgcttcctggaggttgcagatgaagccactggggcattggccagcgcagtgagcggctatgtgcaggctctggcatcggcaggggtcgtggccgtgctggcgctgggagcccctgccccacaagggtgcgcagtggcccttgccagtgaccgatgctctattcatctgcaactccagggattagttgatcccgcaagggagttgggcaaactccaggccaagagagtggaagcccaaaggcaggctcaacgactgcgggaaagaagagccgcttctgggtaccccgtgaaggtgcccctcgaggtgcaagaggctgacgaagccaaactgcagcagaccgaggcagagctcagaaaagtcgacgaagctatcgcccttttccaaaagatgctttag

SEQ ID NO: 163673 - DNA, 894 bp, Artificial Sequence
  derived and/or modified sequence
atgccagattcatattccccacgctatgtggaggccgcttggtacccctggtgggaacagcagggcttttttaaacctgagtacggtcgacccaatgtttctgccgcaaatccacgcggtgtatttatgatgtgcattccaccaccaaacgttactggcagtctgcatctaggccacgcgctgactaacgccattcaggatagcctcacccggtggcaccgcatgcgtggcgagactactttgtggaacccaggttgcgaccatgcgggtatagcgacacaggtagtggtggaaaaaaagttatggcgcgagcagggattaagcagacaccaacttggtagggaggcctttctacaggaggtgtggaaatggaaggaggagaagggtgaccgaatctatcatcaattaaaaaaacttggtagcagcctggactgggaccgagcctgcttcacaatggatcctaaactgagtgctgcagtcacagaagcattcgttaggctgcacgaggagggcattatttaccgttcaactcgcttggtcaactggtcctgcactctgaattcagccatttctgatatagaggtcgataaaaaggagctgaccggtcgtactctgctctccgtgcctggatacaaagagaaggttgagttcggagtgctggtcagtttcgcgtacaaagtccaggggagtgactccgacgaggaagttgttgtggctaccacgcggatcgagacaatgctgggagatgtggcggttgctgttcatcctaaagacactcgataccagcatctgaaaggcaagaatgtgattcaccccttcctgtcaagatcactgccaatagtgtttgatgaattcgtggacatggacttcggcacggggcctgcccaggtgtag

SEQ ID NO: 163674 - DNA, 894 bp, Artificial Sequence
  derived and/or modified sequence
atgccagactcatacagtccaagatatgtggaggcagcctggtacccatggtgggagcagcaaggctttttcaaacctgagtacggcagacctaacgtctccgcggctaatcctaggggtgtgttcatgatgtgcatacctcccccaaatgtcaccgggagcctacatctaggtcacgccctgaccaacgctattcaagattctctaactagatggcaccgcatgcggggtgagaccaccttgtggaatccgggatgcgaccacgccggtatcgccacccaagtagttgtagagaagaagttgtggcgggagcagggactctctagacaccagttaggccgtgaggcctttctccaggaagtttggaagtggaaggaggaaaaaggagaccggatttaccatcaactgaaaaaattgggatctagcttggattgggaccgcgcttgcttcacaatggatcccaagctgtcggccgctgtgacagaagccttcgtccgcttacacgaagagggtattatttaccgttctacccgccttgtcaattggagttgcacccttaattcagcaattagcgacatcgaagtcgacaagaaagaactgaccggaaggacactgctttccgtgcccggatacaaagagaaggtggagttcggtgttcttgtgtcattcgcttacaaggttcaagggagcgactctgacgaggaagtagtggtagctaccacgcgcatcgagaccatgctcggcgatgttgcagtagcggtgcaccctaaagatactcgatatcagcaccttaagggaaagaacgttattcaccccttcctgtcccggagccttcccatcgtttttgatgaatttgttgacatggacttcggaacaggccctgcacaggtgtag

SEQ ID NO: 163675 - DNA, 894 bp, Artificial Sequence
  derived and/or modified sequence
atgccggattcatatagcccgcgatacgtcgaagctgcctggtacccatggtgggagcaacagggttttttcaagccagaatacgggagacccaacgtttcggctgcgaatcccaggggtgtctttatgatgtgtatccccccaccaaacgtcacaggcagcctgcatttgggtcatgcactgacaaatgccatccaggacagcctgactcgttggcatcgcatgaggggggagaccaccctgtggaaccctggctgcgaccacgcaggaatagctacccaggtggtggtggagaagaagttgtggcgcgagcagggattgtccagacaccagctgggcagggaagcattcttacaggaggtctggaagtggaaggaggagaagggagatcggatctatcatcagctgaagaagctcggctcttccctggattgggacagagcatgtttcaccatggacccaaagctctccgccgcagtgaccgaagcattcgtcaggctgcatgaagagggcatcatctaccgatcgactagactggtaaactggagctgtacccttaattctgctatttcagacatagaagtcgataaaaaggagctgaccggccgaactttgctgtcagtcccaggctacaaagagaaagtcgagttcggagtgctcgtgagctttgcatacaaagtgcagggaagcgactctgacgaggaggttgttgtggctactacaagaatcgagaccatgctcggggatgtcgcggtggcagtgcatcccaaggatactaggtaccagcatctgaagggaaagaacgttattcacccattcttatcccgctctttgccaatcgtgtttgacgagttcgtggacatggacttcgggaccggtcccgcacaggtgtag

SEQ ID NO: 163676 - DNA, 894 bp, Artificial Sequence
  derived and/or modified sequence
atgccggacagctactctccaaggtacgtcgaggctgcatggtatccatggtgggagcagcagggcttcttcaagccagaatacggtcgacccaacgtcagtgctgccaatcccagaggggtgtttatgatgtgtatccccccaccaaatgtgactggaagtttgcacctgggacatgccctcacaaacgcaattcaggactcactaactcggtggcataggatgcgtggcgagacgactttatggaatccaggatgtgaccatgccggtatcgcaacgcaagtggtggttgagaaaaagctctggcgcgagcaaggcctctctcgacaccagctggggagagaggcatttctccaagaggtgtggaaatggaaagaggagaagggagaccgaatctatcatcagctgaaaaagttggggtcgtctttggattgggaccgggcatgttttacgatggaccctaagcttagcgctgctgtcaccgaagcgtttgtgcgtttgcatgaggaagggatcatataccggtcaacccgcctggtcaactggtcttgcactcttaactcggcaatctccgacattgaggttgacaaaaaagaactgaccgggaggactctccttagcgtgcctgggtacaaggagaaggtagagtttggtgtgttagtgagtttcgcttacaaagtccaaggatccgactccgacgaggaagtggtggtggctactacacgcattgagacaatgctaggcgatgtcgccgtggcggtgcatcctaaagacacacgctaccagcatttgaagggcaagaatgtgatccacccatttctgtctcgctccctcccgattgtattcgatgagttcgtcgatatggatttcggtacagggcctgcccaggtatag

SEQ ID NO: 163677 - DNA, 4312 bp, Artificial Sequence
  derived and/or modified sequence
cacaaggtgcccgtggcggcgcctgacgggagcgtcgtgctcaggggtgtcctctcgtcctgcgtccgcgcccagcgccccgcgccccgcgctgttcctcgtgagaccggcgggcggcgagccgcgcggcccccggggcagtgtcggacacggcgggcgcgcactcgcaggcggggcacggccgcccccgccaggacccgcaggcccggaaacgctccctgtcacaaaggggggaacacgtgggcgccggctgccggggcggcgatcttagggaactagggtcacctggagagccgcccaccgtctctgcccgctcgactcctccgcccgggccgctcggccggtccagccgcggccggcgcctggctgtgaggtggattcccggcccagtctgaccatctccctccagtttttccacttcgttcggaccttctcataactatgtccaccctctacgtctcccctcacccagatgccttccccagcctccgagccctcatagccgctcgctatggggaggctggggagggtcccggatggggaggagcccacccccgcatctgtctccagccacccccgactagcaggactccctttcccccaccccgcctgccggccctggagcaggggcccggtgggctctgggtgtggggggccacggctgtggcccagctgctgtggccagcaggcctggggggcccagggggcagccgggcggctgtccttgtccaacagtgggtcagttacgccgacacggagttaataccagctgcctgtggagcaacgctgccggccctgggactccgaagctcggcccaggacccccaggctgtgctgggggccctgggcagggccctgagccccttggaggagtggcttcggctgcacacctacttggccggggaggcccccactctggctgacctggcggctgtcacagccttgctgctgcctttccgatacgtcctagacccacctgcccgccggatctggaataatgtgactcgctggtttgtcacgtgtgtccggcagccagaattccgagccgtgctaggagaagtggttctatactcaggagccaggcctctctctcatcagccaggccccgaggctcctgccctcccaaagacagctgctcagctcaagaaagaggcaaagaaacgggagaagctagagaaattccaacagaagcagaagatccaacagcagcagccacctccaggggagaagaaaccaaaaccagagaagagggagaaacgggatcctggggtcattacctatgacctcccaaccccacccggggaaaagaaagatgtcagtggccccatgcccgactcctacagccctcggtatgtggaggctgcctggtacccttggtgggagcagcagggcttcttcaagccagagtatgggcgtcctaatgtgtcagcagcaaatccccgaggtgtcttcatgatgtgcatcccaccccccaatgtgacaggctccctgcacctgggccatgcactcaccaacgccatccaggactccctgactcgatggcaccgcatgcgtggggagaccaccctgtggaaccctggctgtgaccatgcaggtattgccacccaggtggtggtggagaagaagctatggcgtgagcagggactgagccggcaccagctgggccgcgaggcctttctacaggaagtctggaagtggaaggaggagaaaggtgaccggatttaccaccagttgaagaagcttggcagctccttggactgggatcgagcctgtttcaccatggaccctaaactctcagcagctgtgacagaggcctttgtccggcttcacgaggaaggcatcatctatcgcagtacccgccttgttaactggtcctgcaccctcaactccgccatctctgacattgaggtggataagaaggagctgacaggtcgcaccctgctctccgtgcctggctacaaggagaaggtggagttcggggtcctcgtgtcctttgcctataaggtccaaggctcagatagcgacgaggaggtggtggtggcaacaactcggatcgagacaatgctgggagatgtggctgtagctgtgcaccccaaagataccagataccagcacctgaaggggaagaacgtgatccacccattcctgtctcggagccttcccattgtcttcgatgaatttgtggacatggactttggcacaggtgctgtgaagatcacccccgcacatgaccaaaatgactatgaagttgggcagcggcacgggctggaggccatcagcatcatggactcccggggggccctcatcaatgtgcctccgcctttcctgggcctgcccaggtttgaggccaggaaagcggtgctggtggcgctgaaggagcggggactgttccgtggcattgaggacaaccccatggtggtgccactttgcaaccggtcgaaggacgtggtagagcctctgctgcggccgcagtggtacgttcgctgcggggagatggcccaggctgccagcgccgctgtgactcggggtgacctccgcatcctgcctgaggcccatcagcgcacatggcatgcctggatggacaacatccgggagtggtgcatttccaggcagctgtggtggggccatcgcatcccagcctactttgtcactgtcagtgacccagcggtgccccctggggaggaccctgatgggcggtactgggtgagtggacgcaatgaggcggaggcccgggagaaggcagccaaggagttcggagtgtcccctgacaagatcagtctccagcaagatgaggatgtattggatacctggttctcctctggcctcttccccttatccattttgggctggcccaaccagtcagaagacctgagtgtgttctaccccgggacactgctggagaccggtcatgacatcctcttcttctgggtggcccggatggtcatgctgggcctgaagctcacgggcaggctgccctttagagaggtctacctccatgccatcgtgcgagatgctcacggccggaagatgagcaagtctctaggcaatgtcatcgatcccctggacgtcatctatggaatctccctgcagggcctccacaaccagctgctgaacagcaacctggatcccagcgaggtggagaaggccaaagaagggcagaaagctgacttcccagcggggattcctgaatgtggcaccgatgctctccggtttggattatgtgcctacatgtcccagggtcgtgacatcaacctggatgtgaaccggatactgggttaccgccacttctgcaacaagctctggaatgccaccaagtttgcccttcgtggccttgggaagggttttgtgccctcacccacctcccagcccggaggccatgagagcctggtggaccgctggatccgcagccgcctgacagaggctgtgaggctcagcaatcaaggcttccaggcctacgacttcccggccgtcaccactgcccagtacagcttctggctctatgagctctgtgatgtctacttggagtgcctgaaacctgtactgaatggggtggaccaggtggcagctgagtgtgcccgccagaccctgtacacttgcctggacgttggcctgcggctgctctcacccttcatgcccttcgtgacggaggagctgttccagaggctgccccggaggatgccgcaagctccccctagcctctgtgttaccccctacccggagccctcagagtgctcctggaaggaccccgaggcagaagccgcccttgagctggcgctaagcatcacgcgagccgtgcgctccctgcgggccgactacaacctcacccggatccggcctgactgtttcctggaagtggcggatgaggccacgggcgccctggcatcggcggtgtcgggctacgtgcaggccctggccagcgcaggtgtggtggctgttctggccctgggggctcccgccccccagggttgcgctgtggctctggcttctgatcgctgctccatccacctgcagcttcaggggctggtggaccctgcacgggagctgggcaagctgcaagccaagcgagttgaggcccagcggcaggcccagcgtctgcgggaacgccgtgctgcctcgggctatcctgtcaaggtgccgctcgaagtccaggaggcagatgaagccaagctccaacagacagaagcagagctcaggaaggtggatgaggccatcgccctattccagaagatgctgtgatccaccacccagcttcacccctcacccccagcggctcaccatggggatggcagcaataaaatattttcccacaaaa

SEQ ID NO: 163678 - DNA, 804 bp, Artificial Sequence
  derived and/or modified sequence
ctcctgagagccttccacactccccgaagccccgcgatggtggatagttcctcttccccaggaactccccactgacactgcccctctgagagccaggtcctcggctcctgacagcctgcctggtcagaccctcagtcctatgggactcgggtgtctgcggcgaaggagctcccgtgagggtcccctctctactcaaacataggacccacctcgatcccgcagtcttcccctgtctctctttctccttaggtttttccacttcgttcggaccttctcataactatgtccaccctctacgtctcccctcacccagatgccttccccagcctccgagccctcatagccgctcgctatggggaggctggggagggtcccggatggggaggagcccacccccgcatctgtctccagccacccccgactagcaggactagctttcccccaccccgcctgccggccctggagcaggggcccggtgggctctgggtgtggggggccacggctgtggcccagctgctgtggccagcaggcctggggggcccagggggcagccgggcggctgtccttgtccaacagtgggtcagttacgccgacacggagttaataccagctgcctgtggagcaacgctgccggccctgggactccgaagctcggcccaggacccccaggctgtgctgggggccctgggcagggccctgagccccttggaggagtggcttcggctgcacacctacttggccggggaggcccccactctggctgacctggcggctgtcacagccttgctgctgcctttccgatac

SEQ ID NO: 163679 - DNA, 4312 bp, Artificial Sequence
  derived and/or modified sequence
cacaaggtgcccgtggcggcgcctgacgggagcgtcgtgctcaggggtgtcctctcgtcctgcgtccgcgcccagcgccccgcgccccgcgctgttcctcgtgagaccggcgggcggcgagccgcgcggcccccggggcagtgtcggacacggcgggcgcgcactcgcaggcggggcacggccgcccccgccaggacccgcaggcccggaaacgctccctgtcacaaaggggggaacacgtgggcgccggctgccggggcggcgatcttagggaactagggtcacctggagagccgcccaccgtctctgcccgctcgactcctccgcccgggccgctcggccggtccagccgcggccggcgcctggctgtgaggtggattcccggcccagtctgaccatctccctccagtttttccacttcgttcggaccttctcataactatgtccaccctctacgtctcccctcacccagatgccttccccagcctccgagccctcatagccgctcgctatggggaggctggggagggtcccggatggggaggagcccacccccgcatctgtctccagccacccccgactagcaggactagctttcccccaccccgcctgccggccctggagcaggggcccggtgggctctgggtgtggggggccacggctgtggcccagctgctgtggccagcaggcctggggggcccagggggcagccgggcggctgtccttgtccaacagtgggtcagttacgccgacacggagttaataccagctgcctgtggagcaacgctgccggccctgggactccgaagctcggcccaggacccccaggctgtgctgggggccctgggcagggccctgagccccttggaggagtggcttcggctgcacacctacttggccggggaggcccccactctggctgacctggcggctgtcacagccttgctgctgcctttccgatacgtcctagacccacctgcccgccggatctggaataatgtgactcgctggtttgtcacgtgtgtccggcagccagaattccgagccgtgctaggagaagtggttctatactcaggagccaggcctctctctcatcagccaggccccgaggctcctgccctcccaaagacagctgctcagctcaagaaagaggcaaagaaacgggagaagctagagaaattccaacagaagcagaagatccaacagcagcagccacctccaggggagaagaaaccaaaaccagagaagagggagaaacgggatcctggggtcattacctatgacctcccaaccccacccggggaaaagaaagatgtcagtggccccatgcccgactcctacagccctcggtatgtggaggctgcctggtacccttggtgggagcagcagggcttcttcaagccagagtatgggcgtcctaatgtgtcagcagcaaatccccgaggtgtcttcatgatgtgcatcccaccccccaatgtgacaggctccctgcacctgggccatgcactcaccaacgccatccaggactccctgactcgatggcaccgcatgcgtggggagaccaccctgtggaaccctggctgtgaccatgcaggtattgccacccaggtggtggtggagaagaagctatggcgtgagcagggactgagccggcaccagctgggccgcgaggcctttctacaggaagtctggaagtggaaggaggagaaaggtgaccggatttaccaccagttgaagaagcttggcagctccttggactgggatcgagcctgtttcaccatggaccctaaactctcagcagctgtgacagaggcctttgtccggcttcacgaggaaggcatcatctatcgcagtacccgccttgttaactggtcctgcaccctcaactccgccatctctgacattgaggtggataagaaggagctgacaggtcgcaccctgctctccgtgcctggctacaaggagaaggtggagttcggggtcctcgtgtcctttgcctataaggtccaaggctcagatagcgacgaggaggtggtggtggcaacaactcggatcgagacaatgctgggagatgtggctgtagctgtgcaccccaaagataccagataccagcacctgaaggggaagaacgtgatccacccattcctgtctcggagccttcccattgtcttcgatgaatttgtggacatggactttggcacaggtgctgtgaagatcacccccgcacatgaccaaaatgactatgaagttgggcagcggcacgggctggaggccatcagcatcatggactcccggggggccctcatcaatgtgcctccgcctttcctgggcctgcccaggtttgaggccaggaaagcggtgctggtggcgctgaaggagcggggactgttccgtggcattgaggacaaccccatggtggtgccactttgcaaccggtcgaaggacgtggtagagcctctgctgcggccgcagtggtacgttcgctgcggggagatggcccaggctgccagcgccgctgtgactcggggtgacctccgcatcctgcctgaggcccatcagcgcacatggcatgcctggatggacaacatccgggagtggtgcatttccaggcagctgtggtggggccatcgcatcccagcctactttgtcactgtcagtgacccagcggtgccccctggggaggaccctgatgggcggtactgggtgagtggacgcaatgaggcggaggcccgggagaaggcagccaaggagttcggagtgtcccctgacaagatcagtctccagcaagatgaggatgtattggatacctggttctcctctggcctcttccccttatccattttgggctggcccaaccagtcagaagacctgagtgtgttctaccccgggacactgctggagaccggtcatgacatcctcttcttctgggtggcccggatggtcatgctgggcctgaagctcacgggcaggctgccctttagagaggtctacctccatgccatcgtgcgagatgctcacggccggaagatgagcaagtctctaggcaatgtcatcgatcccctggacgtcatctatggaatctccctgcagggcctccacaaccagctgctgaacagcaacctggatcccagcgaggtggagaaggccaaagaagggcagaaagctgacttcccagcggggattcctgaatgtggcaccgatgctctccggtttggattatgtgcctacatgtcccagggtcgtgacatcaacctggatgtgaaccggatactgggttaccgccacttctgcaacaagctctggaatgccaccaagtttgcccttcgtggccttgggaagggttttgtgccctcacccacctcccagcccggaggccatgagagcctggtggaccgctggatccgcagccgcctgacagaggctgtgaggctcagcaatcaaggcttccaggcctacgacttcccggccgtcaccactgcccagtacagcttctggctctatgagctctgtgatgtctacttggagtgcctgaaacctgtactgaatggggtggaccaggtggcagctgagtgtgcccgccagaccctgtacacttgcctggacgttggcctgcggctgctctcacccttcatgcccttcgtgacggaggagctgttccagaggctgccccggaggatgccgcaagctccccctagcctctgtgttaccccctacccggagccctcagagtgctcctggaaggaccccgaggcagaagccgcccttgagctggcgctaagcatcacgcgagccgtgcgctccctgcgggccgactacaacctcacccggatccggcctgactgtttcctggaagtggcggatgaggccacgggcgccctggcatcggcggtgtcgggctacgtgcaggccctggccagcgcaggtgtggtggctgttctggccctgggggctcccgccccccagggttgcgctgtggctctggcttctgatcgctgctccatccacctgcagcttcaggggctggtggaccctgcacgggagctgggcaagctgcaagccaagcgagttgaggcccagcggcaggcccagcgtctgcgggaacgccgtgctgcctcgggctatcctgtcaaggtgccgctcgaagtccaggaggcagatgaagccaagctccaacagacagaagcagagctcaggaaggtggatgaggccatcgccctattccagaagatgctgtgatccaccacccagcttcacccctcacccccagcggctcaccatggggatggcagcaataaaatattttcccacaaaa

SEQ ID NO: 163680 - DNA, 1541 bp, Artificial Sequence
  derived and/or modified sequence
cacaaggtgcccgtggcggcgcctgacgggagcgtcgtgctcaggggtgtcctctcgtcctgcgtccgcgcccagcgccccgcgccccgcgctgttcctcgtgagaccggcgggcggcgagccgcgcggcccccggggcagtgtcggacacggcgggcgcgcactcgcaggcggggcacggccgcccccgccaggacccgcaggcccggaaacgctccctgtcacaaaggggggaacacgtgggcgccggctgccggggcggcgatcttagggaactagggtcacctggagagccgcccaccgtctctgcccgctcgactcctccgcccgggccgctcggccggtccagccgcggccggcgcctggctgtgaggtggattcccggcccagtctgaccatctccctccagtttttccacttcgttcggaccttctcataactatgtccaccctctacgtctcccctcacccagatgccttccccagcctccgagccctcatagccgctcgctatggggaggctggggagggtcccggatggggaggagcccacccccgcatctgtctccagccacccccgactagcaggactccctttcccccaccccgcctgccggccctggagcaggggcccggtgggctctgggtgtggggggccacggctgtggcccagctgctgtggccagcaggcctggggggcccagggggcagccgggcggctgtccttgtccaacagtgggtcagttacgccgacacggagttaataccagctgcctgtggagcaacgctgccggccctgggactccgaagctcggcccaggacccccaggctgtgctgggggccctgggcagggccctgagccccttggaggagtggcttcggctgcacacctacttggccggggaggcccccactctggctgacctggcggctgtcacagccttgctgctgcctttccgatacgtcctagacccacctgcccgccggatctggaataatgtgactcgctggtttgtcacgtgtgtccggcagccagaattccgagccgtgctaggagaagtggttctatactcaggagccaggcctctctctcatcagccaggccccgaggctcctgccctcccaaagacagctgctcagctcaagaaagaggcaaagaaacgggagaagctagagaaattccaacagaagcagaagatccaacagcagcagccacctccaggggagaagaaaccaaaaccagagaagagggagaaacgggatcctggggtcattacctatgacctcccaaccccacccggggaaaagaaagatgtcagtggccccatgcccgactcctacagccctcggtatgtggaggctgcctggtacccttggtgggagcagcagggcttcttcaagccagagtatgggcgtcctaatgtgtcagcagcaaatccccgaggtgtcttcatgatgtgcatcccaccccccaatgtgacaggctccctgcacctgggccatgcactcaccaacgccatccaggactccctgactcgatg

SEQ ID NO: 163681 - DNA, 804 bp, Artificial Sequence
  derived and/or modified sequence
ctcctgagagccttccacactccccgaagccccgcgatggtggatagttcctcttccccaggaactccccactgacactgcccctctgagagccaggtcctcggctcctgacagcctgcctggtcagaccctcagtcctatgggactcgggtgtctgcggcgaaggagctcccgtgagggtcccctctctactcaaacataggacccacctcgatcccgcagtcttcccctgtctctctttctccttaggtttttccacttcgttcggaccttctcataactatgtccaccctctacgtctcccctcacccagatgccttccccagcctccgagccctcatagccgctcgctatggggaggctggggagggtcccggatggggaggagcccacccccgcatctgtctccagccacccccgactagcaggactccctttcccccaccccgcctgccggccctggagcaggggcccggtgggctctgggtgtggggggccacggctgtggcccagctgctgtggccagcaggcctggggggcccagggggcagccgggcggctgtccttgtccaacagtgggtcagttacgccgacacggagttaataccagctgcctgtggagcaacgctgccggccctgggactccgaagctcggcccaggacccccaggctgtgctgggggccctgggcagggccctgagccccttggaggagtggcttcggctgcacacctacttggccggggaggcccccactctggctgacctggcggctgtcacagccttgctgctgcctttccgatac

SEQ ID NO: 163682 - DNA, 3627 bp, Artificial Sequence
  derived and/or modified sequence
caggcctggggggcccagggggcagccgggcggctgtccttgtccaacagtgggtcagttacgccgacacggagttaataccagctgcctgtggagcaacgctgccggccctgggactccgaagctcggcccaggacccccaggctgtgctgggggccctgggcagggccctgagccccttggaggagtggcttcggctgcacacctacttggccggggaggcccccactctggctgacctggcggctgtcacagccttgctgctgcctttccgatacgtcctagacccacctgcccgccggatctggaataatgtgactcgctggtttgtcacgtgtgtccggcagccagaattccgagccgtgctaggagaagtggttctatactcaggagccaggcctctctctcatcagccaggccccgaggctcctgccctcccaaagacagctgctcagctcaagaaagaggcaaagaaacgggagaagctagagaaattccaacagaagcagaagatccaacagcagcagccacctccaggggagaagaaaccaaaaccagagaagagggagaaacgggatcctggggtcattacctatgacctcccaaccccacccggggaaaagaaagatgtcagtggccccatgcccgactcctacagccctcggtatgtggaggctgcctggtacccttggtgggagcagcagggcttcttcaagccagagtatgggcgtcctaatgtgtcagcagcaaatccccgaggtgtcttcatgatgtgcatcccaccccccaatgtgacaggctccctgcacctgggccatgcactcaccaacgccatccaggactccctgactcgatggcaccgcatgcgtggggagaccaccctgtggaaccctggctgtgaccatgcaggtattgccacccaggtggtggtggagaagaagctatggcgtgagcagggactgagccggcaccagctgggccgcgaggcctttctacaggaagtctggaagtggaaggaggagaaaggtgaccggatttaccaccagttgaagaagcttggcagctccttggactgggatcgagcctgtttcaccatggaccctaaactctcagcagctgtgacagaggcctttgtccggcttcacgaggaaggcatcatctatcgcagtacccgccttgttaactggtcctgcaccctcaactccgccatctctgacattgaggtggataagaaggagctgacaggtcgcaccctgctctccgtgcctggctacaaggagaaggtggagttcggggtcctcgtgtcctttgcctataaggtccaaggctcagatagcgacgaggaggtggtggtggcaacaactcggatcgagacaatgctgggagatgtggctgtagctgtgcaccccaaagataccagataccagcacctgaaggggaagaacgtgatccacccattcctgtctcggagccttcccattgtcttcgatgaatttgtggacatggactttggcacaggtgctgtgaagatcacccccgcacatgaccaaaatgactatgaagttgggcagcggcacgggctggaggccatcagcatcatggactcccggggggccctcatcaatgtgcctccgcctttcctgggcctgcccaggtttgaggccaggaaagcggtgctggtggcgctgaaggagcggggactgttccgtggcattgaggacaaccccatggtggtgccactttgcaaccggtcgaaggacgtggtagagcctctgctgcggccgcagtggtacgttcgctgcggggagatggcccaggctgccagcgccgctgtgactcggggtgacctccgcatcctgcctgaggcccatcagcgcacatggcatgcctggatggacaacatccgggagtggtgcatttccaggcagctgtggtggggccatcgcatcccagcctactttgtcactgtcagtgacccagcggtgccccctggggaggaccctgatgggcggtactgggtgagtggacgcaatgaggcggaggcccgggagaaggcagccaaggagttcggagtgtcccctgacaagatcagtctccagcaagatgaggatgtattggatacctggttctcctctggcctcttccccttatccattttgggctggcccaaccagtcagaagacctgagtgtgttctaccccgggacactgctggagaccggtcatgacatcctcttcttctgggtggcccggatggtcatgctgggcctgaagctcacgggcaggctgccctttagagaggtctacctccatgccatcgtgcgagatgctcacggccggaagatgagcaagtctctaggcaatgtcatcgatcccctggacgtcatctatggaatctccctgcagggcctccacaaccagctgctgaacagcaacctggatcccagcgaggtggagaaggccaaagaagggcagaaagctgacttcccagcggggattcctgaatgtggcaccgatgctctccggtttggattatgtgcctacatgtcccagggtcgtgacatcaacctggatgtgaaccggatactgggttaccgccacttctgcaacaagctctggaatgccaccaagtttgcccttcgtggccttgggaagggttttgtgccctcacccacctcccagcccggaggccatgagagcctggtggaccgctggatccgcagccgcctgacagaggctgtgaggctcagcaatcaaggcttccaggcctacgacttcccggccgtcaccactgcccagtacagcttctggctctatgagctctgtgatgtctacttggagtgcctgaaacctgtactgaatggggtggaccaggtggcagctgagtgtgcccgccagaccctgtacacttgcctggacgttggcctgcggctgctctcacccttcatgcccttcgtgacggaggagctgttccagaggctgccccggaggatgccgcaagctccccctagcctctgtgttaccccctacccggagccctcagagtgctcctggaaggaccccgaggcagaagccgcccttgagctggcgctaagcatcacgcgagccgtgcgctccctgcgggccgactacaacctcacccggatccggcctgactgtttcctggaagtggcggatgaggccacgggcgccctggcatcggcggtgtcgggctacgtgcaggccctggccagcgcaggtgtggtggctgttctggccctgggggctcccgccccccagggttgcgctgtggctctggcttctgatcgctgctccatccacctgcagcttcaggggctggtggaccctgcacgggagctgggcaagctgcaagccaagcgagttgaggcccagcggcaggcccagcgtctgcgggaacgccgtgctgcctcgggctatcctgtcaaggtgccgctcgaagtccaggaggcagatgaagccaagctccaacagacagaagcagagctcaggaaggtggatgaggccatcgccctattccagaagatgctgtgatccaccacccagcttcacccctcacccccagcggctcaccatggggatggcagcaataaaatattttcccacaaaa

SEQ ID NO: 163683 - DNA, 1855 bp, Artificial Sequence
  derived and/or modified sequence
agagccgcccaccgtctctgcccgctcgactcctccgcccgggccgctcggccggtccagccgcggccggcgcctggctgtgaggtggattcccggcccagtctgaccatctccctccaccttgctgctgcctttccgatacgtcctagacccacctgcccgccggatctggaataatgtgactcgctggtttgtcacgtgtgtccggcagccagaattccgagccgtgctaggagaagtggttctatactcaggagccaggcctctctctcatcagccaggccccgaggctcctgccctcccaaagacagctgctcagctcaagaaagaggcaaagaaacgggagaagctagagaaattccaacagaagcagaagatccaacagcagcagccacctccaggggagaagaaaccaaaaccagagaagagggagaaacgggatcctggggtcattacctatgacctcccaaccccacccggggaaaagaaagatgtcagtggccccatgcccgactcctacagccctcggtatgtggaggctgcctggtacccttggtgggagcagcagggcttcttcaagccagagtatgggcgtcctaatgtgtcagcagcaaatccccgaggtgtcttcatgatgtgcatcccaccccccaatgtgacaggctccctgcacctgggccatgcactcaccaacgccatccaggactccctgactcgatggcaccgcatgcgtggggagaccaccctgtggaaccctggctgtgaccatgcaggtattgccacccaggtggtggtggagaagaagctatggcgtgagcagggactgagccggcaccagctgggccgcgaggcctttctacaggaagtctggaagtggaaggaggagaaaggtgaccggatttaccaccagttgaagaagcttggcagctccttggactgggatcgagcctgtttcaccatggaccctaaactctcagcagctgtgacagaggcctttgtccggcttcacgaggaaggcatcatctatcgcagtacccgccttgttaactggtcctgcaccctcaactccgccatctctgacattgaggtggataagaaggagctgacaggtcgcaccctgctctccgtgcctggctacaaggagaaggtggagttcggggtcctcgtgtcctttgcctataaggtccaaggctcagatagcgacgaggaggtggtggtggcaacaactcggatcgagacaatgctgggagatgtggctgtagctgtgcaccccaaagataccagataccagcacctgaaggggaagaacgtgatccacccattcctgtctcggagccttcccattgtcttcgatgaatttgtggacatggactttggcacagggcctgcccaggtttgaggccaggaaagcggtgctggtggcgctgaaggagcggggactgttccgtggcattgaggacaaccccatggtggtgccactttgcaaccggtcgaaggacgtggtagagcctctgctgcggccgcagtggtacgttcgctgcggggagatggcccaggctgccagcgccgctgtgactcggggtgacctccgcatcctgcctgaggcccatcagcgcacatggcatgcctggatggacaacatccgggagtggtgcatttccaggcagctgtggtggggccatcgcatcccagcctactttgtcactgtcagtgacccagcggtgccccctggggaggaccctgatgggcggtactgggtgagtggacgcaatgaggcggaggcccgggagaaggcagccaaggagttcggagtgtcccctgacaagatcagtctccagcaagatgaggatgtatt

SEQ ID NO: 163684 - DNA, 284 bp, Artificial Sequence
  derived and/or modified sequence
ggccagcaggcctggggggcccagggggcagccgggcggctgtccttgtccaacagtgggtcagttacgccgacacggagttaataccagctgcctgtggagcaacgctgccggccctgggactccgaagctcggcccaggacccccaggctgtgctgggggccctgggcagggccctgagccccttggaggagtggcttcggctgcacacctacttggccggggaggcccccactctggctgacctggcggctgtcacagccttgctgctgcctttccgatac

SEQ ID NO: 163685 - protein, 633 aa, Artificial Sequence
  derived and/or modified sequence
MPEIRLRHVVSCSSQDSTHCAENLLKADTYRKWRAAKAGEKTISVVLQLEKEEQIHSVDIGNDGSAFVEVLVGSSAGGAGEQDYEVLLVTSSFMSPSESRSGSNPNRVRMFGPDKLVRAAAEKRWDRVKIVCSQPYSKDSPFGLSFVRFHSPPDKDEAEAPSQKVTVTKLGQFRVKEEDESANSLRPGALFFSRINKTSPVTASDPAGPSYAAATLQASSAASSASPVSRAIGSTSKPQESPKGKRKLDLNQEEKKTPSKPPAQLSPSVPKRPKLPAPTRTPATAPVPARAQGAVTGKPRGEGTEPRRPRAGPEELGKILQGVVVVLSGFQNPFRSELRDKALELGAKYRPDWTRDSTHLICAFANTPKYSQVLGLGGRIVRKEWVLDCHRMRRRLPSQRYLMAGPGSSSEEDEASHSGGSGDEAPKLPQKQPQTKTKPTQAAGPSSPQKPPTPEETKAASPVLQEDIDIEGVQSEGQDNGAEDSGDTEDELRRVAEQKEHRLPPGQEENGEDPYAGSTDENTDSEEHQEPPDLPVPELPDFFQGKHFFLYGEFPGDERRKLIRYVTAFNGELEDNMSDRVQFVITAQEWDPSFEEALMDNPSLAFVRPRWIYSCNEKQKLLPHQLYGVVPQA

SEQ ID NO: 163686 - protein, 647 aa, Artificial Sequence
  derived and/or modified sequence
STSSFWPGEAHDVDMPEIRLRHVVSCSSQDSTHCAENLLKADTYRKWRAAKAGEKTISVVLQLEKEEQIHSVDIGNDGSAFVEVLVGSSAGGAGEQDYEVLLVTSSFMSPSESRSGSNPNRVRMFGPDKLVRAAAEKRWDRVKIVCSQPYSKDSPFGLSFVRFHSPPDKDEAEAPSQKVTVTKLGQFRVKEEDESANSLRPGALFFSRINKTSPVTASDPAGPSYAAATLQASSAASSASPVSRAIGSTSKPQESPKGKRKLDLNQEEKKTPSKPPAQLSPSVPKRPKLPAPTRTPATAPVPARAQGAVTGKPRGEGTEPRRPRAGPEELGKILQGVVVVLSGFQNPFRSELRDKALELGAKYRPDWTRDSTHLICAFANTPKYSQVLGLGGRIVRKEWVLDCHRMRRRLPSQRYLMAGPGSSSEEDEASHSGGSGDEAPKLPQKQPQTKTKPTQAAGPSSPQKPPTPEETKAASPVLQEDIDIEGVQSEGQDNGAEDSGDTEDELRRVAEQKEHRLPPGQEENGEDPYAGSTDENTDSEEHQEPPDLPVPELPDFFQGKHFFLYGEFPGDERRKLIRYVTAFNGELEDNMSDRVQFVITAQEWDPSFEEALMDNPSLAFVRPRWIYSCNEKQKLLPHQLYGVVPQA

SEQ ID NO: 163687 - protein, 400 aa, Artificial Sequence
  derived and/or modified sequence
MPEIRLRHVVSCSSQDSTHCAENLLKADTYRKWRAAKAGEKTISVVLQLEKEEQIHSVDIGNDGSAFVEVLVGSSAGGAGEQDYEVLLVTSSFMSPSESRSGSNPNRVRMFGPDKLVRAAAEKRWDRVKIVCSQPYSKDSPFGLSFVRFHSPPDKDEAEAPSQKVTVTKLGQFRVKEEDESANSLRPGALFFSRINKTSPVTASDPAGPSYAAATLQASSAASSASPVSRAIGSTSKPQESPKGKRKLDLNQEEKKTPSKPPAQLSPSVPKRPKLPAPTRTPATAPVPARAQGAVTGKPRGEGTEPRRPRAGPEELGKILQGVVVVLSGFQNPFRSELRDKALELGAKYRPDWTRDSTHLICAFANTPKLPQKVPPQHTPDQNQAHSGSWTQLTPEAPNP

SEQ ID NO: 163688 - protein, 602 aa, Artificial Sequence
  derived and/or modified sequence
MPEIRLRHVVSCSSQDSLEKEEQIHSVDIGNDGSAFVEVLVGSSAGGAGEQDYEVLLVTSSFMSPSESRSGSNPNRVRMFGPDKLVRAAAEKRWDRVKIVCSQPYSKDSPFGLSFVRFHSPPDKDEAEAPSQKVTVTKLGQFRVKEEDESANSLRPGALFFSRINKTSPVTASDPAGPSYAAATLQASSAASSASPVSRAIGSTSKPQESPKGKRKLDLNQEEKKTPSKPPAQLSPSVPKRPKLPAPTRTPATAPVPARAQGAVTGKPRGEGTEPRRPRAGPEELGKILQGVVVVLSGFQNPFRSELRDKALELGAKYRPDWTRDSTHLICAFANTPKYSQVLGLGGRIVRKEWVLDCHRMRRRLPSQRYLMAGPGSSSEEDEASHSGGSGDEAPKLPQKQPQTKTKPTQAAGPSSPQKPPTPEETKAASPVLQEDIDIEGVQSEGQDNGAEDSGDTEDELRRVAEQKEHRLPPGQEENGEDPYAGSTDENTDSEEHQEPPDLPVPELPDFFQGKHFFLYGEFPGDERRKLIRYVTAFNGELEDNMSDRVQFVITAQEWDPSFEEALMDNPSLAFVRPRWIYSCNEKQKLLPHQLYGVVPQA

SEQ ID NO: 163689 - protein, 142 aa, Artificial Sequence
  derived and/or modified sequence
MAPVKISHVVSFSSQDPKYPVENLLNPDSPRRPWLGCPQDKSGQLKVELQLERAVPTGYIDVGNCGCAFLQIDVGHSSWPLDRPFITLLPATTLMSLTDSKQGKNRSGVRMFKDGKEGKSRKDGGGLYEKQRCSTKEDCECY

SEQ ID NO: 163690 - DNA, 1902 bp, Artificial Sequence
  derived and/or modified sequence
atgcccgagatcagactgagacacgtggtgagctgcagcagccaggacagcacccactgcgccgagaacctgctgaaggccgacacctacagaaagtggagagccgccaaggccggcgagaagaccatcagcgtggtgctgcagctggagaaggaggagcagatccacagcgtggacatcggcaacgacggcagcgccttcgtggaggtgctggtgggcagcagcgccggcggcgccggcgagcaggactacgaggtgctgctggtgaccagcagcttcatgagccccagcgagagcagaagcggcagcaaccccaacagagtgagaatgttcggccccgacaagctggtgagagccgccgccgagaagagatgggacagagtgaagatcgtgtgcagccagccctacagcaaggacagccccttcggcctgagcttcgtgagattccacagcccccccgacaaggacgaggccgaggcccccagccagaaggtgaccgtgaccaagctgggccagttcagagtgaaggaggaggacgagagcgccaacagcctgagacccggcgccctgttcttcagcagaatcaacaagaccagccccgtgaccgccagcgaccccgccggccccagctacgccgccgccaccctgcaggccagcagcgccgccagcagcgccagccccgtgagcagagccatcggcagcaccagcaagccccaggagagccccaagggcaagagaaagctggacctgaaccaggaggagaagaagacccccagcaagccccccgcccagctgagccccagcgtgcccaagagacccaagctgcccgcccccaccagaacccccgccaccgcccccgtgcccgccagagcccagggcgccgtgaccggcaagcccagaggcgagggcaccgagcccagaagacccagagccggccccgaggagctgggcaagatcctgcagggcgtggtggtggtgctgagcggcttccagaaccccttcagaagcgagctgagagacaaggccctggagctgggcgccaagtacagacccgactggaccagagacagcacccacctgatctgcgccttcgccaacacccccaagtacagccaggtgctgggcctgggcggcagaatcgtgagaaaggagtgggtgctggactgccacagaatgagaagaagactgcccagccagagatacctgatggccggccccggcagcagcagcgaggaggacgaggccagccacagcggcggcagcggcgacgaggcccccaagctgccccagaagcagccccagaccaagaccaagcccacccaggccgccggccccagcagcccccagaagccccccacccccgaggagaccaaggccgccagccccgtgctgcaggaggacatcgacatcgagggcgtgcagagcgagggccaggacaacggcgccgaggacagcggcgacaccgaggacgagctgagaagagtggccgagcagaaggagcacagactgccccccggccaggaggagaacggcgaggacccctacgccggcagcaccgacgagaacaccgacagcgaggagcaccaggagccccccgacctgcccgtgcccgagctgcccgacttcttccagggcaagcacttcttcctgtacggcgagttccccggcgacgagagaagaaagctgatcagatacgtgaccgccttcaacggcgagctggaggacaacatgagcgacagagtgcagttcgtgatcaccgcccaggagtgggaccccagcttcgaggaggccctgatggacaaccccagcctggccttcgtgagacccagatggatctacagctgcaacgagaagcagaagctgctgccccaccagctgtacggcgtggtgccccaggcctag

SEQ ID NO: 163691 - DNA, 1944 bp, Artificial Sequence
  derived and/or modified sequence
agcaccagcagcttctggcccggcgaggcccacgacgtggacatgcccgagatcagactgagacacgtggtgagctgcagcagccaggacagcacccactgcgccgagaacctgctgaaggccgacacctacagaaagtggagagccgccaaggccggcgagaagaccatcagcgtggtgctgcagctggagaaggaggagcagatccacagcgtggacatcggcaacgacggcagcgccttcgtggaggtgctggtgggcagcagcgccggcggcgccggcgagcaggactacgaggtgctgctggtgaccagcagcttcatgagccccagcgagagcagaagcggcagcaaccccaacagagtgagaatgttcggccccgacaagctggtgagagccgccgccgagaagagatgggacagagtgaagatcgtgtgcagccagccctacagcaaggacagccccttcggcctgagcttcgtgagattccacagcccccccgacaaggacgaggccgaggcccccagccagaaggtgaccgtgaccaagctgggccagttcagagtgaaggaggaggacgagagcgccaacagcctgagacccggcgccctgttcttcagcagaatcaacaagaccagccccgtgaccgccagcgaccccgccggccccagctacgccgccgccaccctgcaggccagcagcgccgccagcagcgccagccccgtgagcagagccatcggcagcaccagcaagccccaggagagccccaagggcaagagaaagctggacctgaaccaggaggagaagaagacccccagcaagccccccgcccagctgagccccagcgtgcccaagagacccaagctgcccgcccccaccagaacccccgccaccgcccccgtgcccgccagagcccagggcgccgtgaccggcaagcccagaggcgagggcaccgagcccagaagacccagagccggccccgaggagctgggcaagatcctgcagggcgtggtggtggtgctgagcggcttccagaaccccttcagaagcgagctgagagacaaggccctggagctgggcgccaagtacagacccgactggaccagagacagcacccacctgatctgcgccttcgccaacacccccaagtacagccaggtgctgggcctgggcggcagaatcgtgagaaaggagtgggtgctggactgccacagaatgagaagaagactgcccagccagagatacctgatggccggccccggcagcagcagcgaggaggacgaggccagccacagcggcggcagcggcgacgaggcccccaagctgccccagaagcagccccagaccaagaccaagcccacccaggccgccggccccagcagcccccagaagccccccacccccgaggagaccaaggccgccagccccgtgctgcaggaggacatcgacatcgagggcgtgcagagcgagggccaggacaacggcgccgaggacagcggcgacaccgaggacgagctgagaagagtggccgagcagaaggagcacagactgccccccggccaggaggagaacggcgaggacccctacgccggcagcaccgacgagaacaccgacagcgaggagcaccaggagccccccgacctgcccgtgcccgagctgcccgacttcttccagggcaagcacttcttcctgtacggcgagttccccggcgacgagagaagaaagctgatcagatacgtgaccgccttcaacggcgagctggaggacaacatgagcgacagagtgcagttcgtgatcaccgcccaggagtgggaccccagcttcgaggaggccctgatggacaaccccagcctggccttcgtgagacccagatggatctacagctgcaacgagaagcagaagctgctgccccaccagctgtacggcgtggtgccccaggcctag

SEQ ID NO: 163692 - DNA, 1203 bp, Artificial Sequence
  derived and/or modified sequence
atgcccgagatcagactgagacacgtggtgagctgcagcagccaggacagcacccactgcgccgagaacctgctgaaggccgacacctacagaaagtggagagccgccaaggccggcgagaagaccatcagcgtggtgctgcagctggagaaggaggagcagatccacagcgtggacatcggcaacgacggcagcgccttcgtggaggtgctggtgggcagcagcgccggcggcgccggcgagcaggactacgaggtgctgctggtgaccagcagcttcatgagccccagcgagagcagaagcggcagcaaccccaacagagtgagaatgttcggccccgacaagctggtgagagccgccgccgagaagagatgggacagagtgaagatcgtgtgcagccagccctacagcaaggacagccccttcggcctgagcttcgtgagattccacagcccccccgacaaggacgaggccgaggcccccagccagaaggtgaccgtgaccaagctgggccagttcagagtgaaggaggaggacgagagcgccaacagcctgagacccggcgccctgttcttcagcagaatcaacaagaccagccccgtgaccgccagcgaccccgccggccccagctacgccgccgccaccctgcaggccagcagcgccgccagcagcgccagccccgtgagcagagccatcggcagcaccagcaagccccaggagagccccaagggcaagagaaagctggacctgaaccaggaggagaagaagacccccagcaagccccccgcccagctgagccccagcgtgcccaagagacccaagctgcccgcccccaccagaacccccgccaccgcccccgtgcccgccagagcccagggcgccgtgaccggcaagcccagaggcgagggcaccgagcccagaagacccagagccggccccgaggagctgggcaagatcctgcagggcgtggtggtggtgctgagcggcttccagaaccccttcagaagcgagctgagagacaaggccctggagctgggcgccaagtacagacccgactggaccagagacagcacccacctgatctgcgccttcgccaacacccccaagctgccccagaaggtgcccccccagcacacccccgaccagaaccaggcccacagcggcagctggacccagctgacccccgaggcccccaacccctag

SEQ ID NO: 163693 - DNA, 1809 bp, Artificial Sequence
  derived and/or modified sequence
atgcccgagatcagactgagacacgtggtgagctgcagcagccaggacagcctggagaaggaggagcagatccacagcgtggacatcggcaacgacggcagcgccttcgtggaggtgctggtgggcagcagcgccggcggcgccggcgagcaggactacgaggtgctgctggtgaccagcagcttcatgagccccagcgagagcagaagcggcagcaaccccaacagagtgagaatgttcggccccgacaagctggtgagagccgccgccgagaagagatgggacagagtgaagatcgtgtgcagccagccctacagcaaggacagccccttcggcctgagcttcgtgagattccacagcccccccgacaaggacgaggccgaggcccccagccagaaggtgaccgtgaccaagctgggccagttcagagtgaaggaggaggacgagagcgccaacagcctgagacccggcgccctgttcttcagcagaatcaacaagaccagccccgtgaccgccagcgaccccgccggccccagctacgccgccgccaccctgcaggccagcagcgccgccagcagcgccagccccgtgagcagagccatcggcagcaccagcaagccccaggagagccccaagggcaagagaaagctggacctgaaccaggaggagaagaagacccccagcaagccccccgcccagctgagccccagcgtgcccaagagacccaagctgcccgcccccaccagaacccccgccaccgcccccgtgcccgccagagcccagggcgccgtgaccggcaagcccagaggcgagggcaccgagcccagaagacccagagccggccccgaggagctgggcaagatcctgcagggcgtggtggtggtgctgagcggcttccagaaccccttcagaagcgagctgagagacaaggccctggagctgggcgccaagtacagacccgactggaccagagacagcacccacctgatctgcgccttcgccaacacccccaagtacagccaggtgctgggcctgggcggcagaatcgtgagaaaggagtgggtgctggactgccacagaatgagaagaagactgcccagccagagatacctgatggccggccccggcagcagcagcgaggaggacgaggccagccacagcggcggcagcggcgacgaggcccccaagctgccccagaagcagccccagaccaagaccaagcccacccaggccgccggccccagcagcccccagaagccccccacccccgaggagaccaaggccgccagccccgtgctgcaggaggacatcgacatcgagggcgtgcagagcgagggccaggacaacggcgccgaggacagcggcgacaccgaggacgagctgagaagagtggccgagcagaaggagcacagactgccccccggccaggaggagaacggcgaggacccctacgccggcagcaccgacgagaacaccgacagcgaggagcaccaggagccccccgacctgcccgtgcccgagctgcccgacttcttccagggcaagcacttcttcctgtacggcgagttccccggcgacgagagaagaaagctgatcagatacgtgaccgccttcaacggcgagctggaggacaacatgagcgacagagtgcagttcgtgatcaccgcccaggagtgggaccccagcttcgaggaggccctgatggacaaccccagcctggccttcgtgagacccagatggatctacagctgcaacgagaagcagaagctgctgccccaccagctgtacggcgtggtgccccaggcctag

SEQ ID NO: 163694 - DNA, 1902 bp, Artificial Sequence
  derived and/or modified sequence
atgcctgaaattcggctgaggcacgtggttagttgctcgtcccaagattcaacgcattgcgcggagaacctgctaaaagctgatacataccggaaatggagggcagccaaagctggagagaagactattagtgttgtcctccagcttgagaaagaagaacagatccattctgtggatattggtaacgatggctccgcctttgtggaagtgctggtcgggagctcagccggcggtgctggtgagcaggattacgaagtcctcttagtgacttccagctttatgtctccatccgagagcaggagtggttctaatcccaacagagtaaggatgttcggccctgacaaactggtgagggctgctgcggagaaacggtgggaccgggtaaaaatcgtgtgttcccaaccctattctaaggacagccctttcggactaagttttgtcagattccattcaccgcccgataaagacgaggcagaggctcccagtcaaaaagtgaccgtcaccaaattgggtcagttcagagttaaagaggaggatgagtccgccaattctctgaggcctggagcgctattcttttctaggatcaacaaaacttctccagtcacagcgtcagatccagcaggccctagttacgcggccgcgacactgcaggcatcttctgccgcctcctcagcatctccagtttcaagagcaatcgggtctacatctaagccccaggagagccccaagggcaaaagaaagctcgatctcaaccaagaggagaaaaagacccccagcaagccgcctgcccagcttagtccctccgtgcctaagcgcccaaaactccccgctcctacacgcacccccgcaacggcccctgtacccgcgagggcccagggggctgtcacaggcaaacctcggggtgaggggactgagccacggcggccccgcgctgggcccgaggaactcgggaagattcttcagggagtggttgtagtactgtcaggcttccagaacccttttagatccgagctgcgagataaggcattagagcttggcgccaagtataggcctgactggacaagagacagcacccaccttatttgcgccttcgctaacactccaaaatactcacaggtcctggggcttggcgggaggatcgtgaggaaggaatgggttctggactgccatcgtatgcgacgacgtttaccttcacaaaggtacctgatggccggacccggtagcagcagtgaggaggatgaagcttcccatagtggtgggagcggcgacgaggcccctaagctgccacagaaacaaccccagaccaagacaaagccaacccaagcagccggtccaagttccccacagaaaccgcctacgcccgaggagacaaaggcagctagcccggtcttgcaggaggatattgatattgagggggtacagtcagagggccaggacaatggcgccgaggatagcggggatactgaggacgaactgcggcgggtggcagaacaaaaagaacaccgactgccccctggtcaggaagaaaacggagaggatccatatgcaggtagcactgatgagaacactgattcggaggaacatcaagagcctccggacttgccagtgccggaactgcccgacttcttccagggaaagcacttctttttatatggtgagttccccggcgacgagcgacgcaagctgattcgctacgtgactgcgtttaacggcgaattggaggacaatatgtcagatcgcgtgcagttcgtgatcactgcccaagaatgggacccctctttcgaggaggccctgatggataaccctagccttgcattcgttaggcctcggtggatctattcatgtaatgagaaacagaaacttctaccacatcaactatatggggtcgtcccccaggcctag

SEQ ID NO: 163695 - DNA, 1944 bp, Artificial Sequence
  derived and/or modified sequence
agcacttcaagcttttggccgggcgaagcgcacgatgtagacatgcccgaaatcaggctcagacacgtggttagttgctccagtcaggacagtacccattgcgcagagaaccttctcaaagccgacacctataggaagtggagagccgcaaaggccggagaaaaaacgatctccgtcgtcttgcagcttgagaaggaggaacagatacacagcgtcgacatcgggaatgatgggagcgcctttgtggaggttctggtgggtagttctgctggaggtgccggggagcaggactatgaagtgcttcttgtgacctcaagtttcatgtctccttccgagtcaaggtcgggatcaaaccctaacagggtacggatgttcgggcctgacaaactggttcgtgcagccgcggaaaagagatgggacagggtgaaaattgtctgtagccagccatactctaaggatagtccatttggtttaagctttgttagatttcatagccctcctgacaaggacgaagctgaagccccatctcagaaagtaaccgtgacaaagctgggtcagtttagggttaaggaagaagatgagtctgctaacagtttgaggcccggggctctatttttctcacggatcaacaagacgtcgccagttacggcgtctgaccccgctggccctagctatgccgccgccaccttacaggcctctagcgcagccagctctgcctcaccggtgtctcgtgcaataggctctacctccaaaccccaggaatcccccaagggaaaacggaagcttgatctcaaccaagaggaaaagaagaccccgtctaagccaccggcccaattatccccatctgttcctaaacgtccaaaactgccagcgcccacccgtactcccgcaacagcccctgtgcctgcacgtgcccagggcgctgtcaccgggaagccgcgaggcgaggggacagaaccaagaaggcctcgcgcaggccccgaggaattggggaaaattctgcagggcgtggtggtcgtcctcagtggctttcagaacccctttagatccgaattacgtgataaagcacttgagctaggagcgaaataccgaccagactggaccagagatagcactcacctaatatgcgccttcgccaatactccaaaatactcccaggtgctcggcctaggcggcaggatagtccgaaaagaatgggtgcttgattgtcaccggatgagacggcgactcccaagtcaacgctacctgatggcgggcccaggtagctcatccgaggaagacgaagcttcacattccggggggagcggggacgaagccccaaaacttccacagaaacagccacaaactaaaaccaaacctacccaggctgccggccccagctccccgcagaagcctccgacccccgaggaaactaaggctgccagcccagtccttcaggaagatatcgacatagagggcgtgcagagtgaaggtcaggacaacggggcagaggactctggtgatacagaagacgagctgaggagggtggctgagcagaaagagcataggttaccacccgggcaagaagaaaatggcgaggatccatatgctggaagtacagatgaaaacaccgatagtgaagaacatcaggaacctccagatctccccgttcctgaactcccggatttttttcagggcaaacatttctttttgtacggcgagtttcctggcgacgagcgacgtaaactgattaggtatgtgacagcattcaatggggagttggaggacaacatgagtgaccgcgtccaattcgttatcacagcacaggagtgggatccttccttcgaggaggcgttgatggataatccctccctcgcgttcgtgaggccgcgttggatttacagctgtaacgaaaagcagaaactgctcccccaccagctctacggagtggtcccccaggcgtag

SEQ ID NO: 163696 - DNA, 1203 bp, Artificial Sequence
  derived and/or modified sequence
atgccggagattcgcctacgccatgtcgttagttgctcatctcaggactccacccattgtgctgaaaacttacttaaggcagacacgtacaggaagtggagggctgcaaaggcaggagagaaaacaatctcagtcgtactgcagctcgagaaagaggagcagatccactcagtggatataggaaacgacggctcagctttcgtggaagtcctggtagggtcgtccgccggaggggccggggagcaggattatgaagtattattggtaacttcatcgtttatgagcccatcggagagccggagcggatctaatcccaaccgggtgagaatgttcggacctgacaagctcgtcagagcagccgccgaaaagcgatgggatagggttaaaatagtttgttcacaaccatactccaaagacagccccttcgggctgtccttcgtgcggtttcatagtcccccggataaggacgaagccgaagccccaagccaaaaggtgaccgtaaccaaattgggacaattccgcgtcaaggaagaagacgaaagcgccaattctctgcgtcctggtgctctttttttctcccggattaacaaaacttccccagttacggccagtgaccctgctggaccaagctacgctgctgccacactccaggcctcttctgcagcctcaagcgctagccccgtgtccagggctatcggctctacatctaaaccgcaggagtctcccaagggtaagaggaagctggacctcaatcaagaagagaaaaagactccctccaaacctcccgcgcagctgagtccctccgtgcccaagaggcccaagctgccagcccccactagaactccagctacagcacccgtccccgcccgtgcccaaggcgcggttactggaaagccgcgcggcgaggggactgaaccacgtcgaccccgggctgggcccgaagagctgggaaaaattctgcagggggttgttgttgtgctctcagggtttcagaatccttttcgaagcgaactcagggataaggctctggaactgggcgcaaagtatcggccagactggacgcgagactcaactcacctgatttgcgcatttgctaatacccctaaactcccgcaaaaggtgcccccacaacacacgccagaccagaatcaggcacactcaggctcctggacacagctaacacccgaggctcctaatccgtag

SEQ ID NO: 163697 - DNA, 1809 bp, Artificial Sequence
  derived and/or modified sequence
atgcctgagattaggctccgccacgtggtgtcgtgttcgagccaagacagcctggagaaagaagaacagatccattcagtagacatcgggaacgatggtagcgctttcgtggaggtcctcgtcggaagcagtgcaggcggagcgggcgaacaggactatgaggtcttgctcgtgacttcgagctttatgtcaccctctgagtccaggtctggcagcaatccaaatagggtccggatgtttggaccagacaagctggtacgcgcagcggctgagaaacggtgggaccgagtaaagatcgtgtgttctcagccctatagtaaagattctcctttcggactgtccttcgtccgctttcattcgccacccgacaaagacgaggctgaggctcccagccagaaagtcacagtgaccaagcttggacagtttagagtgaaggaagaggacgagagcgccaattcactaagacctggcgctctgttctttagtcgaataaataagacttctcccgtaactgccagtgacccagccggaccatcttatgccgccgctacactgcaggccagttctgcagcctcttccgcatcccccgtatctcgcgctataggcagcactagtaagccccaagaaagtccgaaaggaaagcgcaagctcgacttaaatcaggaagaaaaaaagacaccctctaagcccccagcccaattatccccatctgtgcctaagcggcctaaattaccggctcccacgcgcacgccggcaaccgcacccgtccccgcacgcgctcagggtgcagtgactgggaagccccgtggcgagggaactgagccgaggcgcccgagagcaggccctgaagagctcggcaagatcctgcagggggtggtggtggtcctctctggttttcagaacccttttagaagtgagctgagggataaggcactggagttgggcgccaaatataggcccgactggactcgtgacagcacccacctgatctgcgcctttgccaacaccccaaagtacagtcaagttttgggtctcggcgggagaattgtgcggaaagagtgggtcctcgactgccataggatgcgacgtcgacttccgtcacagcgctatctaatggccggcccaggcagctccagcgaggaggacgaagcctcccacagcggcggcagcggggacgaggccccaaagttgccacagaagcagcctcaaaccaaaactaagcctactcaggccgccggccccagcagtccacagaagcctcctacgccagaagagacaaaggcagcttcccccgtccttcaggaggatatagacattgaaggcgttcagagcgagggccaggacaacggcgccgaagatagcggcgatacagaggatgagctccggagggtcgccgagcagaaagagcatcggctaccccccggccaggaagagaatggagaggatccttatgccggttcaactgacgaaaacactgatagtgaggaacaccaggagcctccggatctccctgttccggagctcccagacttcttccagggtaagcacttctttctatacggcgagtttcccggggacgagcgccgcaagctcataagatacgttacagctttcaacggcgagcttgaggacaacatgtccgaccgtgtccaatttgtaattactgcccaggagtgggacccctcttttgaggaagctctcatggataacccctcacttgcctttgtgcggcctcgctggatttattcgtgcaatgagaagcagaaactgctgccacatcagttgtacggtgtcgtcccacaggcatag

SEQ ID NO: 163698 - DNA, 1902 bp, Artificial Sequence
  derived and/or modified sequence
atgcctgagatccggctgcggcacgtggtgtcctgcagcagccaggacagcacccactgtgccgagaacctgctgaaggctgacacctacaggaagtggagggctgccaaggccggggagaagaccatctctgtggtgctgcagctggagaaggaggagcagatccacagcgtggacattggaaatgatggcagcgcctttgtggaggtgctggtgggcagcagcgctgggggcgctggggagcaggactatgaggtgctgctggtgaccagcagcttcatgagccccagcgagagccgcagcggcagcaaccccaacagagtgaggatgtttggaccagacaagctggtgcgggctgctgctgagaagcgctgggacagagtgaagatcgtgtgcagccagccctacagcaaggacagccccttcggcctgagctttgtgcgcttccacagccccccagacaaggatgaggccgaggcccccagccagaaggtgacagtgaccaagctgggccagttccgggtgaaggaggaggatgaaagtgccaacagcctgcggcctggggccctcttcttcagccgcatcaacaagaccagccctgtgacagccagtgaccctgctggccccagctatgctgctgccaccctgcaggccagcagcgctgccagcagcgccagccctgtgtcccgggccatcggcagcaccagcaagccccaggagagccccaagggcaagaggaagctggacctgaaccaggaggagaagaagacccccagcaagcccccagcccagctgagccccagcgtgcccaagaggcccaagctgcctgcccccaccaggaccccagccacagcccctgtgcctgcccgggcccagggcgctgtgacaggcaagcccagaggagagggcacagagccccggcggcccagggctggccctgaggagctgggcaagatcctgcagggcgtggtggtggtgctgagcggcttccagaaccccttccgctctgagctgcgggacaaggccctggagctgggcgccaagtacagaccagactggacccgggacagcacccacctgatctgtgcctttgccaacacccccaagtacagccaggtgctgggcctgggcggccgcatcgtgaggaaggagtgggtgctggactgccacaggatgagaagaaggctgcccagccagcgctacctgatggccggccctggcagcagcagcgaggaggatgaggccagccacagcggcggcagcggagatgaggcccccaagctgccccagaagcagccccagaccaagaccaagcccacccaggccgccggccccagcagcccccagaagccacccaccccagaggagaccaaggccgccagccctgtgctgcaggaggacatcgacatcgagggcgtgcagagcgagggccaggacaacggggctgaagattctggggacacagaagatgagctgcggcgggtggccgagcagaaggagcaccggctgcccccaggccaggaggagaatggagaggacccctatgccggcagcacagatgaaaatacagattctgaggagcaccaggagcccccagacctgcctgtgcctgagctgcctgacttcttccagggcaagcacttcttcctgtatggagagttccctggagatgaaagaaggaagctgatccgctacgtgacagccttcaacggggagctggaggacaacatgtctgacagagtgcagtttgtgatcacagcccaggagtgggaccccagctttgaggaggccctgatggacaaccccagcctggcctttgtgcggccccgctggatctacagctgcaatgagaagcagaagctgctgccccaccagctgtatggagtggtgccccaggcctag

SEQ ID NO: 163699 - DNA, 1944 bp, Artificial Sequence
  derived and/or modified sequence
agcaccagcagcttctggccaggagaggcccatgatgtggacatgcctgagatccggctgcggcacgtggtgtcctgcagcagccaggacagcacccactgtgccgagaacctgctgaaggctgacacctacaggaagtggagggctgccaaggccggggagaagaccatctctgtggtgctgcagctggagaaggaggagcagatccacagcgtggacattggaaatgatggcagcgcctttgtggaggtgctggtgggcagcagcgctgggggcgctggggagcaggactatgaggtgctgctggtgaccagcagcttcatgagccccagcgagagccgcagcggcagcaaccccaacagagtgaggatgtttggaccagacaagctggtgcgggctgctgctgagaagcgctgggacagagtgaagatcgtgtgcagccagccctacagcaaggacagccccttcggcctgagctttgtgcgcttccacagccccccagacaaggatgaggccgaggcccccagccagaaggtgacagtgaccaagctgggccagttccgggtgaaggaggaggatgaaagtgccaacagcctgcggcctggggccctcttcttcagccgcatcaacaagaccagccctgtgacagccagtgaccctgctggccccagctatgctgctgccaccctgcaggccagcagcgctgccagcagcgccagccctgtgtcccgggccatcggcagcaccagcaagccccaggagagccccaagggcaagaggaagctggacctgaaccaggaggagaagaagacccccagcaagcccccagcccagctgagccccagcgtgcccaagaggcccaagctgcctgcccccaccaggaccccagccacagcccctgtgcctgcccgggcccagggcgctgtgacaggcaagcccagaggagagggcacagagccccggcggcccagggctggccctgaggagctgggcaagatcctgcagggcgtggtggtggtgctgagcggcttccagaaccccttccgctctgagctgcgggacaaggccctggagctgggcgccaagtacagaccagactggacccgggacagcacccacctgatctgtgcctttgccaacacccccaagtacagccaggtgctgggcctgggcggccgcatcgtgaggaaggagtgggtgctggactgccacaggatgagaagaaggctgcccagccagcgctacctgatggccggccctggcagcagcagcgaggaggatgaggccagccacagcggcggcagcggagatgaggcccccaagctgccccagaagcagccccagaccaagaccaagcccacccaggccgccggccccagcagcccccagaagccacccaccccagaggagaccaaggccgccagccctgtgctgcaggaggacatcgacatcgagggcgtgcagagcgagggccaggacaacggggctgaagattctggggacacagaagatgagctgcggcgggtggccgagcagaaggagcaccggctgcccccaggccaggaggagaatggagaggacccctatgccggcagcacagatgaaaatacagattctgaggagcaccaggagcccccagacctgcctgtgcctgagctgcctgacttcttccagggcaagcacttcttcctgtatggagagttccctggagatgaaagaaggaagctgatccgctacgtgacagccttcaacggggagctggaggacaacatgtctgacagagtgcagtttgtgatcacagcccaggagtgggaccccagctttgaggaggccctgatggacaaccccagcctggcctttgtgcggccccgctggatctacagctgcaatgagaagcagaagctgctgccccaccagctgtatggagtggtgccccaggcctag

SEQ ID NO: 163700 - DNA, 1203 bp, Artificial Sequence
  derived and/or modified sequence
atgcctgagatccggctgcggcacgtggtgtcctgcagcagccaggacagcacccactgtgccgagaacctgctgaaggctgacacctacaggaagtggagggctgccaaggccggggagaagaccatctctgtggtgctgcagctggagaaggaggagcagatccacagcgtggacattggaaatgatggcagcgcctttgtggaggtgctggtgggcagcagcgctgggggcgctggggagcaggactatgaggtgctgctggtgaccagcagcttcatgagccccagcgagagccgcagcggcagcaaccccaacagagtgaggatgtttggaccagacaagctggtgcgggctgctgctgagaagcgctgggacagagtgaagatcgtgtgcagccagccctacagcaaggacagccccttcggcctgagctttgtgcgcttccacagccccccagacaaggatgaggccgaggcccccagccagaaggtgacagtgaccaagctgggccagttccgggtgaaggaggaggatgaaagtgccaacagcctgcggcctggggccctcttcttcagccgcatcaacaagaccagccctgtgacagccagtgaccctgctggccccagctatgctgctgccaccctgcaggccagcagcgctgccagcagcgccagccctgtgtcccgggccatcggcagcaccagcaagccccaggagagccccaagggcaagaggaagctggacctgaaccaggaggagaagaagacccccagcaagcccccagcccagctgagccccagcgtgcccaagaggcccaagctgcctgcccccaccaggaccccagccacagcccctgtgcctgcccgggcccagggcgctgtgacaggcaagcccagaggagagggcacagagccccggcggcccagggctggccctgaggagctgggcaagatcctgcagggcgtggtggtggtgctgagcggcttccagaaccccttccgctctgagctgcgggacaaggccctggagctgggcgccaagtacagaccagactggacccgggacagcacccacctgatctgtgcctttgccaacacccccaagctgccccagaaggtgcccccccagcacaccccagaccagaaccaggcccacagcggctcctggacccagctgaccccagaggcccccaacccctag

SEQ ID NO: 163701 - DNA, 1809 bp, Artificial Sequence
  derived and/or modified sequence
atgcctgagatccggctgcggcacgtggtgtcctgcagcagccaggacagcctggagaaggaggagcagatccacagcgtggacattggaaatgatggcagcgcctttgtggaggtgctggtgggcagcagcgctggaggagctggggagcaggactatgaggtgctgctggtgaccagcagcttcatgagccccagcgagagccgcagcggcagcaaccccaacagagtgaggatgtttggaccagacaagctggtgcgggctgctgctgagaagcgctgggacagagtgaagatcgtgtgcagccagccctacagcaaggacagccccttcggcctgagctttgtgcgcttccacagccccccagacaaggatgaagctgaggcccccagccagaaggtgacagtgaccaagctgggccagttccgggtgaaggaggaggatgagagcgccaacagcctgcggcctggggccctcttcttcagccgcatcaacaagaccagccctgtgacagccagtgaccctgctggccccagctatgctgctgccaccctgcaggccagcagcgctgccagcagcgccagccctgtgtcccgggccatcggcagcaccagcaagccccaggagagccccaagggcaagaggaagctggacctgaaccaggaggagaagaagacccccagcaagcccccagcccagctgagccccagcgtgcccaagaggcccaagctgcctgcccccaccaggaccccagccacagcccctgtgcctgcccgggcccagggcgctgtgacaggcaagcccagaggagagggcacagagccccggcggccccgggccggccctgaggagctgggcaagatcctgcagggcgtggtggtggtgctgagcggcttccagaaccccttccgctctgagctgcgggacaaggccctggagctgggcgccaagtacagaccagactggacccgggacagcacccacctgatctgtgcctttgccaacacccccaagtacagccaggtgctgggcctgggcggcagaattgtgaggaaggagtgggtgctggactgccacaggatgagaagaaggctgcccagccagcgctacctgatggccggccctggcagcagcagtgaagaagatgaggccagccacagcggcggcagcggagatgaggcccccaagctgccccagaagcagccccagaccaagaccaagcccacccaggccgccggccccagcagcccccagaagccacccaccccagaggagaccaaggccgccagccctgtgctgcaggaggacattgatattgaaggagtgcagagcgagggccaggacaatggagctgaggacagcggggacacagaagatgagctgcggcgggtggccgagcagaaggagcaccggctgcccccaggccaggaggagaatggagaggacccctatgccggcagcacagatgagaacacagacagcgaggagcaccaggagcccccagacctgcctgtgcctgagctgcctgacttcttccagggcaagcacttcttcctgtatggagagttccctggagatgagaggaggaagctgatccgctacgtgacagccttcaatggagagctggaggacaacatgtctgacagagtgcagtttgtgatcacagcccaggagtgggaccccagctttgaggaggccctgatggacaaccccagcctggcctttgtgcggccccgctggatctacagctgcaatgagaagcagaagctgctgccccaccagctgtatggagtggtgccccaggcctag

SEQ ID NO: 163702 - DNA, 1902 bp, Artificial Sequence
  derived and/or modified sequence
atgcccgagatccggctgcggcacgtggtgagctgcagcagccaggactccacccattgcgctgaaaacctactcaaagccgacacgtatagaaaatggcgggcagcgaaggctggcgagaaaacgataagcgtggtccttcagctagagaaagaggaacagattcactctgtagacatcggcaatgacggctccgccttcgttgaagtgcttgtcggaagctcagcgggtggggccggggagcaggattacgaggtgcttttggtcacaagttcgttcatgagcccctccgagtctcgaagcggcagcaatcccaatagagtgcggatgttcggcccggacaagctagtacgtgcagccgcagagaaaagatgggatcgggtaaaaatcgtgtgcagccagccttacagcaaagattctcccttcggcctttcctttgtccgattccactcgcctcccgacaaagatgaggccgaggccccttcacagaaggttactgtcaccaaactgggacaattcagagtcaaagaggaggatgagagcgcgaattcccttcggcccggggccctgtttttttctcgtattaacaagacctctcccgtgacagcctccgatccggcagggccaagctatgcggccgctacgctgcaagcatcttctgccgccagctctgcttcccccgtatctcgcgctatcgggagcacttccaagcctcaagagagtccaaagggcaaaaggaagttagacttgaaccaggaggaaaaaaagaccccctccaagcccccagcccagctaagcccttccgttccaaagcgacctaagcttcccgcccccacccgaacaccagcgaccgcccctgttcctgccagagcccagggggcagtcacaggcaagcctagaggcgagggtaccgagcctagacgaccgcgggccggccccgaggaacttggtaagatactgcagggggtggtagttgtgctgagtgggttccagaatccctttcggtccgagcttcgcgacaaagcactggaactcggcgcaaagtacagacctgactggactagggatagcactcacctcatctgcgccttcgccaacactcctaagtactctcaagtcctaggattgggaggccggatcgtacggaaagagtgggtgttagactgccacagaatgcgccgaaggcttccttctcagaggtatcttatggctggaccggggtcgagctcagaggaagacgaagcatcgcatagtggtggctctggcgacgaagcacctaagctccctcagaagcagcctcagacaaagactaagcccacgcaggctgccggccccagttcacctcagaagcctccaacaccggaagaaacgaaggctgccagtccggtgctccaagaggatatcgacatagaaggcgtgcagtcagaggggcaggacaatggagctgaagactctggcgacactgaggatgagctgcggagagttgccgagcagaaggaacataggctacctccgggacaggaagagaacggcgaggacccgtacgcaggatccacagacgaaaacaccgatagtgaggaacaccaagagcctcctgaccttccagtgccagagctacccgatttctttcagggcaaacacttttttctctacggcgaatttcccggtgacgagcgccggaagctcatacggtacgtgacagcttttaacggagaactggaggataatatgtctgacagggtacagttcgtgatcaccgcacaggagtgggacccctccttcgaggaagccttaatggacaatcccagtctggccttcgtgaggcccaggtggatttatagctgtaatgaaaaacagaagcttctgccgcaccagctgtacggtgtcgtgccacaggcttag

SEQ ID NO: 163703 - DNA, 1944 bp, Artificial Sequence
  derived and/or modified sequence
agcaccagcagcttctggcccggcgaggcccacgacgtggacatgcctgagatccggctccggcacgtagtcagctgttctagccaagacagtacacattgcgccgaaaatctgctcaaggctgacacctatcggaagtggagagctgccaaagctggcgaaaagactatctccgtggttcttcaactggagaaagaggaacagattcattcggttgacattggcaatgatggatccgcctttgttgaggttctggtgggaagttcagcaggaggggcaggtgaacaagattacgaggtccttttggttacttcaagtttcatgagcccttccgaatctagatccgggagcaatcccaatagggttagaatgtttggacctgataaactcgtgcgtgcagccgccgaaaaacggtgggacagggtgaaaatcgtgtgtagtcagccctactccaaggattccccattcggactttcatttgtgcgtttccacagcccaccagataaagatgaggccgaggctccgagtcagaaggttaccgtgacaaagctcggccagtttagagtgaaggaagaagatgaatccgccaacagcctgcgcccaggcgcactgttttttagtagaatcaataaaacgtcgcctgtcaccgcctctgaccccgcaggaccgagttacgcagctgctaccctgcaggcatcttctgcagcgagctcagccagccccgtgtctcgcgctattggaagcaccagcaagccacaggagagtcctaaggggaagaggaagttggatctgaaccaagaggaaaagaagacccccagcaaaccacccgcgcagctgtcaccctccgtaccgaagaggccgaaactgccagcacctactcgcacccccgctaccgcccctgtgccagcacgagctcagggggctgtcaccggcaagcctcgcggcgagggtacagagccgagacggcctagggcaggaccggaagagctcggtaagatactacagggcgtcgtggtcgtgctgagcggatttcaaaatccctttcggagcgagctacgggacaaagcccttgagctgggtgccaaatacaggcccgactggacaagggactcaactcatctgatctgtgcctttgcaaacaccccaaagtattcccaggtgttaggactgggaggcaggatcgtgcggaaagagtgggtgctggactgtcaccggatgagaagacggttgccaagtcagaggtacttgatggctgggccaggcagcagcagcgaggaggatgaggcttctcattcaggagggagtggcgacgaagcccctaagctgcctcagaagcagcctcagacaaagaccaaacccacacaggctgccggaccctcctcccctcagaagcctccaacacccgaggaaactaaggcagcatctcctgtcctgcaagaagatatcgatatcgagggcgtacagtcggagggtcaggataacggtgctgaggattctggggatactgaggatgagctacgccgggtcgcagaacaaaaggagcataggctgccccctggccaggaagagaacggcgaagatccctacgcaggcagtacagatgagaacacagacagcgaagagcaccaggagccgcccgacctgccagtgcccgagttgccagatttttttcagggcaaacactttttcctgtatggagagtttccaggtgacgaacgtcggaagcttataagatacgtaactgcctttaacggtgaattagaggataatatgtcggatagggtccaattcgtgatcactgcacaggagtgggatcctagtttcgaggaagcactaatggataacccatctttggcctttgtccggcctaggtggatctatagttgtaatgagaaacagaaactgcttccacaccagctttacggagtggtaccgcaggcctag

SEQ ID NO: 163704 - DNA, 1203 bp, Artificial Sequence
  derived and/or modified sequence
atgcccgagatccggctgcggcacgtggtgagctgcagcagccaggacagtactcattgtgccgagaatctactcaaagcggatacttatcggaaatggcgggctgctaaagccggggaaaagaccataagcgttgtcttgcagcttgagaaagaggagcagattcattccgtcgatattggaaacgacgggtccgcttttgtcgaagtccttgtgggttcctccgccgggggagctggggaacaagactacgaggtgctcctagtgacctccagctttatgagcccttccgaatcacggtcagggtccaaccctaaccgggtgaggatgttcggacctgataagctggtgcgtgcagcagcagaaaaacggtgggatagagttaagatagtctgcagtcagccatattcaaaggatagtccattcgggctgtcttttgtccgtttccactcgccaccagacaaagacgaggctgaggccccatcacagaaggtaactgtcactaaattggggcagtttagggttaaggaagaagatgagagcgccaactcactgcgacctggcgcgttgtttttctctcggatcaacaagacctcccccgtcaccgcatccgacccagcaggaccaagttacgccgcagcgacccttcaggcatcttccgcggccagctctgcttcaccagtatccagagccattggatctacgagcaaacctcaggaaagtccaaagggcaaaaggaagttggatctgaaccaagaagaaaaaaagaccccaagtaagcccccagcccagctgagtcctagcgtgccaaagcgcccgaaactgccagcccctaccaggacaccagccactgctcccgtccccgctcgggctcagggggccgtgactggtaagcccagaggggagggtacagaacctcgccggcctagggccggacccgaggaactcggcaaaatattgcaaggggtcgtggtggtccttagtgggtttcagaaccccttcaggagtgagctgcgtgataaggctttggaattgggcgccaaataccgccccgactggaccagagattccactcacttgatctgtgcctttgccaatacacccaagctgccccagaaggttccacctcaacacacgcctgatcagaaccaggcccactcaggatcctggacccaattgacccccgaggcacctaacccttag

SEQ ID NO: 163705 - DNA, 1809 bp, Artificial Sequence
  derived and/or modified sequence
atgcccgagatccggctgcggcacgtggtgagctgcagcagccaggactctctggaaaaagaggagcagatccattcagtggatattgggaatgatggttccgcattcgttgaagtgctcgttgggagctccgccggaggagcaggcgaacaagattacgaggtcctgttagtcacctcatcttttatgtccccgtctgaaagccggagcggctctaatcccaatcgagtcaggatgttcggcccagacaaactggtccgcgctgccgcggagaaacggtgggatcgcgttaagatcgtctgctctcagccttatagcaaagactctccatttggcttaagctttgtgcgattccattcacccccagacaaagatgaggctgaggcacccagccagaaagtcaccgttactaagttgggccagttccgcgtcaaggaagaggatgaaagcgcgaactccctaaggccaggcgctctcttttttagcaggatcaacaaaacatcacctgtgacagcttccgatcctgccgggccctcctacgccgccgcaactctgcaggcatcgtccgcagctagttccgcctcccccgtgtcccgcgccatcgggagcacctccaaacctcaagaatctcccaaggggaaaagaaagcttgatttaaatcaggaagagaagaagacccctagcaagccccctgcacagctcagtccatccgttcctaagcgccccaagctgccagctccaacccgaactcccgcaaccgctccagtgccggcgagggcccaaggcgcggtaacaggaaagccacgcggggaaggtacagagccacggaggccaagggctggtccggaagagttaggaaaaatcctgcagggagtggtcgttgtgctcagtgggtttcagaacccatttcgctccgaactccgagacaaggccctggagctcggcgccaagtacagacctgattggactagagacagtacccacttgatttgtgcctttgcgaacacgcccaagtattcacaggtccttggactcggaggaagaattgtgagaaaggagtgggtactggactgccacaggatgaggcggaggctgccatcccaacggtatctgatggctggccccggaagctccagtgaggaggatgaagcttcgcatagcggtggatctggtgacgaggcacccaagctgccacagaaacagcctcagaccaagacaaagccaactcaggcagctggccctagttcgccacagaaacctccaacccccgaagagacaaaagcagcctccccagtgctccaggaagacatcgacatcgagggggtccagtcagaaggacaggataacggagcggaggactccggcgataccgaagatgaactgcggcgcgttgcggagcaaaaggagcacagactgccaccaggccaggaggagaatggagaagacccatacgctggttccacagatgagaatacggacagcgaagaacatcaggaaccccccgacctgccagtgccggaactcccagattttttccagggaaagcacttctttctatatggcgaatttcctggcgacgagcgcagaaaactcattcggtacgttaccgcctttaatggagagctggaagacaacatgtccgaccgagttcagttcgtgattacagctcaggagtgggacccttcctttgaagaggctctgatggacaatccctcattggccttcgtcagacccaggtggatctactcttgtaacgagaagcagaaattgctgccacaccaattgtatggagtcgtgccccaagcatag

SEQ ID NO: 163706 - DNA, 1902 bp, Artificial Sequence
  derived and/or modified sequence
atgccagagattcgcctgcggcatgtggtttcttgctcttcccaggatagcactcattgtgcggagaatttactgaaggctgatacataccggaagtggagagctgcaaaagcaggcgagaagaccatttctgtggtcctacagctggagaaggaagaacagatacacagtgtggatataggaaatgatggatccgccttcgttgaagtgctggttgggagttcagccggtggggctggagagcaggactacgaagtattgctagtaaccagctcttttatgtcaccatcagagagtcggagtggcagcaatccgaaccgggtgcggatgttcggaccggataaactcgttcgagcggctgctgagaagaggtgggaccgcgtgaaaatcgtctgtagtcagccatactcgaaagattcacctttcggcctgtccttcgtgcgctttcacagccctcccgataaagacgaggcagaagccccttcacagaaggtaacagtaaccaagttaggccagtttagggtgaaagaggaggatgaaagtgcaaattctctgaggccgggagcacttttcttcagccgaatcaacaagacgtcccctgtaaccgcttctgacccggcaggaccctcttacgcggcagccactttacaagcatcctcagcagccagtagcgcctctcctgtcagccgcgctatcggaagcacgtccaagccccaagaaagcccaaagggaaagcgaaaattggatttgaatcaagaggagaaaaagactccatcaaaacctcccgctcaactgtccccctccgtccctaagcggcctaagctgcccgctcctaccaggaccccagctacagccccagtgcccgcacgagcgcagggtgccgttaccggaaagcccagaggtgaaggaaccgagcctcggagaccccgagcaggcccagaggaactgggcaaaatcctacagggcgtcgttgtggtgttaagcggcttccaaaaccccttccggagcgagcttcgcgataaggccttggagttaggcgctaagtaccgaccagattggacccgagactcgacccacctaatttgtgcattcgccaacaccccaaagtactcccaggtgctcgggttgggcggacggatagtgcgcaaggaatgggtgctggactgccatcgaatgaggcggcgtctgccctcccaacggtatctgatggctgggcctggctctagctccgaagaggatgaggcctcccattctggaggctctggagacgaggcacccaaacttccccagaaacagccacaaaccaagacgaaaccaactcaggccgctggaccctctagcccacagaagccaccaacccctgaagagaccaaggccgctagcccggtcctgcaggaggatatagatatcgagggggtgcagtcagaggggcaagacaacggggctgaggacagcggggacaccgaggacgaactccgacgggtcgccgagcagaaagaacacaggcttcctccgggtcaggaggagaacggcgaggacccttacgcgggttctaccgacgagaacactgattcggaggagcatcaagagccaccagatctgcccgtccctgagctgcccgacttttttcagggtaaacactttttcctgtatggtgagtttccaggagatgagcgacgcaagctcatacgctacgtgaccgcctttaacggcgagctggaagacaacatgtcagacagggtgcaattcgtgatcactgcccaggagtgggatccatcctttgaagaagcgttaatggacaatccctccttggctttcgtgcgaccacgttggatctatagctgcaacgagaagcaaaagttactcccgcatcagctgtacggggtggtcccacaggcctag

SEQ ID NO: 163707 - DNA, 1944 bp, Artificial Sequence
  derived and/or modified sequence
tctacatcatcgttttggccgggagaggcgcatgatgtggacatgcccgagattagacttagacacgtcgtttcatgtagttcgcaggattccacccattgtgcagagaatctactcaaagctgacacatatcgaaaatggcgtgcagccaaagccggagaaaagactattagcgtggtgctgcagctggagaaggaggagcagattcacagcgtggatatcggcaatgatggcagcgcattcgtcgaagttttggtgggcagtagcgccggaggggcaggggagcaggactacgaagtgctgttagtgacgagttcttttatgtcaccctctgaaagtaggagtggaagtaatccaaaccgggtcagaatgtttggccctgataaactagtccgagctgccgctgagaagcgctgggaccgggtcaagatagtgtgcagtcagccttacagtaaagattcccccttcggcctgagttttgtgaggtttcattcaccaccagataaagacgaagccgaagccccttctcagaaggtgaccgtcacgaagttaggccaattccgagtaaaggaagaggatgagtcagctaattcactgagaccaggagcattgtttttctctcggattaataaaacgtcccctgttacggcatcagatccggcagggccttcttacgcagccgcaacgctgcaggcatcttcagctgcttcgtcggcctcacccgttagcagagccattggtagcactagcaagcctcaggaatccccaaagggtaagaggaagctagacctgaatcaggaggagaaaaaaacaccatcaaaaccaccagctcagttaagcccctctgtgcccaaaaggccaaagctcccagctccaacacgcaccccagccacagctcctgtgccagccagggcgcagggagccgtcacaggcaaaccacggggtgaggggacagaaccaagacggccacgagctggacctgaggagctcggtaagattctccagggcgtagtcgtagtcctttctggattccagaacccatttcgttcagagcttcgcgacaaggccctcgaactgggggctaagtaccggcctgattggactcgggacagcactcacctgatttgcgcatttgccaatacacccaagtattcacaagtcctgggcctgggtggccgaatagtgcgtaaggaatgggttctggattgtcaccgtatgaggcgacgcctgcccagccagaggtacctgatggcgggtcctggatcatcctctgaggaggacgaagcctcacatagcgggggttctggcgacgaggcccctaaactaccccagaagcagccccagaccaagacaaagccaacgcaggccgctggaccatcgtcaccccagaaacctcccactcctgaggaaacgaaagctgccagtcccgtcctccaagaggacatcgatatagaaggggtgcagagcgaggggcaggataatggagctgaggattcaggtgatacggaggacgaactccgcagagtggcagaacagaaggagcatcgccttcctcctgggcaggaagagaatggcgaggacccctatgcagggtcaactgatgaaaacaccgacagcgaggaacaccaggaacctcctgacctgccagtgcctgagttacctgatttttttcagggcaaacacttcttcctatatggggagtttccaggggatgaacgcagaaaacttattcgctacgtcactgccttcaacggggaactggaagataacatgtccgatagggttcagttcgtgattacggcccaggagtgggaccctagttttgaggaagcactgatggacaacccaagcttggctttcgtgagacctcggtggatttatagctgtaatgagaagcaaaagttactcccccaccaactgtatggggtggtcccacaagcgtag

SEQ ID NO: 163708 - DNA, 1203 bp, Artificial Sequence
  derived and/or modified sequence
atgcctgagatcaggcttcgacatgttgtgtcctgctctagccaggacagtactcattgtgccgagaacctccttaaggccgatacataccgcaaatggagagcagccaaggccggagaaaaaaccatctctgtcgtgctgcagctggagaaggaggaacaaatccacagtgtcgacattggcaatgatggcagtgcgttcgtggaagtgctggtcgggtcttctgcaggcggtgctggcgaacaggattatgaggtgctgttggtcacgtcttccttcatgagtccttcagaatcacgctccggatctaacccgaaccgcgtgcgaatgttcggacccgataaactggtgagggccgcagctgagaaacggtgggaccgggtgaagattgtgtgttcacaaccttactccaaagacagcccctttggtctttctttcgtgcgctttcactctccgccagacaaagacgaagccgaggctccaagtcagaaggtgaccgtcaccaaactcggtcagtttagggtgaaggaggaagatgaaagtgctaactcccttcgaccaggtgcactgtttttttctagaatcaataagacctcacccgtgaccgcctcagatcctgcaggaccaagctatgctgccgctacattacaagcctcaagtgctgcctccagcgccagccccgtgtcacgcgctattggcagtactagcaagcctcaggaaagcccaaagggtaagcgcaagctggatctgaatcaagaagagaaaaagactccatcaaaaccccctgcgcaattgtcccccagcgtacccaagaggccaaaactgccagctcctactcgtacccctgcaacagcccctgtgcctgcacgagcccagggcgctgtcacaggtaaacccagaggcgaaggcaccgagcctcgccgacctagggcaggccctgaggagctaggtaaaatactgcagggggtggtcgtggtgctgtccgggttccagaacccattccgcagcgagctgcgggataaagccctggagctaggcgcaaagtaccggccagattggacccgtgatagtactcacctaatctgcgcgtttgccaacactcccaaacttccccagaaggtgccccctcagcacaccccagatcaaaatcaagcccactctggctcttggacacagctgacacctgaagctcccaatccatag

SEQ ID NO: 163709 - DNA, 1809 bp, Artificial Sequence
  derived and/or modified sequence
atgccggagattaggttgagacacgtcgtatcctgcagctcccaagacagtttagagaaagaagagcagatccacagtgtggatattggcaacgacggatctgcattcgtggaagtccttgtgggcagtagtgctgggggagctggcgaacaggactacgaagtgctgcttgtgacatcctcattcatgtccccttcggaatccaggtccggttccaaccccaaccgagtacggatgttcggcccagataaactagttcgcgctgcagcggagaaaagatgggacagggtgaaaatcgtctgctcacagccatacagtaaagattctccttttggcctgagttttgtacggttccattcgccccctgataaggacgaggccgaggctccgagccaaaaggtgacggtgaccaagctgggacaatttagagtgaaagaagaagacgagtccgctaactctctgcgaccaggcgctctcttcttctctagaatcaataaaacctctccagtaactgcctctgatcctgcaggcccttcgtacgcagcagcgacccttcaggcaagctcggccgcatcttcagcttcccccgtcagtagagctatcggcagtacaagtaagcctcaggaaagcccaaaagggaagcgcaaactggacctgaatcaagaggagaaaaaaactccttctaaacctccagcccagctaagtccaagtgtccccaaacggccaaaactgcccgcacccacacgaacccccgctacagctcccgtcccggctcgtgcccagggagcagtaacaggcaagccgcgaggcgaaggcaccgagcccaggcggcctcgggcaggcccagaagagttggggaaaatcttacagggagtggttgtagtgttgagtggcttccagaatcccttccggagtgaactgagggataaagccctcgagttaggggcaaagtataggccagactggacacgtgattctacccaccttatatgtgcttttgccaatacccctaaatacagccaggtgctcggtctgggcggtcgcatagtcaggaaggaatgggttctggactgtcaccggatgaggcgccgtctcccaagccaacgctacctaatggccggaccaggctcttcgagcgaagaagacgaggcttctcactctgggggaagtggtgatgaagctcctaaattgccacagaagcagccccaaaccaagacgaagcctacccaggccgcagggccaagtagcccacagaagccacctaccccggaagaaaccaaggctgcatctccagtgctccaggaggacatcgacatcgaaggcgtccagtcagagggccaggacaacggggctgaggattccggagatactgaggacgaactaaggcgggttgcagagcagaaagaacatcggttgcctcccggtcaagaagaaaacggtgaagatccatatgctggatcaactgacgagaacactgacagcgaggagcaccaggaaccgccagacctccctgtgcctgagctgcctgatttcttccagggcaagcacttcttcctgtatggggaattccccggagacgaacgccgtaaactgatccgctacgtgaccgcgttcaatggagagttggaagacaacatgagtgatcgggtccagttcgtgatcactgcacaggagtgggacccatccttcgaggaagccctgatggataaccccagcctggcttttgtccgcccacgatggatttattcctgcaacgagaaacaaaaactcttgccccaccagctctacggggtggtgccacaggcatag

SEQ ID NO: 163710 - DNA, 2102 bp, Artificial Sequence
  derived and/or modified sequence
ctcgcgcgcttgcgcactttagccagcgcagggcgcaccccgccccctcccactctccctgcccctcggaccccatactctacctcatccttctggccaggcgaagcccacgacgttgacatgccggagatccgcctccgccatgtcgtgtcctgcagcagccaggactcgactcactgtgcagaaaatcttctcaaggcagacacttaccgaaaatggcgggcagccaaggcaggcgagaagaccatctctgtggtcctacagttggagaaggaggagcagatacacagtgtggacattgggaatgatggctcagctttcgtggaggtgctggtgggcagttcagctggaggcgctggggagcaagactatgaggtccttctggtcacctcatctttcatgtccccttccgagagccgcagtggctcaaaccccaaccgcgttcgcatgtttgggcctgacaagctggtccgggcagccgccgagaagcgctgggaccgggtcaaaattgtttgcagccagccctacagcaaggactccccctttggcttgagttttgtacggtttcatagccccccagacaaagatgaggcagaggccccgtcccagaaggtgacagtgaccaagcttggccagttccgtgtgaaggaggaggatgagagcgccaactctctgaggccgggggctctcttcttcagccggatcaacaagacatccccagtcacagccagcgacccagcaggacctagctatgcagctgctaccctccaggcttctagtgctgcctcctcagcctctccagtctccagggccataggcagcacctccaagccccaggagtctcccaaagggaagaggaagttggatttgaaccaagaagaaaagaagacccccagcaaaccaccagcccagctgtcgccatctgttcccaagagacctaaattgccagctccaactcgtaccccagccacagccccagtccctgcccgagcacagggggcagtgacaggcaaaccccgaggagaaggcaccgagcccagacgaccccgagctggcccagaggagctggggaagatccttcagggtgtggtagtggtgctgagtggcttccagaaccccttccgctccgagctgcgagataaggccctagagcttggggccaagtatcggccagactggacccgggacagcacgcacctcatctgtgcctttgccaacacccccaagtacagccaggtcctaggcctgggaggccgcatcgtgcgtaaggagtgggtgctggactgtcaccgcatgcgtcggcggctgccctcccagaggtacctcatggcagggccaggttccagcagtgaggaggatgaggcctctcacagcggtggcagcggagatgaagcccccaagcttcctcagaagcaaccccagaccaaaaccaagcccactcaggcagctggacccagctcaccccagaagcccccaacccctgaagagaccaaagcagcctcaccagtgctccaggaagatatagacattgagggggtacagtcagaaggacaggacaatggggcggaagattctggggacacagaggatgagctgaggagggtggcagagcagaaggaacacagactgccccctggccaggaggagaatggggaagacccgtatgcaggctccacggatgagaacacggacagtgaggaacaccaggagcctcctgatctgccagtccctgagctcccagatttcttccagggcaagcacttctttctttacggggagttccctggggacgagcggcggaaactcatccgatacgtcacagccttcaatggggagctcgaggacaatatgagtgaccgggttcagtttgtgatcacagcacaggaatgggatcccagctttgaggaggccctgatggacaacccctccctggcattcgttcgtccccgatggatctacagttgcaatgagaagcagaagttacttcctcaccagctctatggggtggtgccgcaagcctgaagtatgtgctatacacacacacacacacacacacacacacacacacacacgatgcatttaataaagatgagttggttctc

SEQ ID NO: 163711 - DNA, 1485 bp, Artificial Sequence
  derived and/or modified sequence
ccagcgcagggcgcaccccgccccctcccactctccctgcccctcggaccccatactctacctcatccttctggccaggcgaagcccacgacgttgacatgccggagatccgcctccgccatgtcgtgtcctgcagcagccaggactcgactcactgtgcagaaaatcttctcaaggcagacacttaccgaaaatggcgggcagccaaggcaggcgagaagaccatctctgtggtcctacagttggagaaggaggagcagatacacagtgtggacattgggaatgatggctcagctttcgtggaggtgctggtgggcagttcagctggaggcgctggggagcaagactatgaggtccttctggtcacctcatctttcatgtccccttccgagagccgcagtggctcaaaccccaaccgcgttcgcatgtttgggcctgacaagctggtccgggcagccgccgagaagcgctgggaccgggtcaaaattgtttgcagccagccctacagcaaggactccccctttggcttgagttttgtacggtttcatagccccccagacaaagatgaggcagaggccccgtcccagaaggtgacagtgaccaagcttggccagttccgtgtgaaggaggaggatgagagcgccaactctctgaggccgggggctctcttcttcagccggatcaacaagacatccccagtcacagccagcgacccagcaggacctagctatgcagctgctaccctccaggcttctagtgctgcctcctcagcctctccagtctccagggccataggcagcacctccaagccccaggagtctcccaaagggaagaggaagttggatttgaaccaagaagaaaagaagacccccagcaaaccaccagcccagctgtcgccatctgttcccaagagacctaaattgccagctccaactcgtaccccagccacagccccagtccctgcccgagcacagggggcagtgacaggcaaaccccgaggagaaggcaccgagcccagacgaccccgagctggcccagaggagctggggaagatccttcagggtgtggtagtggtgctgagtggcttccagaaccccttccgctccgagctgcgagataaggccctagagcttggggccaagtatcggccagactggacccgggacagcacgcacctcatctgtgcctttgccaacacccccaagcttcctcagaaggtacccccccaacacaccccagaccaaaaccaagcccactcaggcagctggacccagctcaccccagaagcccccaacccctgaagagaccaaagcagcctcaccagtgctccaggaagatatagacattgagggggtacagtcagaaggacaggacaatggggcggaagattctggggacacagaggatgagctgaggagggtggcagagcagaaggaacacagactgccccctggccaggaggagaatggggaagacccgtatgca

SEQ ID NO: 163712 - DNA, 1994 bp, Artificial Sequence
  derived and/or modified sequence
actttagccagcgcagggcgcaccccgccccctcccactctccctgcccctcggaccccatactctacctcatccttctggccaggcgaagcccacgacgttgacatgccggagatccgcctccgccatgtcgtgtcctgcagcagccaggactcgttggagaaggaggagcagatacacagtgtggacattgggaatgatggctcagctttcgtggaggtgctggtgggcagttcagctggaggcgctggggagcaagactatgaggtccttctggtcacctcatctttcatgtccccttccgagagccgcagtggctcaaaccccaaccgcgttcgcatgtttgggcctgacaagctggtccgggcagccgccgagaagcgctgggaccgggtcaaaattgtttgcagccagccctacagcaaggactccccctttggcttgagttttgtacggtttcatagccccccagacaaagatgaggcagaggccccgtcccagaaggtgacagtgaccaagcttggccagttccgtgtgaaggaggaggatgagagcgccaactctctgaggccgggggctctcttcttcagccggatcaacaagacatccccagtcacagccagcgacccagcaggacctagctatgcagctgctaccctccaggcttctagtgctgcctcctcagcctctccagtctccagggccataggcagcacctccaagccccaggagtctcccaaagggaagaggaagttggatttgaaccaagaagaaaagaagacccccagcaaaccaccagcccagctgtcgccatctgttcccaagagacctaaattgccagctccaactcgtaccccagccacagccccagtccctgcccgagcacagggggcagtgacaggcaaaccccgaggagaaggcaccgagcccagacgaccccgagctggcccagaggagctggggaagatccttcagggtgtggtagtggtgctgagtggcttccagaaccccttccgctccgagctgcgagataaggccctagagcttggggccaagtatcggccagactggacccgggacagcacgcacctcatctgtgcctttgccaacacccccaagtacagccaggtcctaggcctgggaggccgcatcgtgcgtaaggagtgggtgctggactgtcaccgcatgcgtcggcggctgccctcccagaggtacctcatggcagggccaggttccagcagtgaggaggatgaggcctctcacagcggtggcagcggagatgaagcccccaagcttcctcagaagcaaccccagaccaaaaccaagcccactcaggcagctggacccagctcaccccagaagcccccaacccctgaagagaccaaagcagcctcaccagtgctccaggaagatatagacattgagggggtacagtcagaaggacaggacaatggggcggaagattctggggacacagaggatgagctgaggagggtggcagagcagaaggaacacagactgccccctggccaggaggagaatggggaagacccgtatgcaggctccacggatgagaacacggacagtgaggaacaccaggagcctcctgatctgccagtccctgagctcccagatttcttccagggcaagcacttctttctttacggggagttccctggggacgagcggcggaaactcatccgatacgtcacagccttcaatggggagctcgaggacaatatgagtgaccgggttcagtttgtgatcacagcacaggaatgggatcccagctttgaggaggccctgatggacaacccctccctggcattcgttcgtccccgatggatctacagttgcaatgagaagcagaagttacttcctcaccagctctatggggtggtgccgcaagcctgaagtatgtgctatacacacacacacacacacacacacacacacacacacacgatgcatttaataaagatgagttggttctc

SEQ ID NO: 163713 - DNA, 429 bp, Artificial Sequence
  derived and/or modified sequence
atggctcctgtgaaaatctctcacgtggtgtctttttcctcccaggatcctaagtatcctgtggaaaacttgttgaatccagattcacccagaagaccttggttaggttgcccccaggacaagtcaggacagctgaaagtggagttgcaactggagcgggccgtgcccacgggttacatcgacgttggcaactgtggatgtgccttcctgcagatcgatgtagggcacagctcatggccactggaccgaccctttatcacacttttgcccgcaaccaccctgatgtctctgactgatagtaagcagggcaaaaatcggagcggcgttcgcatgtttaaggatggtaaagaaggaaagtcccgaaaagacggcggcggcttgtatgagaagcagcggtgtagcaccaaagaggactgtgagtgttactag

SEQ ID NO: 163714 - DNA, 429 bp, Artificial Sequence
  derived and/or modified sequence
atggcccctgtgaagatcagccacgtggtgtccttcagcagccaggaccccaagtaccctgtggagaacctgctgaacccagacagcccccggcggccctggctgggctgcccccaggacaagagcggccagctgaaggtggagctgcagctggagagagctgtgcccaccggctacattgatgtgggcaactgtggctgtgccttcctgcagattgatgtgggccacagctcctggcccctggaccggcccttcatcaccctgctgcctgccaccaccctgatgagcctgacagacagcaagcagggcaagaacagaagtggagtgaggatgttcaaggatggcaaggagggcaagagcaggaaggatggcggcggcctgtatgagaagcagcgctgcagcaccaaggaggactgtgagtgctactag

SEQ ID NO: 163715 - DNA, 429 bp, Artificial Sequence
  derived and/or modified sequence
atggcccccgtgaagatcagccacgtggtgagcttcagcagccaggaccccaagtacccagtggaaaacttgctgaaccctgattctccccggaggccctggctgggatgcccgcaagataagtccggacagctgaaagttgagctgcagctagaaagagccgtccctaccggttacattgatgtgggcaattgcggctgtgccttcctccaaatcgacgtggggcacagtagctggcccctggataggcccttcatcacattgcttcccgcgacaacactgatgagtttgaccgattctaagcagggcaaaaaccggtctggagtgcgaatgtttaaggatggtaaggaggggaagagcaggaaggacggaggcggactgtacgagaaacagcggtgttccaccaaagaggactgtgagtgctattag

SEQ ID NO: 163716 - DNA, 429 bp, Artificial Sequence
  derived and/or modified sequence
atggccccagtgaagatcagccacgtggtgagcttttcctcacaggatcccaaatatccagtggaaaatttgcttaaccccgactcacctcggagaccctggctgggatgtccccaggacaaaagcgggcagctaaaggttgaattgcagctggaaagggctgttcctactggatatattgatgttggcaactgcggatgcgcctttctgcaaatcgatgtgggccacagcagttggcctctcgatcgaccattcatcaccctcttacctgccactaccctaatgtcactcactgattcaaagcaaggaaagaacagatcgggcgtgaggatgttcaaggacggcaaagaaggcaagtcccggaaggatggaggaggcctgtacgagaaacagaggtgcagcaccaaggaagactgcgaatgctactag

SEQ ID NO: 163717 - DNA, 429 bp, Artificial Sequence
  derived and/or modified sequence
atggcccccgtgaagatcagccacgtggtgagcttcagcagccaggaccccaagtaccccgtggagaacctgctgaaccccgacagccccagaagaccctggctgggctgcccccaggacaagagcggccagctgaaggtggagctgcagctggagagagccgtgcccaccggctacatcgacgtgggcaactgcggctgcgccttcctgcagatcgacgtgggccacagcagctggcccctggacagacccttcatcaccctgctgcccgccaccaccctgatgagcctgaccgacagcaagcagggcaagaacagaagcggcgtgagaatgttcaaggacggcaaggagggcaagagcagaaaggacggcggcggcctgtacgagaagcagagatgcagcaccaaggaggactgcgagtgctactag

SEQ ID NO: 163718 - protein, 41 aa, Artificial Sequence
  derived and/or modified sequence
MNTNSKEVLSLGVQVPEAWEELLTMKVEAKSHLQWQESRLK

SEQ ID NO: 163719 - DNA, 1185 bp, Artificial Sequence
  derived and/or modified sequence
atgaacaccaacagcaaggaggtgctgagcctgggcgtgcaggtgcccgaggcctgggaggagctgctgaccatgaaggtggaggccaagagccacctgcagtggcaggagagcagactgaagagaagcaaccccctggccagagagatcttcagaagacacttcagacagctgtgctaccaggagacccccggccccagagaggccctgaccagactgcaggagctgtgctaccagtggctgagaccccacgtgagcaccaaggagcagatcctggacctgctggtgctggagcagttcctgagcatcctgcccaaggagctgcagggctgggtgagagagcactgccccgagagcggcgaggaggccgtgatcctgctggaggacctggagagagagctggacgagccccagcacgagatggtggcccacagacacagacaggaggtgctgtgcaaggagatggtgcccctggccgagcagacccccctgaccctgcagagccagcccaaggagccccagctgacctgcgacagcgcccagaagtgccacagcatcggcgagaccgacgaggtgaccaagaccgaggacagagagctggtgctgagaaaggactgccccaagatcgtggagccccacggcaagatgttcaacgagcagacctgggaggtgagccagcaggaccccagccacggcgaggtgggcgagcacaaggacagaatcgagagacagtggggcaacctgctgggcgagggccagcacaagtgcgacgagtgcggcaagagcttcacccagagcagcggcctgatcagacaccagagaatccacaccggcgagagaccctacgagtgcaacgagtgcggcaaggccttcagcagaagcagcggcctgttcaaccacagaggcatccacaacatccagaagagataccactgcaaggagtgcggcaaggtgttcagccagagcgccggcctgatccagcaccagagaatccacaagggcgagaagccctaccagtgcagccagtgcagcaagagctacagcagaagaagcttcctgatcgagcaccagagaagccacaccggcgagagaccccaccagtgcatcgagtgcggcaagagcttcaacagacactgcaacctgatcagacaccagaagatccacaccgtggccgagctggtgtag

SEQ ID NO: 163720 - DNA, 126 bp, Artificial Sequence
  derived and/or modified sequence
atgaacaccaacagcaaggaggtgctgagcctgggcgtgcaggtgcccgaggcctgggaggagctgctgaccatgaaggtggaggccaagagccacctgcagtggcaggagagcagactgaagtag

SEQ ID NO: 163721 - DNA, 1185 bp, Artificial Sequence
  derived and/or modified sequence
atgaatactaactcaaaggaggttctgtctctcggtgtgcaagtgcctgaagcctgggaagagctgctgactatgaaagtggaggccaaatcgcatcttcagtggcaagagtcgagacttaagcggtcgaacccactggcacgtgagatatttcgccgccactttcggcagctctgttaccaggaaacccccggccccagggaggccttgaccagactccaggagctctgctaccagtggttgagaccccacgtgagtactaaggaacagatcttggacctcctggtcctggaacagttcctgtccatcctcccaaaggaattgcagggctgggtgagagagcactgtcccgagtctggcgaagaggctgtgattctcctcgaagacctggagcgtgagctggacgagccccagcacgagatggtcgctcaccgacataggcaggaggtcctatgtaaagaaatggtgcctttggctgagcagacccctctgaccctgcagtcacagcctaaagagccgcaattgacttgcgattctgcccagaagtgccacagcattggcgagaccgatgaggtaactaaaactgaagacagggaactcgtcctgaggaaggattgccccaaaattgtagagccacatgggaagatgttcaatgaacagacttgggaagtgagccagcaagacccatctcatggtgaagtgggcgagcataaggatcggatcgaacggcagtggggcaatctactgggagaaggccagcacaagtgtgacgagtgcggaaagagcttcacccaaagctcaggactgatcagacatcagcgtatccatacaggagagagaccctacgaatgcaatgaatgtggcaaagccttttctagatcatctggcttgtttaaccacagaggaatccacaacattcagaagagataccattgcaaagagtgtggcaaggtgttttctcagtcagccgggctgatccagcatcagaggatccataagggtgagaagccttatcaatgttctcagtgtagcaagagttactcccggcgtagctttctgattgaacatcaacggtctcatactggagagcgccctcatcagtgcattgaatgcggtaaatcattcaatcgccactgtaacctgattagacatcagaaaattcatactgtagcagaactcgtttag

SEQ ID NO: 163722 - DNA, 126 bp, Artificial Sequence
  derived and/or modified sequence
atgaacaccaattcgaaggaggtactgagcctgggtgtgcaggtcccagaggcgtgggaagaactgctgacaatgaaggtcgaggctaagtcacacctgcaatggcaggaatcaagactcaaatag

SEQ ID NO: 163723 - DNA, 1185 bp, Artificial Sequence
  derived and/or modified sequence
atgaatacaaattcgaaggaggtactgagtttaggagtgcaggtccctgaggcctgggaagagctgctgactatgaaagtggaagcgaagagccatttacagtggcaggaatcaaggctgaaaaggagcaaccctctggctcgggaaatcttccggcgacactttagacagctgtgttaccaagaaactccaggacccagggaagctttaactcgactgcaggaactgtgctaccaatggcttaggccccatgtcagcactaaggaacagatcctagacttactggtgttagagcagtttctgtctattctgcccaaagagctgcagggttgggtacgcgaacattgccccgaaagcggggaggaggccgtcattctccttgaagatctggaacgcgagctagatgagccccagcacgaaatggtggcacaccgccaccgtcaagaggtgctgtgcaaagagatggtgcctctggccgagcagacaccgttaacgctacagtcccagcccaaagaaccgcagctcacctgtgacagcgctcaaaaatgccacagtatcggagaaacggatgaagttaccaagaccgaagatagggagctggtacttcgcaaagactgtcccaagattgtggagccccacggaaagatgttcaatgaacaaacttgggaggtgtcgcaacaggatccctcccatggagaggtaggggagcacaaggatcgaatcgaaaggcagtggggcaatctccttggcgaaggccagcacaagtgtgacgagtgtggtaaaagcttcacccagtcctccggcttgatacgccaccagaggatccacaccggcgagcgtccctacgagtgcaacgaatgtggaaaagccttctcacgctccagcgggctctttaatcaccggggaattcacaacatacaaaagcggtaccattgtaaggagtgtgggaaggtgttttctcagagcgcgggtctaatccagcaccaaaggatacacaagggtgagaagccctatcaatgctctcagtgcagtaagtcttactctcgccgatctttcctcatcgaacaccagaggtcccacaccggagagagaccacatcagtgtattgagtgtgggaagtccttcaaccggcactgtaacttgatccggcatcagaagattcacactgtcgccgagctagtctag

SEQ ID NO: 163724 - DNA, 1185 bp, Artificial Sequence
  derived and/or modified sequence
atgaacaccaacagcaaggaggtgctgagcctgggcgtgcaggtgcctgaggcctgggaggagctgctgaccatgaaggtggaggccaagagccacctgcagtggcaggagagccggctgaagaggagcaaccccctggcccgggagatcttccgccgccacttccggcagctgtgctaccaggagaccccaggcccccgggaggccctgacccggctgcaggagctgtgctaccagtggctgcggccccacgtgtccaccaaggagcagatcctggacctgctggtgctggagcagttcctgagcatcctgcccaaggagctgcagggctgggtgcgggagcactgcccagagagcggggaggaggccgtcatcctgctggaggacctggagcgggagctggatgagccccagcacgagatggtggcccaccgccaccggcaggaggtgctgtgcaaggagatggtgcccctggccgagcagacccccctgaccctgcagagccagcccaaggagccccagctgacctgtgacagcgcccagaagtgccacagcatcggggagacagatgaggtgaccaagacagaggaccgggagctggtgctgaggaaggactgccccaagatcgtggagccccacggcaagatgtttaatgagcagacctgggaggtgtcccagcaggaccccagccatggagaggtgggggagcacaaggacagaattgagcggcagtggggcaacctgctgggggagggccagcacaagtgtgatgaatgtgggaagagcttcacccagagcagcggcctcatccgccaccagaggatccacactggagagcggccctatgaatgtaatgaatgtgggaaggccttcagccgcagcagcggcctcttcaaccaccggggcatccacaacatccagaagcgctaccactgcaaggaatgtgggaaggtgttcagccagagcgctggcctcatccagcaccagaggatccacaagggggagaagccctaccagtgcagccagtgcagcaagagctacagcagaagaagcttcctgattgagcaccagaggagccacactggagagcggccccaccagtgcattgaatgtgggaagagcttcaacagacactgcaacctgatccgccaccagaagatccacacagtggccgagctggtgtag

SEQ ID NO: 163725 - DNA, 126 bp, Artificial Sequence
  derived and/or modified sequence
atgaacaccaacagcaaggaggtgctgagcctgggcgtgcaggtgcctgaggcctgggaggagctgctgaccatgaaggtggaggccaagagccacctgcagtggcaggagagccggctgaagtag

SEQ ID NO: 163726 - DNA, 1185 bp, Artificial Sequence
  derived and/or modified sequence
atgaacaccaacagcaaggaggtgctgagcctgggcgtgcaggtgcctgaagcatgggaagagctactgaccatgaaggttgaggccaaaagtcacttacagtggcaggagtctaggctcaagagatcaaaccccttggctcgtgaaatttttcgtaggcattttcgacaactatgttatcaggagacaccagggccacgcgaggcactgactagattacaggaactgtgctaccagtggctcaggccacacgtgtcaaccaaggaacagatcctggacctgctggtgttagagcaattcttgtccatcctaccaaaggagctgcagggctgggtgagagaacactgtccggaaagcggcgaagaagctgttatactcctggaggatctggagcgggagttagatgaaccccagcatgagatggtcgcccacagacaccggcaagaagttctgtgtaaggagatggtgccccttgctgagcaaacccctctcacccttcagagccaaccgaaggaaccccagctgacatgcgatagcgctcaaaagtgccatagcatcggggagaccgacgaggtgacgaaaaccgaagatagggagctcgtgctgcgaaaggattgccccaagatcgtggagccccacggcaagatgttcaacgagcagacttgggaggtatctcagcaggacccttctcacggcgaagtaggagagcataaagatcgaatagaacgccaatggggcaacctcctgggcgagggccagcacaaatgcgacgagtgcggtaagtcctttacacagagctctgggcttataagacatcagaggattcataccggggagaggccctatgaatgcaacgaatgtgggaaagcattctcccgtagctcggggctttttaatcatcgcggtatacataatatccagaagcggtatcactgcaaggagtgcggtaaagtgttttcacagagtgccggcctcattcaacaccagaggatacacaagggtgaaaagccctatcagtgcagtcaatgtagtaaaagctactcccggagatccttcttgatagaacaccagagaagtcataccggcgagcggccccaccagtgtatcgaatgtggaaaaagcttcaacagacactgtaatttgatccggcaccaaaaaatacacaccgtcgcagaactcgtttag

SEQ ID NO: 163727 - DNA, 126 bp, Artificial Sequence
  derived and/or modified sequence
atgaacaccaacagcaaggaggtgctgagcctgggcgtgcaggtgcctgaggcatgggaagaactcctgacaatgaaggtggaagccaaatcacacctccagtggcaggagtcaagactcaaatag

SEQ ID NO: 163728 - DNA, 1185 bp, Artificial Sequence
  derived and/or modified sequence
atgaacaccaacagcaaggaggtgctgagcctgggcgtgcaggtgcccgaagcctgggaggagcttctgactatgaaggtggaagcaaagagccatttgcagtggcaagagtctcgtttgaagagaagcaatccactggccagagaaatattccggcgacatttccgccagctgtgttaccaggagacccctgggcccagagaggcgctcacaaggttgcaggagttatgctaccagtggctgcggccccatgtctcgacaaaggaacagattctagacttgctggtgctggaacaattcttatccatcctgcccaaagagttgcagggatgggtacgggagcattgtcccgagtccggtgaagaggccgtaatactgctcgaggatctcgaaagagaactggatgagccacagcacgagatggtggcccatcgccatcgccaggaggtgctgtgtaaggaaatggttccactcgctgaacagacgccccttaccctccagagtcagcccaaagagccacagctcacctgcgacagcgctcagaagtgtcactcgatcggggagaccgatgaagtgaccaaaacagaggatcgcgaactcgtgctgagaaaagattgcccgaagatcgtggagccccacggcaagatgtttaacgagcaaacatgggaagtaagccaacaggacccttcgcacggagaggtcggcgagcataaggaccgtatagagaggcagtggggtaacctgctcggagaggggcaacacaaatgtgatgaatgcggcaagtcctttacccagtccagcggtttgatcagacaccagcgcatccacactggcgagcgtccatacgagtgcaatgagtgtggtaaggccttctctcgctcaagcggtctgtttaaccaccgtggcatacacaacatccagaagcggtaccattgcaaagagtgtggtaaggtgttttcccagagcgccggcctcattcaacatcagaggatccataaaggggagaaaccctatcagtgttcccagtgttcgaagtcttactctcgacgtagctttctaattgagcatcagcgcagtcacacaggcgagcgtcctcaccagtgcattgaatgcggaaagagcttcaaccgacattgcaaccttatccgccaccagaagattcataccgtggcagagttggtctag

SEQ ID NO: 163729 - DNA, 1185 bp, Artificial Sequence
  derived and/or modified sequence
atgaacacaaactcaaaggaggtcctatctcttggggtccaggttcctgaagcctgggaagagctacttaccatgaaggtggaagccaagtcacacctgcagtggcaggaatccaggctgaagcgaagcaacccccttgcacgagagatctttcgacgccacttccgtcaactctgctatcaagaaacacccggaccaagagaggctctgactaggttgcaggaactgtgctaccaatggctgagaccccacgtctctactaaagagcagatccttgacctattggtgctggagcagttcctgtctattctgccaaaggagctgcaaggttgggttcgggagcattgcccggagtcaggggaagaagcagtcatcctcttggaggacctcgaacgggagctggatgagccccagcacgagatggttgctcatcggcacaggcaggaagttctctgtaaggaaatggttccactggcggaacagactcccctgacattacagtcgcaacctaaagaacctcagctgacctgtgacagcgcacagaaatgtcactcaataggagaaacggacgaagtgacaaagactgaggaccgggaactggtccttaggaaagactgccccaagatcgtggaaccccatgggaagatgtttaatgaacaaacatgggaagtcagccagcaagatcccagccacggggaagtgggagaacataaagacagaattgaaagacaatgggggaacttgctcggtgagggccagcataaatgcgatgagtgcggaaagtcttttacacaatcaagcggcttgattcgacaccagaggatccacaccggcgaacggccatacgaatgcaatgaatgtggtaaagcttttagtcgctcgagcggcttgtttaatcatcggggaattcacaacatccaaaagagataccattgcaaggagtgcggcaaagtgtttagccagagcgcgggactaatccagcatcaacggatccacaagggggagaagccctatcaatgctcccagtgctcaaaatcatatagccggagaagcttcttgatcgaacaccaaaggtcgcacactggagagcgccctcatcaatgtatcgaatgcggtaagtcttttaaccgtcattgtaatctcatccgccatcagaagattcacaccgtggcagagctcgtgtag

SEQ ID NO: 163730 - DNA, 126 bp, Artificial Sequence
  derived and/or modified sequence
atgaatacaaactctaaggaggtgctttcacttggggtacaagtgccagaggcttgggaggagcttttaactatgaaagtcgaggcaaagtctcacctacaatggcaggaatcaagactgaagtag

SEQ ID NO: 163731 - DNA, 1185 bp, Artificial Sequence
  derived and/or modified sequence
atgaataccaattcaaaagaggtcctctcgctgggggtgcaagtgccggaggcttgggaagagctactgaccatgaaggtggaagcaaaaagtcacctacagtggcaggaaagccgtttgaagaggtccaacccgctagcgagagaaattttcaggaggcactttagacagctctgttatcaggaaaccccagggcctcgcgaagcgctgacgaggttgcaagagctgtgctaccagtggttgagaccccacgtaagtaccaaagagcagatactcgatttactggttctggagcagttcttgagtattctgccaaaagagctgcaggggtgggttagggaacactgccccgaaagcggcgaggaggccgtaatccttcttgaggatctcgagagagaactcgacgaaccccagcacgaaatggtggctcaccgccatcgacaggaggtgctgtgtaaggagatggttcccttggctgagcagacgcccctcacgctccagagccagccgaaggagccccagctgacttgtgatagcgcacagaaatgtcatagcatcggcgaaacagacgaggtcacgaaaactgaggatagagagttggtgctccggaaagactgcccaaagattgtcgagcctcacggcaaaatgtttaacgagcagacgtgggaagtaagccagcaggacccctcccatggggaggtgggggaacacaaggatcgaattgagcgacagtgggggaacctcctgggagagggccagcataaatgtgacgagtgtgggaagagtttcacccagagttctgggctgatccgccatcagagaatccacaccggcgagcgaccctatgaatgtaacgaatgtggcaaggccttcagcagatccagcggcctgttcaatcaccgaggaatccataatattcagaagaggtaccactgtaaggagtgcgggaaggtcttttcccagagcgcagggctgatccagcaccagcggattcataagggggaaaaaccttaccagtgctctcagtgctccaagtcctacagccgcaggtctttccttattgaacaccagaggtcccacacgggagagcgccctcaccagtgtatcgagtgcggcaaaagctttaacaggcactgcaacctgattagacatcagaagattcatacggtggccgaattggtgtag

SEQ ID NO: 163732 - protein, 859 aa, Artificial Sequence
  derived and/or modified sequence
MACLHETRTPSPSFGGFVSTLSEASMRKLDPDTSDCTPEKDLTPTHVLQLHEQDAGGPGGAAGSPESRASRVRADEVRLQCQSGSGFLEGLFGCLRPVWTMIGKAYSTEHKQQQEDLWEVPFEEILDLQWVGSGAQGAVFLGRFHGEEVAVKKVRDLKETDIKHLRKLKHPNIITFKGVCTQAPCYCILMEFCAQGQLYEVLRAGRPVTPSLLVDWSMGIAGGMNYLHLHKIIHRDLKSPNMLITYDDVVKISDFGTSKELSDKSTKMSFAGTVAWMAPEVIRNEPVSEKVDIWSFGVVLWELLTGEIPYKDVDSSAIIWGVGSNSLHLPVPSSCPDGFKILLRQCWNSKPRNRPSFRQILLHLDIASADVLSTPQETYFKSQAEWREEVKLHFEKIKSEGTCLHRLEEELVMRRREELRHALDIREHYERKLERANNLYMELNALMLQLELKERELLRREQALERRCPGLLKPHPSRGLLHGNTMEKLIKKRNVPQKLSPHSKRPDILKTESLLPKLDAALSGVGLPGCPKGPPSPGRSRRGKTRHRKASAKGSCGDLPGLRTAVPPHEPGGPGSPGGLGGGPSAWEACPPALRGLHHDLLLRKMSSSSPDLLSAALGSRGRGATGGAGDPGSPPPARGDTPPSEGSAPGSTSPDSPGGAKGEPPPPVGPGEGVGLLGTGREGTSGRGGSRAGSQHLTPAALLYRAAVTRSQKRGISSEEEEGEVDSEVELTSSQRWPQSLNMRQSLSTFSSENPSDGEEGTASEPSPSGTPEVGSTNTDERPDERSDDMCSQGSEIPLDPPPSEVIPGPEPSSLPIPHQELLRERGPPNSEDSDCDSTELDNSNSVDALRPPASLPP

SEQ ID NO: 163733 - DNA, 2580 bp, Artificial Sequence
  derived and/or modified sequence
atggcctgtctgcacgagactcgcacccctagtccttcttttggcggcttcgtctcgactttgtcggaggcctcaatgcgaaagttggaccctgacacctcagattgcacacctgagaaagatttgacgccaacacacgtgctgcagctgcacgagcaggatgccgggggaccgggcggcgcagccggtagtcctgagtctagagccagccgggtgcgtgcagatgaagtgaggctccagtgccaatcgggttctggcttcctggagggacttttcgggtgcctgcgtcctgtctggacaatgattggaaaggcctatagtactgaacacaaacaacagcaggaagatctgtgggaggtccctttcgaagagatactagatctccagtgggtgggatcaggggctcagggagcggtgttccttggtcgatttcacggtgaggaggtggctgtgaagaaggtccgtgatctcaaagagaccgacattaagcaccttcggaaactgaaacaccctaacatcatcaccttcaagggggtgtgcactcaagccccttgctactgtatcctgatggaattttgcgcccaggggcagttgtatgaagttctgcgggccggcagacctgtcacacccagccttctcgtggattggtcaatgggaattgccggcggaatgaactatttgcatttgcacaagatcatccacagggatttgaaatctccgaatatgctgataacctacgacgatgtcgtcaaaataagcgactttgggacgagcaaagagttgtccgacaagtcaaccaagatgagcttcgcaggcactgtcgcgtggatggctcctgaagttattcggaacgagccagtgagcgagaaggtggatatttggtcttttggggttgtgttatgggagctgttaaccggcgagatcccttataaagatgtggattcttccgccatcatttggggggtcggttccaacagcttgcatctcccagtcccttcatcctgtcccgacggcttcaaaatcctgctgcgccaatgctggaattcaaagccccgtaaccgccccagttttagacagatactcctgcatttagacatcgctagtgccgacgtgttgtcgactcctcaagaaacttatttcaaatcacaggccgaatggagagaagaagtgaagcttcactttgagaagatcaaatcagagggaacctgtcttcacagacttgaggaagagctcgtcatgagacgccgtgaagaacttcgccatgccttagacataagagaacattatgagcgaaaattggagagagccaataatctctatatggagctcaacgcgctcatgctccagctcgagcttaaggaaagagagctcctgcggcgggagcaagccctggaacggaggtgccctgggctcctgaagccgcacccatcaagaggccttttgcacggtaataccatggagaagctgatcaaaaagagaaatgttcctcaaaagctctccccacactcgaagcgccctgatattcttaaaaccgaatctttactaccaaagctggacgccgccctctcaggcgttgggctacctgggtgccctaaagggccgccttcacctgggcggagccgtcggggaaagacccgccatcggaaggctagtgccaaaggcagttgtggagacctgcctggacttcgcacagcagtgccgccccacgaaccgggcgggccggggtcccccggcggactgggcgggggcccctctgcttgggaagcttgccccccagccctgcgcggcctgcaccacgacttgctactccgaaagatgtcatcctcctcgcccgacctgctgagcgcagccctgggttcccgtgggcggggagctactggcggagccggggatcccggcagtccccctcctgcccgtggtgacacgcctccttctgaaggtagtgctcctggctctacgtcccctgattctccaggcggtgcaaaaggagagcccccccctccagtcggacctggcgagggcgtcggcttattgggcacaggcagggaggggactagtggacggggcgggtcaagggccggaagccagcacctaaccccggccgccctcttatatcgcgccgccgtaactcgctctcaaaaaagggggataagctccgaggaggaagaaggcgaagtcgactcagaggtggagctgaccagcagtcagcggtggccccaatctctgaatatgcggcaatctttgtctacattctctagtgagaacccttctgatggggaagagggcaccgcctctgagccatccccctcaggcacccccgaggttggatccaccaatactgatgaaagaccagatgagagatctgatgacatgtgttcacagggcagtgagatcccactagatcctcccccctctgaggtgatccccggtcctgaaccttcgtctctccctattccacatcaggagctcctgagggaacgaggaccaccgaatagcgaagattcagactgcgattccacagagctggacaacagcaattctgtcgatgctctccggccccccgcctccctccctccatag

SEQ ID NO: 163734 - DNA, 2580 bp, Artificial Sequence
  derived and/or modified sequence
atggcctgcctgcacgagaccaggacccccagccccagctttggaggctttgtgtccaccctgtctgaggcctccatgaggaagctggaccctgacaccagtgactgcaccccagagaaggacctgacccccacccacgtgctgcagctgcacgagcaggatgctgggggccctgggggcgccgccggcagccctgagagccgggccagccgggtgcgggcagatgaggtgcggctgcagtgccagagcggcagcggcttcctggagggcctgtttggctgcctgcggcctgtgtggaccatgattggcaaggcctacagcacagagcacaagcagcagcaggaggacctgtgggaggtgccctttgaggagatcctggacctgcagtgggtgggcagcggggcccagggcgctgtgttcctgggccgcttccatggagaggaggtggccgtgaagaaggtgcgggacctgaaggagacagacatcaagcacctgaggaagctgaagcaccccaacatcatcaccttcaagggcgtgtgcacccaggccccctgctactgcatcctgatggagttctgtgcccagggccagctgtatgaggtgctgcgggccggccggcctgtgacccccagcctgctggtggactggagcatgggcattgctgggggcatgaactacctgcacctgcacaagatcatccaccgggacctgaagagccccaacatgctgatcacctatgatgatgtggtgaagatcagtgactttggcaccagcaaggagctgagtgacaagagcaccaagatgagctttgctggcaccgtggcctggatggcccctgaggtgatcagaaatgaacctgtgtctgagaaggtggacatctggagctttggagtggtgctgtgggagctgctgactggagagatcccctacaaggatgtggacagcagcgccatcatctggggcgtgggcagcaacagcctgcacctgcctgtgcccagcagctgcccagatggcttcaagatcctgctgcggcagtgctggaacagcaagcccaggaaccggcccagcttccggcagatcctgctgcacctggacatcgccagcgcagatgtgctgagcaccccccaggagacctacttcaagagccaggccgagtggagggaggaggtgaagctgcactttgagaagatcaagtctgagggcacctgcctgcaccggctggaggaggagctggtgatgagaagaagagaggagctgcggcatgccctggacatccgggagcactatgaaaggaagctggagcgggccaacaacctgtacatggagctgaatgccctgatgctgcagctggagctgaaggagcgggagctgctgcggcgggagcaggccctggagcggcgctgccccggcctgctgaagccccaccccagccggggcctgctgcacggcaacaccatggagaagctgatcaagaagagaaatgtgccccagaagctgagcccccacagcaagaggccagacatcctgaagacagagagcctgctgcccaagctggatgctgccctgtctggagtgggcctgcccggctgccccaagggcccccccagccctggccgcagcagaagaggcaagaccaggcacaggaaggccagcgccaagggcagctgtggggacctgcccggcctgaggacagctgtgccccctcatgagcccggcggccctggcagccctgggggcctgggcggcggccccagcgcctgggaggcctgccccccagccctgcggggcctgcaccacgacctgctgctgaggaagatgagcagcagcagcccagacctgctgtctgctgccctgggcagccggggccgcggggccaccggcggggccggggaccccggcagccccccaccagcccggggggacaccccaccttctgagggcagcgcccctggcagcaccagcccagacagccctgggggcgccaagggggagcccccacctcctgtgggccctggagagggcgtgggcctgctgggcaccggccgggagggcaccagcggccggggcggcagcagagctggcagccagcacctgaccccagctgccctgctgtacagagctgctgtgaccaggagccagaagaggggcatcagcagcgaggaggaggagggggaggtggacagcgaggtggagctgaccagcagccagcgctggccccagagcctgaacatgaggcagagcctgagcaccttcagcagcgagaaccccagtgatggagaggagggcacagccagcgagcccagccccagcggcaccccagaggtgggcagcaccaacacagatgagaggccagatgagaggagtgatgacatgtgcagccagggcagcgagatccccctggaccccccaccttctgaggtgattcctggccctgagcccagcagcctgcccatcccccaccaggagctgctgcgggagcggggcccccccaacagtgaagattctgactgtgacagcacagagctggacaacagcaacagcgtggatgccctgcggcccccagccagcctgcccccatag

SEQ ID NO: 163735 - DNA, 3492 bp, Artificial Sequence
  derived and/or modified sequence
agaaagctgaagctgacacccgtgcatccggacaccgcacgagcatcgcctgtgacagcgccccgggtccggtggagggcagcggggggaggagggaaggaggaggagaaggaggaggaggcgggagcagcatccggagcggagctgcagcagcgccgccttttgtgctgcggccgcggagcccccgagggcccagtgttcaccatcataccaggggccagaggcgatggcttgcctccatgagacccgaacaccctctccttcctttgggggctttgtgtctaccctaagtgaggcatccatgcgcaagctggacccagacacttctgactgcactcccgagaaggacctgacgcctacccatgtcctgcagctacatgagcaggatgcagggggcccagggggagcagctgggtcacctgagagtcgggcatccagagttcgagctgacgaggtgcgactgcagtgccagagtggcagtggcttccttgagggcctctttggctgcctgcgccctgtctggaccatgattggcaaagcctactccactgagcacaagcagcagcaggaagacctttgggaggtcccctttgaggaaatcctggacctgcagtgggtgggctcaggggcccagggtgctgtcttcctggggcgcttccacggggaggaggtggctgtgaagaaggtgcgagacctcaaagaaaccgacatcaagcacttgcgaaagctgaagcaccccaacatcatcactttcaagggtgtgtgcacccaggctccctgctactgcatcctcatggagttctgcgcccagggccagctgtatgaggtactgcgggctggccgccctgtcaccccctccttactggttgactggtccatgggcatcgctggtggcatgaactacctgcacctgcacaagattatccacagggatctcaagtcacccaacatgctaatcacctacgacgatgtggtgaagatctcagattttggcacttccaaggagctgagtgacaagagcaccaagatgtcctttgcagggacagtagcctggatggcccctgaggtgatccgcaatgaacctgtgtctgagaaggtcgacatctggtcctttggcgtggtgctatgggaactgctgactggtgagatcccctacaaagacgtagattcctcagccattatctggggtgtgggaagcaacagtctccatctgcccgtgccctccagttgcccagatggtttcaagatcctgcttcgccagtgctggaatagcaaaccacgaaatcgcccatcattccgacagatcctgctgcatctggacattgcctcagctgatgtactctccacaccccaggagacttactttaagtcccaggcagagtggcgggaagaagtaaaactgcactttgaaaagattaagtcagaagggacctgtctgcaccgcctagaagaggaactggtgatgaggaggagggaggagctcagacacgccctggacatcagggagcactatgaaaggaagctggagagagccaacaacctgtatatggaacttaatgccctcatgttgcagctggaactcaaggagagggagctgctcaggcgagagcaagctttagagcggaggtgcccaggcctgctgaagccacacccttcccggggcctcctgcatggaaacacaatggagaagcttatcaagaagaggaatgtgccacagaagctgtcaccccatagcaaaaggccagatatcctcaagacggagtctttgctccctaaactagatgcagccctgagtggggtggggcttcctgggtgtcctaagggccccccctcaccaggacggagtcgccgtggcaagacccgtcaccgcaaggccagcgccaaggggagctgtggggacctgcctgggcttcgtacagctgtgccaccccatgaacctggaggaccaggaagcccagggggcctaggagggggaccctcagcctgggaggcctgccctcccgccctccgtgggcttcatcatgacctcctgctccgcaaaatgtcttcatcgtccccagacctgctgtcagcagcactagggtcccggggccggggggccacaggcggagctggggatcctggctcaccacctccggcccggggtgacaccccaccaagtgagggctcagcccctggctccaccagcccagattcacctgggggagccaaaggggaaccacctcctccagtagggcctggtgaaggtgtggggcttctgggaactggaagggaagggacctcaggccggggaggaagccgggctgggtcccagcacttgaccccagctgcactgctgtacagggctgccgtcacccgaagtcagaaacgtggcatctcatcggaagaggaggaaggagaggtagacagtgaagtagagctgacatcaagccagaggtggcctcagagcctgaacatgcgccagtcactatctaccttcagctcagagaatccatcagatggggaggaaggcacagctagtgaaccttcccccagtggcacacctgaagttggcagcaccaacactgatgagcggccagatgagcggtctgatgacatgtgctcccagggctcagaaatcccactggacccacctccttcagaggtcatccctggccctgaacccagctccctgcccattccacaccaggaacttctcagagagcggggccctcccaattctgaggactcagactgtgacagcactgaattggacaactccaacagcgttgatgccttgcggcccccagcttccctccctccatgaaagccactcgtattccttgtacatagagaaatatttatataaattatatatatatacatatatatatatatatgcgccacataatcaacagaaagatggggctgtcccagccgtaagtcaggctcgagggagactgatcccctgaccaattcacctgataaactctagggacactggcagctgtggaaatgaatgaggcacagccgtagagctgtggctaagggcaagccccttcctgccccaccccattccttatattcagcaagcaacaaggcaatagaaaagccagggttgtctttatattctttatccccaaataatagggggtggggggaggggcggtgggaggggcaggagagaaaaccacttagactgcacttttctgttccgtttactctgtttacacattttgcacttgggaggagggaggctaaggctgggtcctcccctctgaggtttctcaggtggcaatgtaactcatttttttgtcccaccatttatcttctctgcccaagccctgtcttaaggcccagggggaggttaggagactgatagcatgtgatggctcaggctgaagaaccggggtgctgtttaagtccctgcttttatcctggtgcctgattggggtggggactgtcctactgtaacccctgtgaaaaaccttgaaatataacactccatgcagg

SEQ ID NO: 163736 - DNA, 2580 bp, Artificial Sequence
  derived and/or modified sequence
atggcctgcctgcacgagacccggacccccagccccagcttcggcggcttcgtgtctaccctgagcgaggccagcatgaggaagctcgacccagacacctcagactgtactcccgaaaaggatcttacaccaacccatgtgctgcagctgcatgagcaggacgccggcggccccggcggcgctgctgggagccccgagtcgcgcgcttctagggtccgggctgatgaggtccgtctccagtgccaaagtggtagtggatttctagaggggctgttcggctgcctgagacccgtgtggaccatgataggaaaagcctatagcacagagcacaagcagcaacaagaggatctgtgggaagtacctttcgaggagattctcgacctgcagtgggtgggctcaggagcccagggagctgtctttcttgggaggttccatggggaggaggtggccgtaaagaaggttcgcgatttgaaggaaacagatatcaaacacctgaggaaactcaagcatccaaatatcataacttttaagggggtgtgtacccaagccccttgctactgtattctgatggagttttgcgctcagggacagctatatgaagtcctgagagcgggaaggcccgtgacgccctcacttcttgtagactggagtatgggcattgctggggggatgaattacctacacctccacaaaatcatccaccgggacttgaagtctccaaacatgcttatcacctacgatgatgttgtgaaaatctcggactttggcacttccaaagagctgagtgataaatcaacaaaaatgagcttcgcggggaccgtggcgtggatggctccggaggttattcgtaacgagccagtcagtgagaaggtcgacatatggagtttcggtgtcgttctctgggagctgcttactggagagatcccgtacaaggacgtggattcttctgctattatttggggcgtgggctctaattcactgcacctgccagtgccctcatcctgtccggacggcttcaagattttactgcggcagtgctggaatagtaagcccaggaatcggccaagctttcggcaaatcttactacatctcgacatcgccagcgcggacgttctgtccacaccccaggaaacgtattttaagtcccaggcagagtggagggaggaggttaaattgcatttcgagaagatcaagtccgaaggcacctgccttcatcggctggaggaggaactggtgatgcgccggagggaagaactgaggcatgccctcgacattagggagcactatgaacggaagttggaaagggcaaacaatctgtacatggagttaaatgccctgatgctgcagttggagctaaaggaaagggaattgctgcgaagggaacaggctctcgaaaggagatgcccaggcctcttaaagccccatccatcaagaggactgttacacgggaatacaatggagaaactcattaagaagcgaaatgtgccgcaaaagctttcacctcactcgaagagaccagatatcttgaaaactgagagcctgttgcccaagctcgacgctgcccttagcggagtgggcttacccggttgtcccaagggtcctccatcgcctgggaggagtcggcgcgggaagacgcggcatcggaaagcttcagctaaagggtcgtgtggtgacctccccggtctgcgaactgcagttccccctcacgagcccggcggtccagggtccccaggcggtctgggcggcgggccatcagcttgggaggcctgccccccagcgctgcggggtctccaccatgacctgctcctcagaaagatgagttccagcagcccggacctgctctctgcggctcttggctcgcgtggtagaggtgctacagggggcgctggggaccctggctccccccctcccgctaggggagatacccctccatccgagggttctgcaccagggtcaacttcccccgactcccctggaggcgctaagggggaacctccgcctcctgtgggcccgggggagggagttggcctgttgggaactgggcgggagggcaccagcggccggggagggtcaagagctgggtcacagcacctgactccagccgcccttttatatcgagcggccgtaactagatcccagaagcgtggcatcagctctgaggaggaagaaggtgaagtggactctgaggtggagcttacatcctctcagagatggccccagtctcttaacatgagacagtccttgtctacatttagctccgaaaacccctcagacggagaagaagggacagcaagcgaacccagcccctcaggtacacctgaggtgggatcaactaacactgatgaaaggccagatgaacgcagtgatgacatgtgctctcaggggtctgagattccgctagatccaccccccagcgaagtcattccaggaccagagcccagcagcctaccgattcctcaccaggaactcctgcgcgagaggggcccacctaactccgaggattctgactgcgactcgaccgaactggataactcaaatagtgtcgatgcactcaggccaccagccagtctgccaccttag

SEQ ID NO: 163737 - DNA, 2580 bp, Artificial Sequence
  derived and/or modified sequence
atggcctgcctacacgagaccagaactccgtcccccagcttcggcggttttgtgagcacattgagtgaggccagcatgaggaagctggacccagatacctctgactgcaccccagagaaggacctgactcctacacatgtgttgcagctccacgaacaggacgccggtggcccagggggagcagccggatcccccgagtcaagagcgtcaagagttcgagccgatgaggtgcgtctgcagtgtcagtccgggtcaggatttctagagggcctgttcgggtgtttgagaccagtctggacaatgatagggaaggcctatagcacggagcataagcagcagcaggaagacctatgggaagtgcccttcgaggaaattctggacctgcagtgggtgggatctggagcacagggagccgtctttctgggaagattccacggggaagaagtggctgtgaaaaaagtgagggacctgaaggaaaccgacattaaacatctgaggaaactcaaacaccccaatatcattacctttaagggggtgtgcacccaggctccgtgctactgtattctgatggagttttgcgctcagggacagctctacgaggtgcttagggccggtcggcctgtcactcctagcctgctagtggactggagtatgggcattgccggaggaatgaactatctgcacctgcacaagatcattcatagagacctgaagtcacccaacatgctgataacgtatgatgatgtggtgaaaatttctgattttgggacctccaaggagctgtccgacaaaagcactaagatgtcttttgctggaaccgtcgcctggatggctcctgaagtgattcgtaacgaacccgtgtctgaaaaggttgacatttggtcttttggcgtggtgctatgggagctcctgactggcgagattccctataaggatgtcgacagcagcgccatcatttggggtgtggggtcaaattcgttacacttgcctgtgccttcaagctgtccagacggatttaaaatactgctgagacagtgctggaacagcaagcccagaaaccggccaagctttaggcagatcctgctccatcttgatatcgcgtctgccgacgttctctcaaccccccaggaaacgtatttcaagtcccaggccgagtggagggaggaggtgaagctccactttgagaaaatcaaatcagaaggcacttgtctccaccgccttgaagaagagctggtgatgaggagaagggaagaacttaggcacgccctggatatcagggagcattacgagaggaaactggaaagagccaacaatctgtatatggagctgaacgctctgatgctgcaactagaactgaaagaacgggagctgttacggagagagcaggctcttgaaagaagatgtcccggacttttaaaacctcacccaagccggggtctccttcacggcaacaccatggaaaaattgatcaaaaaacggaatgtgccccagaaactgtctccacattctaagcgccctgacatcctcaaaacggaaagccttctgccaaaactcgatgcggcactttccggagtggggctgcccggatgccccaaggggccaccttcccccggtcgttcccggagggggaagacacgccaccgtaaagccagcgccaagggtagctgcggcgatctgccaggcctcaggacagccgtgccgccacatgagcccggtggaccgggtagccccggtggactcgggggtgggccatccgcttgggaagcctgtcctccagctcttagggggcttcaccacgatcttctgctgcgaaaaatgtccagcagtagtcctgacctgctaagcgccgctcttggatcccgtgggcgaggagccaccggaggtgccggagacccaggctcacctcctcctgccaggggcgatacacccccttcggaaggttcagcaccgggatcaactagtcccgatagtcccggaggggcaaaaggagagccaccaccacccgtgggccctggcgagggggtcgggctgctcggcaccggcagggagggcacttccgggaggggaggatcgagggctgggtcacagcacctgacaccggctgctctgctgtaccgtgccgcagtgaccaggagccagaagcgcggtatatcaagtgaagaggaagaaggagaggtggattccgaagtcgaactgacatcctcacagaggtggccacaatctcttaacatgcggcagtctctgtcaaccttctcctccgaaaacccatctgacggggaagaagggaccgcttccgagccctcaccatcgggtacccccgaagttggaagcaccaataccgacgagcggcctgacgaacggagcgacgatatgtgcagtcaggggtcagagatcccgctcgatcccccaccgagcgaggtcataccaggaccagagcctagctcactccccatcccacatcaagagctgctgagggaacgcggaccccctaactcggaagactcagactgcgattcgacggagcttgacaactccaactctgtcgatgccctacggcctcctgcatccctgcccccatag

SEQ ID NO: 163738 - DNA, 2580 bp, Artificial Sequence
  derived and/or modified sequence
atggcctgcctgcacgagaccagaacccccagccccagcttcggcggcttcgtgagcaccctgagcgaggccagcatgagaaagctggaccccgacaccagcgactgcacccccgagaaggacctgacccccacccacgtgctgcagctgcacgagcaggacgccggcggccccggcggcgccgccggcagccccgagagcagagccagcagagtgagagccgacgaggtgagactgcagtgccagagcggcagcggcttcctggagggcctgttcggctgcctgagacccgtgtggaccatgatcggcaaggcctacagcaccgagcacaagcagcagcaggaggacctgtgggaggtgcccttcgaggagatcctggacctgcagtgggtgggcagcggcgcccagggcgccgtgttcctgggcagattccacggcgaggaggtggccgtgaagaaggtgagagacctgaaggagaccgacatcaagcacctgagaaagctgaagcaccccaacatcatcaccttcaagggcgtgtgcacccaggccccctgctactgcatcctgatggagttctgcgcccagggccagctgtacgaggtgctgagagccggcagacccgtgacccccagcctgctggtggactggagcatgggcatcgccggcggcatgaactacctgcacctgcacaagatcatccacagagacctgaagagccccaacatgctgatcacctacgacgacgtggtgaagatcagcgacttcggcaccagcaaggagctgagcgacaagagcaccaagatgagcttcgccggcaccgtggcctggatggcccccgaggtgatcagaaacgagcccgtgagcgagaaggtggacatctggagcttcggcgtggtgctgtgggagctgctgaccggcgagatcccctacaaggacgtggacagcagcgccatcatctggggcgtgggcagcaacagcctgcacctgcccgtgcccagcagctgccccgacggcttcaagatcctgctgagacagtgctggaacagcaagcccagaaacagacccagcttcagacagatcctgctgcacctggacatcgccagcgccgacgtgctgagcaccccccaggagacctacttcaagagccaggccgagtggagagaggaggtgaagctgcacttcgagaagatcaagagcgagggcacctgcctgcacagactggaggaggagctggtgatgagaagaagagaggagctgagacacgccctggacatcagagagcactacgagagaaagctggagagagccaacaacctgtacatggagctgaacgccctgatgctgcagctggagctgaaggagagagagctgctgagaagagagcaggccctggagagaagatgccccggcctgctgaagccccaccccagcagaggcctgctgcacggcaacaccatggagaagctgatcaagaagagaaacgtgccccagaagctgagcccccacagcaagagacccgacatcctgaagaccgagagcctgctgcccaagctggacgccgccctgagcggcgtgggcctgcccggctgccccaagggcccccccagccccggcagaagcagaagaggcaagaccagacacagaaaggccagcgccaagggcagctgcggcgacctgcccggcctgagaaccgccgtgcccccccacgagcccggcggccccggcagccccggcggcctgggcggcggccccagcgcctgggaggcctgcccccccgccctgagaggcctgcaccacgacctgctgctgagaaagatgagcagcagcagccccgacctgctgagcgccgccctgggcagcagaggcagaggcgccaccggcggcgccggcgaccccggcagccccccccccgccagaggcgacaccccccccagcgagggcagcgcccccggcagcaccagccccgacagccccggcggcgccaagggcgagccccccccccccgtgggccccggcgagggcgtgggcctgctgggcaccggcagagagggcaccagcggcagaggcggcagcagagccggcagccagcacctgacccccgccgccctgctgtacagagccgccgtgaccagaagccagaagagaggcatcagcagcgaggaggaggagggcgaggtggacagcgaggtggagctgaccagcagccagagatggccccagagcctgaacatgagacagagcctgagcaccttcagcagcgagaaccccagcgacggcgaggagggcaccgccagcgagcccagccccagcggcacccccgaggtgggcagcaccaacaccgacgagagacccgacgagagaagcgacgacatgtgcagccagggcagcgagatccccctggaccccccccccagcgaggtgatccccggccccgagcccagcagcctgcccatcccccaccaggagctgctgagagagagaggcccccccaacagcgaggacagcgactgcgacagcaccgagctggacaacagcaacagcgtggacgccctgagaccccccgccagcctgcccccctag

SEQ ID NO: 163739 - protein, 837 aa, Artificial Sequence
  derived and/or modified sequence
MARGERRRRAVPAEGVRTAERAARGGPGRRDGRGGGPRSTAGGVALAVVVLSLALGMSGRWVLAWYRARRAVTLHSAPPVLPADSSSPAVAPDLFWGTYRPHVYFGMKTRSPKPLLTGLMWAQQGTTPGTPKLRHTCEQGDGVGPYGWEFHDGLSFGRQHIQDGALRLTTEFVKRPGGQHGGDWSWRVTVEPQDSGTSALPLVSLFFYVVTDGKEVLLPEVGAKGQLKFISGHTSELGDFRFTLLPPTSPGDTAPKYGSYNVFWTSNPGLPLLTEMVKSRLNSWFQHRPPGAPPERYLGLPGSLKWEDRGPSGQGQGQFLIQQVTLKIPISIEFVFESGSAQAGGNQALPRLAGSLLTQALESHAEGFRERFEKTFQLKEKGLSSGEQVLGQAALSGLLGGIGYFYGQGLVLPDIGVEGSEQKVDPALFPPVPLFTAVPSRSFFPRGFLWDEGFHQLVVQRWDPSLTREALGHWLGLLNADGWIGREQILGDEARARVPPEFLVQRAVHANPPTLLLPVAHMLEVGDPDDLAFLRKALPRLHAWFSWLHQSQAGPLPLSYRWRGRDPALPTLLNPKTLPSGLDDYPRASHPSVTERHLDLRCWVALGARVLTRLAEHLGEAEVAAELGPLAASLEAAESLDELHWAPELGVFADFGNHTKAVQLKPRPPQGLVRVVGRPQPQLQYVDALGYVSLFPLLLRLLDPTSSRLGPLLDILADSRHLWSPFGLRSLAASSSFYGQRNSEHDPPYWRGAVWLNVNYLALGALHHYGHLEGPHQARAAKLHGELRANVVGNVWRQYQATGFLWEQYSDRDGRGMGCRPFHGWTSLVLLAMAEDY

SEQ ID NO: 163740 - protein, 731 aa, Artificial Sequence
  derived and/or modified sequence
MKTRSPKPLLTGLMWAQQGTTPGTPKLRHTCEQGDGVGPYGWEFHDGLSFGRQHIQDGALRLTTEFVKRPGGQHGGDWSWRVTVEPQDSGTSALPLVSLFFYVVTDGKEVLLPEVGAKGQLKFISGHTSELGDFRFTLLPPTSPGDTAPKYGSYNVFWTSNPGLPLLTEMVKSRLNSWFQHRPPGAPPERYLGLPGSLKWEDRGPSGQGQGQFLIQQVTLKIPISIEFVFESGSAQAGGNQALPRLAGSLLTQALESHAEGFRERFEKTFQLKEKGLSSGEQVLGQAALSGLLGGIGYFYGQGLVLPDIGVEGSEQKVDPALFPPVPLFTAVPSRSFFPRGFLWDEGFHQLVVQRWDPSLTREALGHWLGLLNADGWIGREQILGDEARARVPPEFLVQRAVHANPPTLLLPVAHMLEVGDPDDLAFLRKALPRLHAWFSWLHQSQAGPLPLSYRWRGRDPALPTLLNPKTLPSGLDDYPRASHPSVTERHLDLRCWVALGARVLTRLAEHLGEAEVAAELGPLAASLEAAESLDELHWAPELGVFADFGNHTKAVQLKPRPPQGLVRVVGRPQPQLQYVDALGYVSLFPLLLRLLDPTSSRLGPLLDILADSRHLWSPFGLRSLAASSSFYGQRNSEHDPPYWRGAVWLNVNYLALGALHHYGHLEGPHQARAAKLHGELRANVVGNVWRQYQATGFLWEQYSDRDGRGMGCRPFHGWTSLVLLAMAEDY

SEQ ID NO: 163741 - protein, 159 aa, Artificial Sequence
  derived and/or modified sequence
MARGERRRRAVPAEGVRTAERAARGGPGRRDGRGGGPRSTAGGVALAVVVLSLALGMSGRWVLAWYRARRAVTLHSAPPVLPADSSSPAVAPDLFWGTYRPHVYFGMKTRSPKPLLTGLRYFCPPFGLPVLLCGDRWQGSPTTRGWGQGAVEVYQWAHQ

SEQ ID NO: 163742 - DNA, 2196 bp, Artificial Sequence
  derived and/or modified sequence
atgaagaccagaagccccaagcccctgctgaccggcctgatgtgggcccagcagggcaccacccccggcacccccaagctgagacacacctgcgagcagggcgacggcgtgggcccctacggctgggagttccacgacggcctgagcttcggcagacagcacatccaggacggcgccctgagactgaccaccgagttcgtgaagagacccggcggccagcacggcggcgactggagctggagagtgaccgtggagccccaggacagcggcaccagcgccctgcccctggtgagcctgttcttctacgtggtgaccgacggcaaggaggtgctgctgcccgaggtgggcgccaagggccagctgaagttcatcagcggccacaccagcgagctgggcgacttcagattcaccctgctgccccccaccagccccggcgacaccgcccccaagtacggcagctacaacgtgttctggaccagcaaccccggcctgcccctgctgaccgagatggtgaagagcagactgaacagctggttccagcacagaccccccggcgccccccccgagagatacctgggcctgcccggcagcctgaagtgggaggacagaggccccagcggccagggccagggccagttcctgatccagcaggtgaccctgaagatccccatcagcatcgagttcgtgttcgagagcggcagcgcccaggccggcggcaaccaggccctgcccagactggccggcagcctgctgacccaggccctggagagccacgccgagggcttcagagagagattcgagaagaccttccagctgaaggagaagggcctgagcagcggcgagcaggtgctgggccaggccgccctgagcggcctgctgggcggcatcggctacttctacggccagggcctggtgctgcccgacatcggcgtggagggcagcgagcagaaggtggaccccgccctgttcccccccgtgcccctgttcaccgccgtgcccagcagaagcttcttccccagaggcttcctgtgggacgagggcttccaccagctggtggtgcagagatgggaccccagcctgaccagagaggccctgggccactggctgggcctgctgaacgccgacggctggatcggcagagagcagatcctgggcgacgaggccagagccagagtgccccccgagttcctggtgcagagagccgtgcacgccaacccccccaccctgctgctgcccgtggcccacatgctggaggtgggcgaccccgacgacctggccttcctgagaaaggccctgcccagactgcacgcctggttcagctggctgcaccagagccaggccggccccctgcccctgagctacagatggagaggcagagaccccgccctgcccaccctgctgaaccccaagaccctgcccagcggcctggacgactaccccagagccagccaccccagcgtgaccgagagacacctggacctgagatgctgggtggccctgggcgccagagtgctgaccagactggccgagcacctgggcgaggccgaggtggccgccgagctgggccccctggccgccagcctggaggccgccgagagcctggacgagctgcactgggcccccgagctgggcgtgttcgccgacttcggcaaccacaccaaggccgtgcagctgaagcccagacccccccagggcctggtgagagtggtgggcagaccccagccccagctgcagtacgtggacgccctgggctacgtgagcctgttccccctgctgctgagactgctggaccccaccagcagcagactgggccccctgctggacatcctggccgacagcagacacctgtggagccccttcggcctgagaagcctggccgccagcagcagcttctacggccagagaaacagcgagcacgaccccccctactggagaggcgccgtgtggctgaacgtgaactacctggccctgggcgccctgcaccactacggccacctggagggcccccaccaggccagagccgccaagctgcacggcgagctgagagccaacgtggtgggcaacgtgtggagacagtaccaggccaccggcttcctgtgggagcagtacagcgacagagacggcagaggcatgggctgcagacccttccacggctggaccagcctggtgctgctggccatggccgaggactactag

SEQ ID NO: 163743 - DNA, 480 bp, Artificial Sequence
  derived and/or modified sequence
atggccagaggcgagagaagaagaagagccgtgcccgccgagggcgtgagaaccgccgagagagccgccagaggcggccccggcagaagagacggcagaggcggcggccccagaagcaccgccggcggcgtggccctggccgtggtggtgctgagcctggccctgggcatgagcggcagatgggtgctggcctggtacagagccagaagagccgtgaccctgcacagcgccccccccgtgctgcccgccgacagcagcagccccgccgtggcccccgacctgttctggggcacctacagaccccacgtgtacttcggcatgaagaccagaagccccaagcccctgctgaccggcctgagatacttctgcccccccttcggcctgcccgtgctgctgtgcggcgacagatggcagggcagccccaccaccagaggctggggccagggcgccgtggaggtgtaccagtgggcccaccagtag

SEQ ID NO: 163744 - DNA, 2196 bp, Artificial Sequence
  derived and/or modified sequence
atgaagactcggagtcctaagccactactgacaggcctaatgtgggctcaacagggcaccaccccaggcacccccaagctgcgtcacacttgcgagcagggtgacggagtgggcccctatgggtgggaatttcacgacggactgtcattcggccgtcagcacattcaagatggtgccctgcgcctgacaaccgagttcgtgaagaggccaggaggacagcatggcggggactggagctggagggtcaccgtggaaccacaggactccgggacttcagccctccccctcgtaagcttattcttctatgttgtcacggatggcaaagaggtactcctaccggaagtgggagccaaaggacagttaaaattcattagcgggcacacttccgagctcggggacttccgcttcacactgctgccacccacctcccctggcgacacggcccccaagtacggctcttacaacgttttttggacctcaaacccaggcctgcctttacttacggagatggtgaagtcaaggctcaactcctggttccagcatagaccccctggggcgccacctgagaggtacctgggactcccagggtctctcaagtgggaggaccgaggcccttccggccagggtcagggccaattcctgattcagcaagtgacacttaaaatccccatcagcatcgagtttgtgttcgagtccgggagcgcacaggcaggcggaaaccaagctctgccaagattggccggctccctgctaacccaggccctcgaaagccacgctgaagggttcagagagcgattcgaaaaaaccttccagctcaaagaaaaggggctgtcttccggtgaacaagttctcgggcaggcagctctcagtggcctgcttgggggaatcggttatttctatgggcagggactcgtgctgccagacatcggtgtcgagggctccgagcagaaggtggaccctgctctgtttcctcccgtgcccctgtttaccgctgttccctcaaggtctttcttccctcgcggctttctttgggacgagggattccaccaacttgtggtacagagatgggacccctccttgacccgagaagcgctgggacactggctcggcctgctgaacgcagacgggtggattggtcgggaacagatcctgggggatgaagctcgcgcgcgcgttccccccgagtttctggtgcagcgcgccgtgcacgccaatccccctaccctgttgttgccagttgctcatatgctggaggtgggcgatcctgatgatctcgctttcctgcgtaaagccctgccccgcttacatgcttggttcagctggcttcaccagtcacaggctggtcctctaccactgtcctaccgctggaggggacgggatcctgctctgcctacactcctgaatccaaaaacgctgccttcagggttagatgattacccccgcgcttcccatccatccgtgaccgagaggcatcttgatttacggtgttgggtggctctgggcgcaagagtgctcactaggctggccgaacatctaggcgaggctgaagtggccgctgaactgggcccacttgcagccagtctcgaggccgcggagtcactggacgagttacattgggccccggaactgggggtcttcgctgatttcggcaatcatacgaaagccgtgcaactgaagcccagaccaccacagggcctggtgcgcgtggttggaaggccccaaccacaactgcagtatgtagatgccttaggctatgtctctctattcccactactgcttagattgctggatccaacctcaagtcgcttgggtccactactggacatactggccgattcacggcacctctggtcaccattcggactgcgatccctggccgcttcttcatcgttctacgggcaaagaaacagcgagcatgacccaccttattggcggggagcggtctggctgaacgtgaattacctcgccttgggggccttgcatcactacgggcatctggagggccctcatcaggcgcgcgctgccaaactacacggagagctgagagctaatgttgtcggcaacgtttggcgacagtatcaggccaccgggtttctgtgggagcaatactccgacagagatggccggggaatgggttgtcgaccatttcacgggtggacatccttagtgttgcttgcgatggcggaggactactag

SEQ ID NO: 163745 - DNA, 480 bp, Artificial Sequence
  derived and/or modified sequence
atggcaagaggcgaacgaagaagaagggcagtccctgccgaaggggtgagaaccgcagaaagggctgcccgagggggcccaggccgtcgagatggacgtggcggcggtccccgctcaacagccggcggtgtggccttagccgtagtggttttatccctagcactgggcatgtccggaagatgggtcttggcgtggtatcgcgccagacgggcagtaacgctgcacagcgccccgcccgtcctccccgcagactcctcttctcccgctgttgcacccgacctcttttgggggacctataggccccatgtgtacttcggcatgaagactagaagtccgaagcctcttcttacgggtctgcggtatttctgtccaccttttgggctaccagtgctactgtgcggagacaggtggcaggggagccctaccactaggggatggggacagggcgcggtcgaagtgtaccaatgggcccatcaatag

SEQ ID NO: 163746 - DNA, 2196 bp, Artificial Sequence
  derived and/or modified sequence
atgaagaccaggagccccaagcccctgctgaccggcctgatgtgggcccagcagggcaccaccccaggcacccccaagctgcggcacacctgtgagcagggagatggagtgggcccctacggctgggagttccatgatggcctgagctttggccggcagcacatccaggatggagccctgcggctgaccacagaatttgtgaagaggcctgggggccagcacggcggggactggagctggagggtgacagtggagccccaggacagcggcaccagcgccctgcccctggtgtccctcttcttctacgtggtgacagatggcaaggaggtgctgctgcctgaggtgggcgccaagggccagctgaagttcatcagcggccacaccagcgagctgggggacttccgcttcaccctgctgccccccaccagccctggggacacagcccccaagtatggcagctacaacgtgttctggaccagcaaccctggcctgcccctgctgacagagatggtgaagagccggctgaacagctggttccagcacaggcctcctggggcccctcctgagcgctacctgggcctgcccggcagcctgaagtgggaggaccggggccccagcggccagggccagggccagttcctgatccagcaggtgaccctgaagatccccatcagcattgaatttgtgtttgagagcggcagcgcccaggccggcggcaaccaggccctgccccggctggccggcagcctgctgacccaggccctggagagccatgctgagggcttccgggagagatttgagaagaccttccagctgaaggagaagggcctgagcagtggagagcaggtgctgggccaggccgccctgagcggcctgctgggcggcatcggctacttctacggccagggcctggtgctgcctgacattggagtggagggcagcgagcagaaggtggaccctgccctcttcccccctgtgcccctcttcaccgctgtgcccagccgctccttcttcccccggggcttcctgtgggatgagggcttccaccagctggtggtgcagcgctgggaccccagcctgacccgggaggccctgggccactggctgggcctgctgaatgctgatggctggattggccgggagcagatcctgggagatgaggcccgggcccgggtgcccccagagttcctggtgcagagagctgtgcacgccaacccccccaccctgctgctgcctgtggcccacatgctggaggtgggggaccctgatgacctggccttcctgaggaaggccctgccccggctgcacgcctggttctcctggctgcaccagagccaggccggccccctgcccctgagctaccgctggaggggccgggaccctgccctgcccaccctgctgaaccccaagaccctgcccagcggcctggatgactacccccgggccagccaccccagcgtgacagagcggcacctggacctgcgctgctgggtggccctgggcgcccgggtgctgacccggctggccgagcacctgggggaggccgaggtggccgctgagctgggccccctggccgccagcctggaggccgctgagagcctggatgagctgcactgggcccctgagctgggcgtgtttgctgactttggaaaccacaccaaggctgtgcagctgaagccccggcccccccagggcctggtgcgggtggtgggccggccccagccccagctgcagtatgtggatgccctgggctacgtgtccctcttccccctgctgctgcggctgctggaccccaccagcagccggctgggccccctgctggacatcctggccgacagccgccacctgtggagccccttcggcctgcggagcctggccgccagcagcagcttctacggccagagaaattctgaacatgaccccccctactggagaggagctgtgtggctgaatgtgaactacctggccctgggcgccctgcaccactacggccacctggagggcccccaccaggcccgggccgccaagctgcacggggagctgcgggccaacgtggtgggcaatgtgtggaggcagtaccaggccaccggcttcctgtgggagcagtacagcgacagagatggccggggcatgggctgccggcccttccacggctggaccagcctggtgctgctggccatggccgaggactactag

SEQ ID NO: 163747 - DNA, 480 bp, Artificial Sequence
  derived and/or modified sequence
atggcccggggggagaggagaagaagagctgtgcctgctgagggcgtgaggacagctgagcgggccgcccggggcggccctggaagaagagatggccggggcggcggccccaggagcacagctggaggagtggccctggccgtggtggtgctgagcctggccctgggcatgagcggccgctgggtgctggcctggtaccgggccaggagagctgtgaccctgcacagcgcccctcctgtgctgcctgctgacagcagcagccctgctgtggccccagacctcttctggggcacctaccggccccacgtgtacttcggcatgaagaccaggagccccaagcccctgctgaccggcctgcgctacttctgcccccccttcggcctgcctgtgctgctgtgtggggaccgctggcagggcagccccaccacccggggctggggccagggcgctgtggaggtgtaccagtgggcccaccagtag

SEQ ID NO: 163748 - DNA, 2895 bp, Artificial Sequence
  derived and/or modified sequence
acttccggcgggaggcggaggcggaggcgcaggcgctggctggcaggtgtcgctaaccggacggtggtcgccagggcgagaggcgggagccggagaggtgaggcaggacccgggctccactgccgcctctccgagctcttgtgacgcggacctcagtgccaggatggctcggggcgagcggcggcgccgcgcagtgccggcagagggagtgcggacagccgagagggcggctcggggaggccccgggcgacgggacggccggggcggcgggccgcgtagcacggctggaggagtggctctggccgtcgtggtcctgtctttggccctgggtatgtcggggcgctgggtgctggcgtggtaccgtgcgcggcgggcggtcacgctgcactccgcgcctcctgtgttgcctgccgactcctccagccccgccgtggccccggacctcttctggggaacctaccgccctcacgtctacttcggcatgaagacccgcagcccgaagcccctcctcaccggactgatgtgggcgcagcagggcaccaccccggggactcctaagctcaggcacacgtgtgagcagggggacggtgtgggtccctatggctgggagttccacgacggcctctccttcgggcgccaacacatccaggatggggccttaaggctcaccactgagttcgtcaagaggcctgggggtcagcacggaggggactggagctggagagtgactgtagagcctcaggactcaggtacttctgccctccctttggtctccctgttcttctatgtggtgacagatggcaaggaagtcctactaccagaggttggggccaaggggcagttgaagtttatcagtgggcacaccagtgaacttggtgacttccgctttacacttttgccaccaaccagtccaggggatacagcccccaagtatggcagctacaatgtcttctggacctccaacccaggactgcccctgctgacagagatggtaaagagtcgcctaaatagctggtttcagcatcggcccccaggggccccccctgaacgctacctcggcttgccaggatccctgaagtgggaggacagaggtccaagtgggcaagggcaggggcagttcttgatacagcaggtgaccctgaaaattcccatttccatagagtttgtgtttgaatcaggcagtgcccaggcaggaggaaatcaagccctgccaagactggcaggcagtctactgacccaggccctggagagccatgctgaaggctttagagagcgctttgagaagaccttccagctgaaggagaagggcctgagctctggcgagcaggttttgggtcaggctgccctcagcggcctccttggtggaattggctacttctacggacaagggctggtattgccagacatcggggtggaagggtctgagcagaaggtggacccagccctctttccacccgtacctctttttacagcagtgccctcccggtcattcttcccacgaggcttcctttgggatgaaggctttcaccagctggtggttcagcggtgggatccctccctcacccgggaagcccttggccactggctggggctgctaaatgctgatggctggattgggagggagcagatactgggggatgaggcccgagcccgggtgcctccagaattcctagtacaacgagcagtccacgccaaccccccaaccctacttttgcctgtagcccatatgctagaggttggtgaccctgacgacttggctttcctccgaaaggccttgccccgcctgcatgcctggttttcctggctccatcagagccaggcaggcccactgccactatcttaccgctggcggggacgggaccctgccttaccaaccttactgaaccccaagaccctaccctctgggctggatgactacccccgggcttcacacccttcagtaaccgagcggcacctggacctgcgatgttgggtggcactgggtgcccgtgtgctgacgcggctggcagagcatctgggtgaggctgaggtagctgctgagctgggcccactggctgcctcactggaggcagcagagagcctggatgagctgcactgggccccagagctaggagtctttgcagactttgggaaccacacaaaagcagtacagctgaagcccaggccccctcaggggctcgttcgggtggtgggtcggccccaacctcaactgcagtatgtagatgctcttggctatgtcagtctttttcccttgctgctgcgactgctggaccccacctcatcccgccttgggcccctgctggacattctagccgacagccgccatctctggagcccctttggtttacgctcccttgcagcctccagctccttttatggccagcgcaattcagagcatgatcccccctactggcggggtgctgtgtggctcaatgtcaactacctggctttgggagcactccaccactatgggcatctggagggtcctcaccaggctcgggctgccaaactccacggtgagctccgtgccaacgtggtaggcaatgtatggcgccagtaccaggctacaggctttctttgggagcagtacagtgaccgcgatgggcgaggcatgggctgccgccctttccacggctggaccagccttgtcttactggccatggctgaagactactgaagggagggagaggaggggagccaagacactcatgccactctggctctgaagggacaaaggcttctggcttttgcccccagccccttggataccagtaattcaaaccttcctcatttcatctcaggtgtctccttgctgtcatcccacatagccctggggtgaatgtgaatccagagtctatttttctaaataaattggaaaaaacattttgaactcta

SEQ ID NO: 163749 - DNA, 2568 bp, Artificial Sequence
  derived and/or modified sequence
acttccggcgggaggcggaggcggaggcgcaggcgctggctggcaggtgtcgctaaccggacggtggtcgccagggcgagaggcgggagccggagagccccgccgtggccccggacctcttctggggaacctaccgccctcacgtctacttcggcatgaagacccgcagcccgaagcccctcctcaccggactgatgtgggcgcagcagggcaccaccccggggactcctaagctcaggcacacgtgtgagcagggggacggtgtgggtccctatggctgggagttccacgacggcctctccttcgggcgccaacacatccaggatggggccttaaggctcaccactgagttcgtcaagaggcctgggggtcagcacggaggggactggagctggagagtgactgtagagcctcaggactcaggtacttctgccctccctttggtctccctgttcttctatgtggtgacagatggcaaggaagtcctactaccagaggttggggccaaggggcagttgaagtttatcagtgggcacaccagtgaacttggtgacttccgctttacacttttgccaccaaccagtccaggggatacagcccccaagtatggcagctacaatgtcttctggacctccaacccaggactgcccctgctgacagagatggtaaagagtcgcctaaatagctggtttcagcatcggcccccaggggccccccctgaacgctacctcggcttgccaggatccctgaagtgggaggacagaggtccaagtgggcaagggcaggggcagttcttgatacagcaggtgaccctgaaaattcccatttccatagagtttgtgtttgaatcaggcagtgcccaggcaggaggaaatcaagccctgccaagactggcaggcagtctactgacccaggccctggagagccatgctgaaggctttagagagcgctttgagaagaccttccagctgaaggagaagggcctgagctctggcgagcaggttttgggtcaggctgccctcagcggcctccttggtggaattggctacttctacggacaagggctggtattgccagacatcggggtggaagggtctgagcagaaggtggacccagccctctttccacccgtacctctttttacagcagtgccctcccggtcattcttcccacgaggcttcctttgggatgaaggctttcaccagctggtggttcagcggtgggatccctccctcacccgggaagcccttggccactggctggggctgctaaatgctgatggctggattgggagggagcagatactgggggatgaggcccgagcccgggtgcctccagaattcctagtacaacgagcagtccacgccaaccccccaaccctacttttgcctgtagcccatatgctagaggttggtgaccctgacgacttggctttcctccgaaaggccttgccccgcctgcatgcctggttttcctggctccatcagagccaggcaggcccactgccactatcttaccgctggcggggacgggaccctgccttaccaaccttactgaaccccaagaccctaccctctgggctggatgactacccccgggcttcacacccttcagtaaccgagcggcacctggacctgcgatgttgggtggcactgggtgcccgtgtgctgacgcggctggcagagcatctgggtgaggctgaggtagctgctgagctgggcccactggctgcctcactggaggcagcagagagcctggatgagctgcactgggccccagagctaggagtctttgcagactttgggaaccacacaaaagcagtacagctgaagcccaggccccctcaggggctcgttcgggtggtgggtcggccccaacctcaactgcagtatgtagatgctcttggctatgtcagtctttttcccttgctgctgcgactgctggaccccacctcatcccgccttgggcccctgctggacattctagccgacagccgccatctctggagcccctttggtttacgctcccttgcagcctccagctccttttatggccagcgcaattcagagcatgatcccccctactggcggggtgctgtgtggctcaatgtcaactacctggctttgggagcactccaccactatgggcatctggagggtcctcaccaggctcgggctgccaaactccacggtgagctccgtgccaacgtggtaggcaatgtatggcgccagtaccaggctacaggctttctttgggagcagtacagtgaccgcgatgggcgaggcatgggctgccgccctttccacggctggaccagccttgtcttactggccatggctgaagactactgaagggagggagaggaggggagccaagacactcatgccactctggctctgaagggacaaaggcttctggcttttgcccccagccccttggataccagtaattcaaaccttcctcatttcatctcaggtgtctccttgctgtcatcccacatagccctggggtgaatgtgaatccagagtctatttttctaaataaattggaaaaaacattttgaactct

SEQ ID NO: 163750 - DNA, 2196 bp, Artificial Sequence
  derived and/or modified sequence
atgaagacccggagccccaagcccctgctgaccggcctgatgtgggcgcagcagggtacaacccccggaacaccgaagctgagacacacctgcgagcagggagatggggtgggcccatatggctgggagttccacgatggattgtcttttgggcgccaacatatccaggatggtgctctgagactgactactgagttcgtcaagcggcctggagggcagcacggtggcgattggagctggcgggtgactgtcgagccccaggactctggcaccagcgctcttcctctggtaagcctcttcttttacgtggttactgacgggaaagaagtcttgctcccagaagtcggcgctaagggacagctgaagtttataagtggccacacttctgagctcggagactttcgcttcaccctgttaccaccgacttcccctggagatactgcacccaagtacgggagctataacgtgttttggacaagtaatcccggtctcccacttttgacagagatggtcaagtcacgcctgaattcctggtttcaacataggccacctggagccccacctgagaggtacctaggcctgcctggctctctgaaatgggaggaccgcggaccaagcgggcagggccaagggcagttcttgattcagcaagtcaccctcaagattcctataagcatcgaattcgtttttgagtccgggtccgcgcaggccggcggaaaccaagcgttaccaagacttgctggaagcctgctgacccaagcccttgagtctcatgccgagggctttcgggagagatttgagaagacattccagctcaaagaaaagggcctaagtagcggtgaacaggtcctgggacaggccgccctttctggcctccttgggggtatcggttacttttatggccagggcctggtgctgcccgacatcggcgtagaggggtctgagcagaaggtggaccctgctttatttcctcccgtgcccctgttcactgctgttcccagtcgctctttcttcccacgcggtttcttgtgggatgagggctttcatcagctggtcgtacagcgatgggatccttccctgacccgagaggcactcggacattggctgggactgctaaatgccgacggctggattgggagggagcagattttgggggacgaagccagggcccgcgtgccacccgagtttttggtgcagagggcagtgcacgctaacccaccaaccctcctactccccgtagcccatatgctggaggttggtgaccctgatgatcttgcttttttgaggaaggctctgccccgcctccacgcctggttcagttggttgcatcagagtcaagctggcccgttgcctctttcttatcgatggagaggaagagaccctgctttgcccacactgctgaatccaaagactctcccgagtggattggatgattatccacgcgcctcccaccccagcgtaacagagaggcacctagatctccgctgttgggttgccctcggagcccgggttctcacacggcttgcggaacatctcggagaagcagaagtcgccgcggaactaggccctctggccgcgtctttggaggcggccgagtctctggacgaactgcattgggcacctgagcttggggttttcgcagacttcggcaaccacaccaaagctgttcagttaaagccacgtccacctcagggattggtcagagtagttgggcggccacagccacagctgcagtatgtggatgctttgggatatgtctcattgtttcctctgctgttgagactcctagatccgacaagcagcaggttaggtccccttttggatatccttgccgacagtcgtcacttatggtcaccatttggactgcgaagcctggcagcctcaagctctttctatggccagcgcaacagcgaacacgatccaccatactggaggggtgccgtttggttgaacgtgaactacctggcgctgggggcactccaccattacgggcatctcgaggggccacaccaggccagagctgcaaagctgcacggggaacttagagctaacgtggtgggcaatgtgtggcggcagtatcaggcaacaggcttcttgtgggaacaatattccgatagggacggcaggggaatgggatgtcgaccttttcacggatggacctcccttgtccttctggcaatggctgaagactactag

SEQ ID NO: 163751 - DNA, 480 bp, Artificial Sequence
  derived and/or modified sequence
atggcccggggcgagcggcggcggcgggccgtgcccgccgagggcgtgagaaccgccgaacgcgccgcccgtggaggaccgggcaggcgggatggtcgaggggggggacctcggagtacagctggcggtgtcgctctggcagtcgtggtgctgagcctcgcgctcggcatgagcggacgttgggtcctggcctggtacagagcccgaagagctgtgacactgcatagcgccccgccagtactacctgccgatagttcatctccagccgtggcaccggacctgttttgggggacttacagacctcacgtctacttcggcatgaagactaggtccccaaagccactcctgacaggcctccgttacttctgtccacctttcgggctgcccgtgctgctttgtggagacaggtggcaggggtcccccactacccgtggctgggggcaaggcgctgttgaagtttatcaatgggctcaccagtag

SEQ ID NO: 163752 - DNA, 2196 bp, Artificial Sequence
  derived and/or modified sequence
atgaaaactcgcagtcccaagccactcctgaccggcctgatgtgggcccaacagggtaccaccccagggacaccaaagctgcgccatacatgcgaacagggcgacggcgttgggccttatggctgggaattccacgacgggctgtctttcgggaggcaacacatccaggacggcgctcttcgactcaccaccgaatttgttaaacggccaggcggacaacacgggggagactggagttggcgcgtgaccgttgaaccccaagattccggaacgtccgcattgcccctcgtttctctgtttttctatgtcgtgactgatggcaaagaagtgctgctgccggaggtaggggcaaagggccagttaaaatttatcagtggacacaccagcgaactcggtgattttagattcaccttgctgccccctactagccctggggacacagcacccaagtacggcagctacaatgtgttttggacgagtaatcccggattaccattgctgaccgagatggtcaaatcaaggctgaatagttggtttcagcacagaccaccgggagctcctcccgaacgttatcttgggctgcctggatcactcaaatgggaggatcgcggaccctcaggccagggtcagggtcaatttctaattcagcaggtgacacttaagatcccgatctcaatcgagttcgttttcgagtcgggatctgcacaggcgggaggcaatcaagccctgccacgcctcgccggtagtcttctgacccaagcactcgagagtcacgcagagggttttcgcgagcgatttgagaagaccttccagctgaaagagaaggggttgagttcaggcgagcaggtgctgggtcaggccgctctatcaggactacttggcggaatcggatatttctacggtcagggcctggtgttaccggacattggcgtcgaagggtccgaacagaaggtggaccccgcactgtttcccccagtgcctctctttacagctgttccgagcagatctttcttccccagggggttcctgtgggatgagggatttcatcaattggtggtgcagcgctgggaccccagccttacccgggaggcactgggacactggctgggccttctcaatgctgacgggtggataggaagagagcagatcctgggcgatgaggcacgggctcgcgttccgcctgagtttctggttcagcgcgcagtccatgccaatccgcctactctgctccttcccgtggcccacatgctcgaagtgggtgacccggatgatctggctttcctgcgcaaggctctgcccagattgcacgcttggttcagttggttgcatcagtcccaagctgggcctctaccgctgagctatcgctggcgagggcgtgaccctgcattgccgacgctactaaaccccaaaaccctgcctagtggactcgacgattatcctcgcgcatcacacccctccgtcacagaaagacacctcgatctgagatgttgggtagctttgggagcgcgtgtgcttacgagactcgctgagcacctgggcgaagccgaggtggcagctgaacttggcccactcgctgcgtctctggaagccgcagaaagcctggacgagttgcactgggctcctgagctgggggtgttcgccgacttcggaaaccatacaaaggctgtgcagctaaaaccgagacctccgcaggggctggtccgggtcgtaggtagaccacagccccaactccaatatgtggatgccctgggctatgttagtttgtttcctctcctcttgcgcttgcttgacccaacttccagccggcttggaccactgctggatatcttggcagactcacgccatttgtggtctcctttcggcttgcgctccctggcagccagctcaagcttttacggccagcggaactctgaacacgaccccccatactggcgcggagccgtgtggctgaacgtaaactaccttgcccttggtgctctgcatcattacggtcacctagagggaccccatcaagccagagccgctaagcttcacggagaactgcgagcgaacgtcgtgggcaatgtgtggagacagtaccaagctacaggcttcctctgggagcagtacagcgacagggatggcagaggaatgggttgtaggcccttccacgggtggaccagccttgtcctgttggcaatggccgaggattattag

SEQ ID NO: 163753 - DNA, 480 bp, Artificial Sequence
  derived and/or modified sequence
atggcccgaggcgagcgaaggcgacgcgctgtgcctgccgaaggggtgagaactgcagagagagcggctcgcggaggccctgggaggcgcgacggaaggggaggtgggcctcgatcaacggccggtggggttgcgttagccgttgtcgtgcttagtcttgctctgggcatgagcggcagatgggtcctcgcctggtatcgggcacgacgcgcagtgactctgcatagcgccccaccagtcttgcccgcagatagcagttcacctgccgtggctcctgaccttttttggggaacttaccgaccccacgtatacttcgggatgaaaaccaggtcgccaaagcccttgctaaccggactgagatacttctgccctcccttcgggctgccagttctcctttgcggggatcggtggcagggcagccctaccacccgaggctggggccagggcgctgtggaggtctatcagtgggcccaccagtag

SEQ ID NO: 163754 - DNA, 2514 bp, Artificial Sequence
  derived and/or modified sequence
atggccagaggcgagagaagaagaagagccgtgcccgccgagggcgtgagaaccgccgagagagccgccagaggcggccccggcagaagagacggcagaggcggcggccccagaagcaccgccggcggcgtggccctggccgtggtggtgctgagcctggccctgggcatgagcggcagatgggtgctggcctggtacagagccagaagagccgtgaccctgcacagcgccccccccgtgctgcccgccgacagcagcagccccgccgtggcccccgacctgttctggggcacctacagaccccacgtgtacttcggcatgaagaccagaagccccaagcccctgctgaccggcctgatgtgggcccagcagggcaccacccccggcacccccaagctgagacacacctgcgagcagggcgacggcgtgggcccctacggctgggagttccacgacggcctgagcttcggcagacagcacatccaggacggcgccctgagactgaccaccgagttcgtgaagagacccggcggccagcacggcggcgactggagctggagagtgaccgtggagccccaggacagcggcaccagcgccctgcccctggtgagcctgttcttctacgtggtgaccgacggcaaggaggtgctgctgcccgaggtgggcgccaagggccagctgaagttcatcagcggccacaccagcgagctgggcgacttcagattcaccctgctgccccccaccagccccggcgacaccgcccccaagtacggcagctacaacgtgttctggaccagcaaccccggcctgcccctgctgaccgagatggtgaagagcagactgaacagctggttccagcacagaccccccggcgccccccccgagagatacctgggcctgcccggcagcctgaagtgggaggacagaggccccagcggccagggccagggccagttcctgatccagcaggtgaccctgaagatccccatcagcatcgagttcgtgttcgagagcggcagcgcccaggccggcggcaaccaggccctgcccagactggccggcagcctgctgacccaggccctggagagccacgccgagggcttcagagagagattcgagaagaccttccagctgaaggagaagggcctgagcagcggcgagcaggtgctgggccaggccgccctgagcggcctgctgggcggcatcggctacttctacggccagggcctggtgctgcccgacatcggcgtggagggcagcgagcagaaggtggaccccgccctgttcccccccgtgcccctgttcaccgccgtgcccagcagaagcttcttccccagaggcttcctgtgggacgagggcttccaccagctggtggtgcagagatgggaccccagcctgaccagagaggccctgggccactggctgggcctgctgaacgccgacggctggatcggcagagagcagatcctgggcgacgaggccagagccagagtgccccccgagttcctggtgcagagagccgtgcacgccaacccccccaccctgctgctgcccgtggcccacatgctggaggtgggcgaccccgacgacctggccttcctgagaaaggccctgcccagactgcacgcctggttcagctggctgcaccagagccaggccggccccctgcccctgagctacagatggagaggcagagaccccgccctgcccaccctgctgaaccccaagaccctgcccagcggcctggacgactaccccagagccagccaccccagcgtgaccgagagacacctggacctgagatgctgggtggccctgggcgccagagtgctgaccagactggccgagcacctgggcgaggccgaggtggccgccgagctgggccccctggccgccagcctggaggccgccgagagcctggacgagctgcactgggcccccgagctgggcgtgttcgccgacttcggcaaccacaccaaggccgtgcagctgaagcccagacccccccagggcctggtgagagtggtgggcagaccccagccccagctgcagtacgtggacgccctgggctacgtgagcctgttccccctgctgctgagactgctggaccccaccagcagcagactgggccccctgctggacatcctggccgacagcagacacctgtggagccccttcggcctgagaagcctggccgccagcagcagcttctacggccagagaaacagcgagcacgaccccccctactggagaggcgccgtgtggctgaacgtgaactacctggccctgggcgccctgcaccactacggccacctggagggcccccaccaggccagagccgccaagctgcacggcgagctgagagccaacgtggtgggcaacgtgtggagacagtaccaggccaccggcttcctgtgggagcagtacagcgacagagacggcagaggcatgggctgcagacccttccacggctggaccagcctggtgctgctggccatggccgaggactactag

SEQ ID NO: 163755 - DNA, 2514 bp, Artificial Sequence
  derived and/or modified sequence
atggcccggggagaaagacgcagacgagccgtgccagctgagggggtgcgcaccgcggagagggccgccaggggtggtccgggccgccgcgacggtcggggcggtggcccaagatctacagctggaggcgtcgcactggccgtagtcgtcctaagtcttgctctgggaatgtctggccggtgggtactcgcctggtatcgcgctaggagggctgttaccttgcactcggcaccccctgtgctcccagccgattccagttcaccagctgtggcgcccgatctcttttggggcacataccgtccccacgtctatttcggtatgaagacccgttccccaaagccgctgttaactggactgatgtgggcgcagcagggcacaacacccggcaccccaaagctgcgccacacctgtgagcagggagacggagttggaccctacggatgggagttccatgacggcctctctttcggtcgacagcatattcaggacggggccctccgcttaaccactgagttcgttaagagacccgggggacagcacgggggggattggtcatggagagttacagtggaaccccaggattccggcacctctgctttacccttggtatcactgtttttctatgtcgtgactgacggcaaagaggtcctgttaccagaagtcggtgccaaaggtcaattgaagtttatctccggacatacctccgagctaggagacttccgttttacgttgctaccgcccaccagccccggagacaccgctcccaagtacgggtcatataacgtgttttggacctcgaacccaggtctccctctgttaacagagatggtaaaatcccgccttaacagctggttccagcatcgtccacccggagcccctccagagaggtatcttggcctgcccggctcactgaagtgggaggatcgcggaccatctggccaaggacagggtcagttcctcattcagcaggtgacgctcaagatccctatatctattgagttcgtgttcgaaagtggcagtgctcaggctggagggaaccaggcgctcccgcgcctggcagggtccttactgacccaggccctcgaatctcacgcagaaggattccgggagaggttcgagaagacattccagctgaaagaaaagggactgtcatccggggaacaggtgctcggacaggcggcactatctggtcttctggggggcatcggctatttctatggacagggcttggtactaccggacattggggtggaggggagcgagcagaaggttgatccggctctttttcctccagtacctttgttcacagcagttccttccagatccttctttcccagaggatttttgtgggacgagggattccatcagctggtcgtgcaacggtgggatcctagcctcacacgcgaggcactgggacactggttgggactgctgaacgcggatgggtggatcggccgagagcagattctgggagacgaagcccgggcgagggttcctccagagttcttggttcagcgggctgtgcatgcaaaccccccgaccctactcttgcccgtcgctcatatgctggaagtgggcgaccccgatgatcttgcttttctcagaaaggctctacccagattgcacgcatggttcagctggctccaccagtcgcaggccggtccattacctcttagttatcgctggcgggggcgtgatccggctctgcccacgctgctaaaccctaagaccttgccaagtgggctggatgactacccgcgggctagccacccttccgtgactgagcgtcacctcgatttgcgctgttgggttgcgctgggtgctcgggtcttgactcgccttgctgagcatttgggcgaggcagaagttgcggctgagctggggccactggcagccagtctggaagctgccgaatcactggatgaacttcactgggccccggagctcggcgtgtttgctgactttggtaaccacacaaaggctgttcagctgaaacctagacccccccaaggccttgtacgcgtggtgggccggccacagccacagcttcagtacgtggacgcattgggttacgtgtcattgtttcccctgcttctccgtttactggatcccacttcttctaggctcgggcctctgttggacatcctggccgactctcgacatttgtggtccccttttggtttgcgtagccttgctgcgagctcctcgttttatgggcagcgcaacagcgagcatgatcccccgtattggcgaggggctgtgtggcttaacgtgaattacctggccttgggcgccctgcatcactacgggcatctggaggggccgcaccaggctcgtgctgcaaaattgcatggggaactcagagccaacgtcgtgggcaacgtgtggcgccagtatcaggcgaccggattcctatgggagcagtatagcgaccgggatggtaggggaatgggctgtaggccattccacggatggacttccctggtgttgctggctatggctgaggattactag

SEQ ID NO: 163756 - DNA, 2514 bp, Artificial Sequence
  derived and/or modified sequence
atggcccggggggagaggagaagaagagctgtgcctgctgagggcgtgaggacagctgagcgggccgcccggggcggccctggaagaagagatggccggggcggcggccccaggagcacagctggaggagtggccctggccgtggtggtgctgagcctggccctgggcatgagcggccgctgggtgctggcctggtaccgggccaggagagctgtgaccctgcacagcgcccctcctgtgctgcctgctgacagcagcagccctgctgtggccccagacctcttctggggcacctaccggccccacgtgtacttcggcatgaagaccaggagccccaagcccctgctgaccggcctgatgtgggcccagcagggcaccaccccaggcacccccaagctgcggcacacctgtgagcagggagatggagtgggcccctacggctgggagttccatgatggcctgagctttggccggcagcacatccaggatggagccctgcggctgaccacagaatttgtgaagaggcctgggggccagcacggcggggactggagctggagggtgacagtggagccccaggacagcggcaccagcgccctgcccctggtgtccctcttcttctacgtggtgacagatggcaaggaggtgctgctgcctgaggtgggcgccaagggccagctgaagttcatcagcggccacaccagcgagctgggggacttccgcttcaccctgctgccccccaccagccctggggacacagcccccaagtatggcagctacaacgtgttctggaccagcaaccctggcctgcccctgctgacagagatggtgaagagccggctgaacagctggttccagcacaggcctcctggggcccctcctgagcgctacctgggcctgcccggcagcctgaagtgggaggaccggggccccagcggccagggccagggccagttcctgatccagcaggtgaccctgaagatccccatcagcattgaatttgtgtttgagagcggcagcgcccaggccggcggcaaccaggccctgccccggctggccggcagcctgctgacccaggccctggagagccatgctgagggcttccgggagagatttgagaagaccttccagctgaaggagaagggcctgagcagtggagagcaggtgctgggccaggccgccctgagcggcctgctgggcggcatcggctacttctacggccagggcctggtgctgcctgacattggagtggagggcagcgagcagaaggtggaccctgccctcttcccccctgtgcccctcttcaccgctgtgcccagccgctccttcttcccccggggcttcctgtgggatgagggcttccaccagctggtggtgcagcgctgggaccccagcctgacccgggaggccctgggccactggctgggcctgctgaatgctgatggctggattggccgggagcagatcctgggagatgaggcccgggcccgggtgcccccagagttcctggtgcagagagctgtgcacgccaacccccccaccctgctgctgcctgtggcccacatgctggaggtgggggaccctgatgacctggccttcctgaggaaggccctgccccggctgcacgcctggttctcctggctgcaccagagccaggccggccccctgcccctgagctaccgctggaggggccgggaccctgccctgcccaccctgctgaaccccaagaccctgcccagcggcctggatgactacccccgggccagccaccccagcgtgacagagcggcacctggacctgcgctgctgggtggccctgggcgcccgggtgctgacccggctggccgagcacctgggggaggccgaggtggccgctgagctgggccccctggccgccagcctggaggccgctgagagcctggatgagctgcactgggcccctgagctgggcgtgtttgctgactttggaaaccacaccaaggctgtgcagctgaagccccggcccccccagggcctggtgcgggtggtgggccggccccagccccagctgcagtatgtggatgccctgggctacgtgtccctcttccccctgctgctgcggctgctggaccccaccagcagccggctgggccccctgctggacatcctggccgacagccgccacctgtggagccccttcggcctgcggagcctggccgccagcagcagcttctacggccagagaaattctgaacatgaccccccctactggagaggagctgtgtggctgaatgtgaactacctggccctgggcgccctgcaccactacggccacctggagggcccccaccaggcccgggccgccaagctgcacggggagctgcgggccaacgtggtgggcaatgtgtggaggcagtaccaggccaccggcttcctgtgggagcagtacagcgacagagatggccggggcatgggctgccggcccttccacggctggaccagcctggtgctgctggccatggccgaggactactag

SEQ ID NO: 163757 - DNA, 2514 bp, Artificial Sequence
  derived and/or modified sequence
atggcccggggcgagcggcggcggcgggccgtgcccgccgagggcgtgaggactgcagaaagagctgcacgtgggggtccaggtcgaagagatggtcgtggcggtggacctcggtctaccgccggaggcgtggccctcgctgtcgtcgtgttgtcactagcgctcggcatgtctgggagatgggttctagcatggtaccgcgcacgacgggcggtgaccctccattctgctccaccggtgcttccagcggattcttcctcccccgccgtcgcccctgacttgttttggggcacctatcgacctcacgtctatttcgggatgaaaactcggtcgcccaaacctctactcactggccttatgtgggcccagcagggaacaacaccaggcacccctaagctgcgccacacctgtgagcagggcgacggcgtcggaccttacggctgggagtttcacgatggactgtccttcgggagacagcacattcaggacggagcccttaggctgaccacagagttcgtgaaaagacctggggggcagcacggcggagattggtcctggagagtgaccgtagaacctcaggattctgggacatccgccttgccgcttgtgagcttattcttttacgtcgtcaccgacggcaaggaggtgttgttgccagaggttggtgccaaagggcaactgaaattcatctccggacacacatcagagttaggggactttcggttcacactcctgccccctacatcaccgggggatacagcccccaaatacggttcttacaatgtgttttggaccagcaaccccggtttacctctgttgactgaaatggtgaagagtcgcttaaattcatggtttcagcatagacctcctggcgcccctcctgagcgatacctcggacttcctggctcccttaagtgggaggataggggcccaagcggacaaggtcagggtcagtttttgatccagcaggtgactttgaagatcccaatttccatagagtttgtgttcgaaagcggcagtgctcaggccggcggcaaccaggccctgccccggttagctgggtccctgcttacgcaggcacttgaatctcacgctgaaggcttcagagagagatttgagaagacattccaactgaaggagaagggcctcagctcaggggaacaggttctgggccaggccgccttatctggccttctcgggggcatagggtacttttacggacaggggctggtacttcccgacattggggtcgagggcagcgaacagaaagtggatcccgccctattcccccccgttccactctttaccgcggtgccttcgaggtccttcttcccccgcggctttctatgggatgagggatttcatcagctggtggttcagcggtgggacccctctctgacaagagaagcccttggacattggctgggactgcttaatgcggatggctggattggaagggaacaaattctaggagacgaagctagggccagagtgcccccagaatttttggttcagagagcggtgcatgccaatcccccaaccctcttgttaccggtggcccacatgttagaggtaggggatccagatgacctggcctttcttaggaaggccctgccgaggctacacgcctggttctcatggctccatcagagccaagctggccccctgcctctcagctaccgctggagggggcgagacccagccctacccacactccttaaccctaagacccttccttccggcctggacgactacccccgggcttcacatcctagcgtgactgaaagacacctggatctccgctgttgggtcgccctcggggctagagtgctcacccggctggctgaacatttaggggaggccgaggtggctgcggagttgggacctctggctgcttcccttgaagcagccgagagcctcgatgagctgcactgggcacccgaactcggagtgtttgcagatttcggtaatcacacaaaggccgtgcagctaaagcctcgaccacctcagggactcgtgcgggtggtgggccggccccagcctcagctgcagtacgtcgatgctctgggctacgtgagcctgttcccacttctcctccgtctgctggatccaacttcgtctagactggggccactgctggatatcctggccgattctcggcatctgtggtcccccttcggactgaggagcttggctgcgtcatcctctttctacgggcagcggaatagcgagcacgatcctccctactggcgtggtgcagtgtggcttaacgtgaattacctggccctaggagccttacaccactatgggcaccttgagggtccacatcaagctcgagccgccaaacttcacggtgaattacgggctaatgtcgtgggcaatgtttggcggcagtatcaggccaccgggtttctgtgggaacagtactccgaccgggatgggcggggcatgggttgcaggccttttcacggatggacctccctggtcctgttggcgatggcagaagactactag

SEQ ID NO: 163758 - DNA, 2514 bp, Artificial Sequence
  derived and/or modified sequence
atggcgagaggtgagaggcggagacgagctgtgccagctgaaggcgtgagaactgcagagagagccgcaaggggaggaccaggtagacgcgacgggaggggaggaggaccacggagcacagcgggtggtgtcgcacttgcagtggtcgtcctgtcactcgccctaggaatgagcggacgatgggttctggcttggtatcgagctcggagggcagtgaccctccattctgcccctccagtgctgccggctgattcctctagtccggcagtcgccccagacctattttggggaacctacaggccccacgtatattttggaatgaaaacgcggtcccccaaacctctcctgaccggcctgatgtgggcgcagcaggggaccactcctggcacgcccaaacttcgtcatacttgcgagcagggcgacggcgttgggccatatggttgggagttccatgacggtctgtcttttgggagacagcacattcaagacggggctttacggctcacgacagaattcgtcaaacgccctgggggacagcatggaggagattggtcctggcgggttactgttgagcctcaggattctggaacctctgcactacccttggtgtcgctgttcttttacgttgtgaccgatgggaaagaagtgctcctgcctgaagtgggcgctaagggccagctcaagttcatctcaggccacacttcagagttaggcgattttaggttcaccttgttacccccaaccagcccaggagataccgccccaaaatacgggagttataatgtgttctggaccagcaatccaggattgccactgctaacagagatggttaaatctcggctaaactcttggttccagcatcgccctccgggagctcctcccgaaaggtatctgggactcccagggagcttgaaatgggaggataggggtcccagtggccagggccaggggcaatttctcatccagcaagtcaccttgaaaataccaatttcaattgaatttgtctttgagtcaggatccgctcaagccggaggcaatcaggctctgcctcgcctggcaggatcattactcacacaagccttggagtcgcatgcagaggggttccgcgaaagatttgagaagaccttccagctgaaggagaagggactcagtagcggagaacaggtcctggggcaggccgctctatcaggcctgctgggcggaatcgggtacttctatggacagggcctggtccttcctgacatcggggtcgaaggtagcgaacagaaagttgacccggctttgttcccccctgtgcccctctttaccgctgtgccgagtaggagctttttccctagggggttcctgtgggatgagggatttcaccagctggtcgtgcaaaggtgggacccctctttgactagggaggccctcggccactggctgggcttgctgaacgcagatggctggattgggcgagagcaaatccttggcgacgaggctagggccagagttccaccagagtttttagtacaacgcgctgtgcacgcaaatccccctacgctcttactacctgtagctcatatgctcgaggtgggcgatcccgatgatctcgcattccttagaaaagccctgccgcgtctgcatgcctggttcagttggctgcaccagtcccaggctggcccactgcccctttcatatcgttggagaggcagggacccagcgctgcccacgctgctgaacccaaagacactcccttctggattagatgattacccacgcgctagccacccatctgtcacagaaaggcatctggatttgcggtgctgggttgcactcggggcaagggtcctgactcggctggctgaacaccttggagaagcagaggtcgctgcagagctgggtcctctcgctgcgagtctggaggctgccgaaagtttggacgaactacactgggctcctgagctcggggttttcgctgacttcggcaaccacacaaaggccgtgcaactgaaacctcggccaccccagggtctggtccgggttgtcggtcgaccgcagccccagctgcagtacgttgacgccctgggatatgtgtctttattccccttgctgttgcggcttctggaccccacttcgagcaggctgggaccactgctggatatcttggccgattccagacacttgtggtctcccttcggcctgcgttctctggctgctagttccagtttttatggacagaggaatagtgagcacgacccaccttactggagaggcgcagtctggctgaacgttaattatctcgccctgggcgctctgcatcactatggccatctagagggtccccatcaggcgagggccgcaaaactgcacggggaactgcgcgctaacgtcgtggggaacgtgtggagacagtatcaggcaaccgggttcctctgggaacagtactcagatagggatgggagaggcatggggtgtcggccattccacggctggacttcgctggtgctgttggccatggctgaggactattag

SEQ ID NO: 163759 - protein, 320 aa, Artificial Sequence
  derived and/or modified sequence
MPMYQVKPYHGGGAPLRVELPTCMYRLPNVHGRSYGPAPGAGHVQEESNLSLQALESRQDDILKRLYELKAAVDGLSKMIQTPDADLDVTNIIQADEPTTLTTNALDLNSVLGKDYGALKDIVINANPASPPLSLLVLHRLLCEHFRVLSTVHTHSSVKSVPENLLKCFGEQNKKQPRQDYQLGFTLIWKNVPKTQMKFSIQTMCPIEGEGNIARFLFSLFGQKHNAVNATLIDSWVDIAIFQLKEGSSKEKAAVFRSMNSALGKSPWLAGNELTVADVVLWSVLQQIGGCSVTVPANVQRWMRSCENLAPFNTALKLLK

SEQ ID NO: 163760 - DNA, 963 bp, Artificial Sequence
  derived and/or modified sequence
atgcccatgtaccaggtgaagccctaccacggcggcggcgcccccctgagagtggagctgcccacctgcatgtacagactgcccaacgtgcacggcagaagctacggccccgcccccggcgccggccacgtgcaggaggagagcaacctgagcctgcaggccctggagagcagacaggacgacatcctgaagagactgtacgagctgaaggccgccgtggacggcctgagcaagatgatccagacccccgacgccgacctggacgtgaccaacatcatccaggccgacgagcccaccaccctgaccaccaacgccctggacctgaacagcgtgctgggcaaggactacggcgccctgaaggacatcgtgatcaacgccaaccccgccagcccccccctgagcctgctggtgctgcacagactgctgtgcgagcacttcagagtgctgagcaccgtgcacacccacagcagcgtgaagagcgtgcccgagaacctgctgaagtgcttcggcgagcagaacaagaagcagcccagacaggactaccagctgggcttcaccctgatctggaagaacgtgcccaagacccagatgaagttcagcatccagaccatgtgccccatcgagggcgagggcaacatcgccagattcctgttcagcctgttcggccagaagcacaacgccgtgaacgccaccctgatcgacagctgggtggacatcgccatcttccagctgaaggagggcagcagcaaggagaaggccgccgtgttcagaagcatgaacagcgccctgggcaagagcccctggctggccggcaacgagctgaccgtggccgacgtggtgctgtggagcgtgctgcagcagatcggcggctgcagcgtgaccgtgcccgccaacgtgcagagatggatgagaagctgcgagaacctggcccccttcaacaccgccctgaagctgctgaagtag

SEQ ID NO: 163761 - DNA, 963 bp, Artificial Sequence
  derived and/or modified sequence
atgcctatgtatcaggttaaaccctatcatggcggtggtgctccactccgggtggaactgccaacttgtatgtatcgtctgcccaacgttcacggtaggtcatacggccccgctcctggagctggacacgtccaggaggagagcaacctaagcctccaggcccttgaaagtcggcaagacgacatacttaagcgcctctatgaactgaaggcggcggtagacggcttgtcgaaaatgatccagacacccgacgccgacctagacgttacaaacatcatacaggcagatgaacctaccaccctcactaccaatgctcttgacctcaattctgttctgggtaaggattacggcgccctcaaggacatcgtcattaacgcaaaccccgctagccccccgctgagtctcctggtactgcaccggctcctctgtgaacacttccgcgtcctgtccactgtgcatacacattcatctgtgaagtctgttcctgaaaacttattgaaatgcttcggcgagcagaataaaaagcagcccaggcaggactatcagttgggcttcactctcatctggaaaaatgtgcctaaaacccagatgaaattcagcattcaaactatgtgtcctatcgagggggagggtaatattgccagatttctgttctccctcttcggccagaagcataatgcagttaatgccactctgattgactcctgggtggacatagcaatcttccagttaaaagagggcagcagcaaagaaaaggcggccgtgttcaggagcatgaatagtgccctaggaaagagcccctggttggctggcaacgagttgacggtcgccgacgtggtgctgtggagcgtgctgcagcagatcggcggttgcagcgtcaccgttcccgccaatgtgcagcgttggatgcgctcatgtgagaacctcgctcctttcaacactgcgctgaagctgttaaagtag

SEQ ID NO: 163762 - DNA, 963 bp, Artificial Sequence
  derived and/or modified sequence
atgcccatgtaccaggtgaagccctaccacggcggcggggcccccctgcgggtggagctgcccacctgcatgtaccgcctgcccaacgtgcacggccgctcctatggccctgcccctggagctggccacgtgcaggaggagagcaacctgagcctgcaggccctggagagccggcaggatgacatcctgaagaggctgtatgagctgaaggctgctgtggatggcctgagcaagatgatccagaccccagatgctgacctggatgtgaccaacatcatccaggctgatgagcccaccaccctgaccaccaatgccctggacctgaacagcgtgctgggcaaggactatggagccctgaaggacatcgtcatcaatgccaacccagccagcccccccctgagcctgctggtgctgcaccggctgctgtgtgagcacttccgggtgctgagcacagtgcacacccacagctctgtgaagtctgtgcctgagaacctgctgaagtgctttggagagcagaacaagaagcagccccggcaggactaccagctgggcttcaccctcatctggaagaatgtgcccaagacccagatgaagttcagcatccagaccatgtgccccattgaaggagagggcaacatcgcccgcttcctgttcagcctgtttggccagaagcacaatgctgtgaatgccaccctgattgacagctgggtggacatcgccatcttccagctgaaggagggcagcagcaaggagaaggctgctgtgttccgctccatgaacagcgccctgggcaagagcccctggctggccggaaatgagctgactgtggctgatgtggtgctgtggagcgtgctgcagcagatcggcggctgcagcgtgacagtgcctgccaacgtgcagcgctggatgaggagctgtgagaacctggcccccttcaacacagccctgaagctgctgaagtag

SEQ ID NO: 163763 - DNA, 963 bp, Artificial Sequence
  derived and/or modified sequence
atgcccatgtaccaggtgaagccctaccacggcggcggcgcccccttgagagtcgagcttccaacatgtatgtacaggctgccgaatgtccacgggaggtcctacggacctgcccccggggcgggacacgtgcaggaggaaagcaacttgtctctgcaagccctggagtctcgccaggacgacattttaaagcgcctttatgagctgaaagcagcggtggacgggttgtccaaaatgatacagacaccagacgctgatcttgacgttactaacataattcaggcggacgagcctacaaccctgacaaccaacgcgttggatctcaatagcgtgttgggcaaggactatggcgccctcaaggacatcgtgataaatgccaacccagcatcaccacctcttagcctgcttgtgttgcacaggctgttgtgcgagcacttccgcgtgctgagcacagtgcacactcactcatcggttaagtccgtgccggagaatctgttgaagtgcttcggagaacaaaataagaaacaacctcgccaggattaccaactcggctttactttgatctggaagaacgtacctaagacgcaaatgaagttctccattcaaactatgtgtcctatcgaaggtgagggcaatatcgcccgattcctgttctctctctttgggcagaagcacaatgcagtgaacgccactctgattgactcatgggtggatatcgccattttccagttgaaagaagggtctagtaaagaaaaagccgcagtattccgttctatgaatagcgctctcgggaagtctccttggctggccggaaatgagttgaccgtcgcagatgtcgttctctggagcgttcttcagcagatcggaggatgttctgtgacagtgcctgcaaacgtacaaaggtggatgcgttcctgcgaaaacctggcaccgttcaacaccgccttaaagcttctgaagtag

SEQ ID NO: 163764 - DNA, 963 bp, Artificial Sequence
  derived and/or modified sequence
atgcccatgtaccaggtgaagccctaccacggcggaggagctccgctgagggttgagttacctacgtgtatgtatcgcttaccaaacgtccacggtaggtcgtatggacccgctcccggtgctggacacgtacaggaagagagtaacctgtctctgcaggcattagaatcccggcaggacgatattctcaaacgcctttatgagcttaaagcggcagtcgacgggctctccaaaatgatccagacccctgacgccgatctcgatgtgactaacattatccaggctgatgagcccactactttgaccacaaatgctttggatttgaatagtgtgctcggcaaggactacggtgcattaaaggacattgttataaatgctaacccagctagcccccctctgtcactgctcgttttgcatcggcttctgtgtgagcatttcagagtcctgagcacggtccacacacattcttctgttaagtccgtgccggagaatctgttgaagtgtttcggggagcaaaacaaaaaacagccgagacaggactatcagctagggtttactttgatctggaagaacgtcccgaaaactcagatgaagttcagcatccagaccatgtgtcctattgagggcgaagggaacatcgctcggtttctcttctccctgttcggacagaaacacaatgccgtgaatgccacccttatcgacagttgggtagacatcgccattttccagttgaaggaaggctccagcaaagagaaggctgccgtttttaggagtatgaactctgcactcggcaagtctccatggctggctggcaacgaactgacagtcgcggatgttgtgctgtggtcggtcctgcagcaaatcgggggatgctcagtcaccgtgcctgctaacgtgcagcgttggatgagatcgtgcgagaaccttgcccctttcaacacagctcttaaactccttaaatag

SEQ ID NO: 163765 - DNA, 1225 bp, Artificial Sequence
  derived and/or modified sequence
gttttcccgaacgcccgcagcagggtcagaagggaggtggccggtctccgtcgtgacctctgacggtttctgagcgttggcctttggcacgcgctacccccttttgctttggttctgccatgccgatgtaccaggtaaagccctatcacgggggcggcgcgcctctccgtgtggagcttcccacctgcatgtaccggctccccaacgtgcacggcaggagctacggcccagcgccgggcgctggccacgtgcaggaagagtctaacctgtctctgcaagctcttgagtcccgccaagatgatattttaaaacgtctgtatgagttgaaagctgcagttgatggcctctccaagatgattcaaacaccagatgcagacttggatgtaaccaacataatccaagcggatgagcccacgactttaaccaccaatgcgctggacttgaattcagtgcttgggaaggattacggggcgctgaaagacatcgtgatcaacgcaaacccggcctcccctcccctctccctgcttgtgctgcacaggctgctctgtgagcacttcagggtcctgtccacggtgcacacgcactcctcggtcaagagcgtgcctgaaaaccttctcaagtgctttggagaacagaataaaaaacagccccgccaagactatcagctgggattcactttaatttggaagaatgtgccgaagacgcagatgaaattcagcatccagacgatgtgccccatcgaaggcgaagggaacattgcacgtttcttgttctctctgtttggccagaagcataatgctgtcaacgcaacccttatagatagctgggtagatattgcgatttttcagttaaaagagggaagcagtaaagaaaaagccgctgttttccgctccatgaactctgctcttgggaagagcccttggctcgctgggaatgaactcaccgtagcagacgtggtgctgtggtctgtactccagcagatcggaggctgcagtgtgacagtgccagccaatgtgcagaggtggatgaggtcttgtgaaaacctggctccttttaacacggccctcaagctccttaagtgaattgccgtaactgattttaaagggtttagattttaagaatggtgctctttcatgcctattatcagtaaggggacttgtattagagtcagagtctttttatttaggccagttgtcaagtgtcaataaaagcatcatgtaattta

SEQ ID NO: 163766 - protein, 70 aa, Artificial Sequence
  derived and/or modified sequence
MSEKKQPVDLGLLEEDDEFEEFPAEDWAGLDEDEDAHVWEDNWDDDNVEDDFSNQLRAELEKHGYKMETS

SEQ ID NO: 163767 - DNA, 213 bp, Artificial Sequence
  derived and/or modified sequence
atgagcgagaagaagcagcccgtggacctgggcctgctggaggaggacgacgagttcgaggagttccccgccgaggactgggccggcctggacgaggacgaggacgcccacgtgtgggaggacaactgggacgacgacaacgtggaggacgacttcagcaaccagctgagagccgagctggagaagcacggctacaagatggagaccagctag

SEQ ID NO: 163768 - DNA, 213 bp, Artificial Sequence
  derived and/or modified sequence
atgtctgaaaagaaacagcccgtggacctcggtctcctggaggaggatgatgagtttgaggagttccctgcggaggactgggcagggctggacgaggatgaagatgcccatgtgtgggaggataattgggatgacgataatgtggaggatgacttttcaaatcaactcagagcagagctggagaagcatggctacaaaatggaaacctcctag

SEQ ID NO: 163769 - DNA, 213 bp, Artificial Sequence
  derived and/or modified sequence
atgtctgagaagaagcagcctgtggacctgggcctgctggaggaggatgatgaatttgaggagttccctgctgaggactgggccggcctggatgaagatgaagatgcccacgtgtgggaggacaactgggatgatgacaacgtggaggatgacttcagcaaccagctgcgggcagagctggagaagcacggctacaagatggagaccagctag

SEQ ID NO: 163770 - DNA, 213 bp, Artificial Sequence
  derived and/or modified sequence
atgagcgagaagaagcagcccgtggacctgggcctgctggaggaggacgatgagttcgaggagttccccgccgaggactgggctggcctcgacgaagatgaggacgcgcacgtgtgggaggacaattgggacgacgacaatgttgaggacgacttctcaaaccagctgagggcagagctggagaagcacggctacaaaatggagacctcttag

SEQ ID NO: 163771 - DNA, 213 bp, Artificial Sequence
  derived and/or modified sequence
atgtcggaaaagaagcagcccgtggatttgggtctgcttgaggaagatgacgagtttgaggagtttccagcggaagattgggctggattagatgaagacgaggacgcccatgtttgggaagataattgggacgacgataatgtcgaagacgatttcagtaatcaattgagagcagagttggagaaacacggctacaaaatggaaacatcatag

SEQ ID NO: 163772 - DNA, 807 bp, Artificial Sequence
  derived and/or modified sequence
attctttccccaagtctctatggtagcgtcagcgtcggaggcggtagtgacggtggcgtttccttgaggaagagtgagggttccaacttttctgcttatctgggaggtgttgggcgcggacagtcgagatgtcagagaaaaagcagccggtagacttaggtctgttagaggaagacgacgagtttgaagagttccctgccgaagactgggctggcttagatgaagatgaagatgcacatgtctgggaggataattgggatgatgacaatgtagaggatgacttctctaatcagttacgagctgaactagagaaacatggttataagatggagacttcatagcatccagaagaagtgttgaagtaacctaaacttgacctgcttaatacattctagggcagagaacccaggatgggacactaaaaaaatgtgtttatttcattatctgcttggatttatttgtgtttttgtaacacaaaaaataaatgttttgatataatcttggtttggttcagaagtcttaatcttttgcttctaatcaattttcttgtcatgattttccaaaaccttattatatatagatagtaaaatttcatattatgaaattttcttttttttttttaatgttaactgagtgaggctcaggttaaatgatctggagtagatttcacctgattcccaattcagtacttttcttaaaccacatcaattaattgttacttctattttataaggaatttcttttacatcacattgaaccttaatctcttctgtattttgatagcttaggcaacatttgctgacattt

SEQ ID NO: 163773 - protein, 210 aa, Artificial Sequence
  derived and/or modified sequence
MEMGRRIHLELRNRTPSDVKELVLDNSRSNEGKLEGLTDEFEELEFLSTINVGLTSIANLPKLNKLKKLELSDNRVSGGLEVLAEKCPNLTHLNLSGNKIKDLSTIEPLKKLENLKSLDLFNCEVTNLNDYRENVFKLLPQLTYLDGYDRDDKEAPDSDAEGYVEGLDDEEEDEDEEEYDDEEGYNDGEVDDEEDKKKKKKKKKKKKKKK

SEQ ID NO: 163774 - protein, 249 aa, Artificial Sequence
  derived and/or modified sequence
MEMGRRIHLELRNRTPSDVKELVLDNSRSNEGKLEGLTDEFEELEFLSTINVGLTSIANLPKLNKLKKLELSDNRVSGGLEVLAEKCPNLTHLNLSGNKIKDLSTIEPLKKLENLKSLDLFNCEVTNLNDYRENVFKLLPQLTYLDGYDRDDKEAPDSDAEGYVEGLDDEEEDEDEEEYDEDAQVVEDEEDEDEEEEGEEEDVSGEEEEDEEGYNDGEVDDEEDEEELGEEERGQKRKREPEDEGEDDD

SEQ ID NO: 163775 - DNA, 2479 bp, Artificial Sequence
  derived and/or modified sequence
agatcccgcctccacggcgatcaggttagtgtgcgccgcgggtgctgggggctcgagaaccgagcggagctggttgagccttcaaagtcctaaaacgcgcggccgtgggttcggggtttattgattgaattccgccggcgcgggagcctctgcagagagagagcgcgagagatggagatgggcagacggattcatttagagctgcggaacaggacgccctctgatgtgaaagaacttgtcctggacaacagtcggtcgaatgaaggcaaactcgaaggcctcacagatgaatttgaagaactggaattcttaagtacaatcaacgtaggcctcacctcaatcgcaaacttaccaaagttaaacaaacttaagaagcttgaactaagcgataacagagtctcagggggcctggaagtattggcagaaaagtgtccgaacctcacgcatctaaatttaagtggcaacaaaattaaagacctcagcacaatagagccactgaaaaagttagaaaacctcaagagcttagaccttttcaattgcgaggtaaccaacctgaacgactaccgagaaaatgtgttcaagctcctcccgcaactcacatatctcgacggctatgaccgggacgacaaggaggcccctgactcggatgctgagggctacgtggagggcctggatgatgaggaggaggatgaggatgaggaggagtatgatgaagatgctcaggtagtggaagacgaggaggacgaggatgaggaggaggaaggtgaagaggaggacgtgagtggagaggaggaggaggatgaagaaggttataacgatggagaggtagatgacgaggaagatgaagaagagcttggtgaagaagaaaggggtcagaagcgaaaacgagaacctgaagatgagggagaagatgatgactaagtggaataacctattttgaaaaattcctattgtgatttgactgtttttacccatatcccctctcccccccccctccaatcctgccccctgaaacttatttttttctgattgtaacgttgctgtgggaacgagaggggaagagtgtactgggggttgcggggggagggatggcgggtgggggtggaataaaatactatttttactgccactctttatttttttcccctactttttctttgtgtccggtttttgtccctgtaaatgcgatagctaagtacacactaagtgagcatttgttcctgactctcaaagaggatggtttggagttctcttacgtttcctggtatttcccaagtctcttgggttggttggaaggctgtggctggtctcagtttggttactcaatgcccaggaggggctgagcaccagccatatcttttgctttggttcacatgatgatacctgcttttctcaggcctgctagaggcatccaacgccctggtttgtaaatagcaacctaaaggcgtattttggcactggtctggggacattccccatctctcatcccttttcccccttcacagatggtggtgggcttcgctctacaaagaggactctgatgttactcttgagcttatgagccagagagctgaaaaccgcaggcttgttgtgttaagttacaaggaaaatggatttggtaattaaaattagaagaaacacaccttcaaacttcaacttctttaaaagaaaaaaaaaactgtcctatcttgttctgtaaaatattagaacgctttgttttacaaaaaatgatgagagaattcttccacatgtacttctgtgcttagaacatttttacggacctaagcgctggagacgttgctgcatgtcggctgggttttttttttcatacacccgagcacggaaaaactaacgcaaaattgtattttcttacctagtggaaatctgaaatgactgcaaattcctagtgaatgtacaggtttgctttcgtgtccctcttctggttgctttagaagtgacgtgtaatttctgaacccatgtttcatctgtataaaagaacatctgcaccagtttttctcctgcccctcagaagagccaaactttgagttttatgtctgtttgtcattgataaatttcaataaatctttttatacaatttttttggggatggcttctttgagtccaacaggccattgatcttttcaagatgcattccagatgaactgctaggtgagggggaagcttcatttttgttacctgatagaatagcttttcttatgagatatatataatgtgatactatgtttggatatttttggtcttaaagcaagactcagtggtgtatcttcattaaaagcttcctttaaaaaagttacagagttactaaaaaaacaagtacccaaacaatcaagttgggccaaccttggaaccttgttttgaatatctttcattgttttgtttgtcgtattgtaaaaagaatgtatggttgaaaactcaggaatgtttataaaacaaattatttcacaaaaaaaaaaaaaaa

SEQ ID NO: 163776 - DNA, 633 bp, Artificial Sequence
  derived and/or modified sequence
atggaaatgggacggcgcatccacctcgaattgcgcaacagaacgccctccgacgtgaaggagctagttttggacaattcacgatcgaatgaaggcaagttggagggtctgaccgatgaatttgaggagcttgaatttctgtcgactattaatgtcgggctgacatctattgccaacctacccaaattgaacaagctgaaaaagctagagctgagtgacaatcgggtctccggtgggctcgaggtgctagctgaaaaatgcccaaacttgacccatctcaacctgtccgggaataagatcaaagacctgtcgaccatagagcctttgaagaaattggaaaaccttaagtcactggatctttttaattgcgaagtcaccaacttgaatgattaccgcgaaaatgtgttcaagctgctgccccagctcacttacctcgacgggtacgatcgggatgataaagaggcacctgattcagatgccgaaggctacgttgaggggcttgacgatgaggaagaggacgaagacgaggaggaatatgatgacgaggagggctacaatgacggagaggtggatgacgaagaagacaagaagaagaagaagaaaaagaaaaagaaaaaaaagaagaagaaatag

SEQ ID NO: 163777 - DNA, 750 bp, Artificial Sequence
  derived and/or modified sequence
atggaaatgggaagaagaatccacctcgagcttcgaaatcggacacctagtgacgtcaaagagctggtactggacaatagcagaagtaatgagggtaaactggaggggctgacagatgagtttgaggagttagaatttctaagtaccatcaatgtgggtttaacttcgattgctaatctgcctaaactcaacaagttgaagaaattagaattgagcgataatagggtctcaggtggattagaggttctggccgaaaagtgtcccaacctcactcacctgaatctcagcggaaacaagatcaaagatctgagtacaatagagccacttaaaaagctggagaacctcaaatccctggatttgttcaattgcgaggtaactaacctgaacgattacagagagaatgtctttaagcttctgccccaactgacctacctcgatggctatgaccgggacgacaaggaggccccagattccgacgcagaaggatatgtggagggcctcgacgacgaagaggaagatgaggatgaagaagagtacgatgaagatgcccaggtggtggaggatgaggaagatgaagacgaggaagaagagggcgaagaggaggacgtctctggtgaggaggaggaagatgaagaggggtacaacgatggagaggtggacgacgaggaggacgaggaagagttgggggaagaggagcgaggccagaagcgaaagcgagagcctgaagatgaaggagaggacgacgactag

SEQ ID NO: 163778 - DNA, 633 bp, Artificial Sequence
  derived and/or modified sequence
atggagatgggccgccgcatccacctggagctgaggaacagaacacccagtgatgtgaaggagctggtgctggacaacagccgcagcaatgaaggcaagctggagggcctgacagatgaatttgaggagctggagttcctgagcaccatcaacgtgggcctgaccagcatcgccaacctgcccaagctgaacaagctgaagaagctggagctgagtgacaacagagtgtctgggggcctggaggtgctggccgagaagtgccccaacctgacccacctgaacctgagcggcaacaagatcaaggacctgagcaccatcgagcccctgaagaagctggagaacctgaagagcctggacctcttcaactgtgaggtgaccaacctgaatgactacagagaaaatgtgttcaagctgctgccccagctgacctacctggatggctatgacagagatgacaaggaggccccagacagtgatgctgagggctacgtggagggcctggatgatgaggaggaggatgaagatgaggaggagtatgatgatgaggagggctacaatgatggagaggtggatgatgaggaggacaagaagaagaagaagaagaagaagaagaagaagaagaagaagaagtag

SEQ ID NO: 163779 - DNA, 750 bp, Artificial Sequence
  derived and/or modified sequence
atggagatgggccgccgcatccacctggagctgaggaacagaacacccagtgatgtgaaggagctggtgctggacaacagccgcagcaatgaaggcaagctggagggcctgacagatgaatttgaggagctggagttcctgagcaccatcaacgtgggcctgaccagcatcgccaacctgcccaagctgaacaagctgaagaagctggagctgagtgacaacagagtgtctgggggcctggaggtgctggccgagaagtgccccaacctgacccacctgaacctgagcggcaacaagatcaaggacctgagcaccatcgagcccctgaagaagctggagaacctgaagagcctggacctcttcaactgtgaggtgaccaacctgaatgactacagagaaaatgtgttcaagctgctgccccagctgacctacctggatggctatgacagagatgacaaggaggccccagacagtgatgctgagggctacgtggagggcctggatgatgaggaggaggatgaagatgaggaggagtatgatgaagatgcccaggtggtggaggatgaggaggatgaagatgaggaggaggagggggaggaggaggatgtgtctggagaggaggaggaggatgaggagggctacaatgatggagaggtggatgatgaagaagatgaggaggagctgggggaggaggagcggggccagaagaggaagcgggagccagaagatgaaggagaagatgatgactag

SEQ ID NO: 163780 - DNA, 633 bp, Artificial Sequence
  derived and/or modified sequence
atggagatgggccggcggatccacctggagctgcggaaccggaccccgtcggacgtaaaggagctcgtactagataactctagatccaacgaggggaaactagaaggtctgactgatgaattcgaagagctggaatttctgtccactatcaatgtggggttgacatccattgcgaacctccccaaactgaataaactgaaaaagctggaactgtcagacaatcgggtgtcaggtggcctggaagtgctggccgagaaatgtcctaatctcacacaccttaatttaagtggaaacaaaatcaaggatcttagtactatcgaaccgcttaaaaagctggagaatctgaagtctctcgacctgttcaattgtgaggttaccaatctcaatgattaccgagaaaacgtgtttaaactgctccctcagcttacttacttggacggctacgaccgggacgacaaagaggcccccgacagcgatgctgaggggtatgtggagggactcgatgatgaggaagaggatgaggacgaagaggagtatgatgacgaggagggctacaacgatggtgaagtcgacgacgaagaggacaagaaaaagaagaaaaaaaagaaaaagaaaaagaagaagaaaaagtag

SEQ ID NO: 163781 - DNA, 750 bp, Artificial Sequence
  derived and/or modified sequence
atggagatgggccggcggatccacctggagctgcggaaccggaccccttcggatgttaaagagttggttctcgataacagcagatctaacgagggcaagctcgaaggtctgactgatgagttcgaggagctggagttcctgagcacaatcaatgtgggactcacgtcaatagccaacttgcctaaactgaataaattgaagaagctggagttatccgataaccgggttagtggaggtcttgaggtgctggcagagaagtgcccgaatttgactcatctcaacctgagcggcaacaaaatcaaggatctttctacaattgagcccctcaagaaactggaaaatctcaaatcattagatctcttcaactgcgaagtgactaatctgaacgattatagagagaatgttttcaaactgctgccccagcttacttacttagacggttacgaccgagacgacaaggaggcaccagatagcgatgcggagggctacgtggaggggttagacgatgaggaagaagacgaagatgaagaagagtatgacgaggatgctcaggtggtggaggacgaagaagatgaggatgaggaagaggagggggaggaggaggacgtttctggagaggaagaagaagatgaggaggggtacaacgatggcgaggttgatgacgaggaagatgaagaggagctgggcgaggaagagcgcggacagaagcggaagagggaaccagaggacgagggcgaggacgacgattag

SEQ ID NO: 163782 - DNA, 633 bp, Artificial Sequence
  derived and/or modified sequence
atggagatgggaagaagaatacatctggaactccggaataggaccccgtcagacgtaaaggaactagtgctcgataattcaaggagcaacgaagggaagcttgaaggccttaccgatgagtttgaagaattggaattcctcagtacaatcaatgtaggcctgacatctatcgcgaatctccccaaactcaacaaactcaagaaactcgagttatcagacaatcgcgtcagtggcggactggaagttcttgctgaaaagtgcccgaacctcacacaccttaacttatccggcaataagataaaagacctctcaacgatcgagccccttaaaaaactcgagaacctcaagtctctggacctgttcaattgcgaggtcactaatttgaacgactaccgggagaatgtgtttaagcttcttcctcagctcacttacctggatgggtacgaccgtgatgataaagaggctcctgattctgatgccgagggctatgtcgagggcctggatgatgaagaggaggacgaggacgaggaggagtacgatgatgaggaaggatataatgacggcgaagtcgacgatgaagaggacaagaaaaaaaaaaagaaaaagaaaaaaaagaagaaaaagaagaagtag

SEQ ID NO: 163783 - DNA, 750 bp, Artificial Sequence
  derived and/or modified sequence
atggagatgggacggagaatccacctggaactacgaaacagaacacctagcgatgtgaaagaactcgtcttggataactctaggagcaacgaaggcaagttggagggactgacagacgaattcgaggagcttgaattcctctctaccattaacgtcggccttactagcatcgcaaatttgccaaaactaaataagctgaagaaattagaattgagcgacaatagagtctcagggggacttgaggtcttggcagagaagtgcccaaatttgacacatctgaatctgtctggaaacaagattaaggatttaagtactattgaacccctgaagaagctcgaaaatctcaagtctctcgacctcttcaactgtgaagttactaacctaaatgactatcgtgagaatgttttcaagctgctgcctcaactgacataccttgatggctatgatcgcgacgacaaagaagcccctgactccgatgccgaggggtacgtagaagggctcgatgacgaggaggaggacgaggacgaagaggagtacgacgaggacgcccaagtggtggaagatgaggaagatgaggatgaagaggaagagggtgaagaggaagatgtctctggcgaagaggaggaggatgaagaaggttataatgatggtgaggtcgacgatgaggaagacgaagaggagttaggagaagaagaacgcggtcagaagaggaaaagagagcccgaagatgagggtgaagacgacgattag

SEQ ID NO: 163784 - DNA, 753 bp, Artificial Sequence
  derived and/or modified sequence
gggctcgagaaccgagcggagctggttgagccttcaaagtcctaaaacgcgcggccgtgggttcggggtttattgattgaattccgccggcgcgggagcctctgcagagagagagcgcgagagatggagatgggcagacggattcatttagagctgcggaacaggacgccctctgatgtgaaagaacttgtcctggacaacagtcggtcgaatgaaggcaaactcgaaggcctcacagatgaatttgaagaactggaattcttaagtacaatcaacgtaggcctcacctcaatcgcaaacttaccaaagttaaacaaacttaagaagcttgaactaagcgataacagagtctcagggggcctggaagtattggcagaaaagtgtccgaacctcacgcatctaaatttaagtggcaacaaaattaaagacctcagcacaatagagccactgaaaaagttagaaaacctcaagagcttagaccttttcaattgcgaggtaaccaacctgaacgactaccgagaaaatgtgttcaagctcctcccgcaactcacatatctcgacggctatgaccgggacgacaaggaggcccctgactcggatgctgagggctacgtggagggcctggatgatgaggaggaggatgaggatgaggaggagtatgatgatgaagaaggttataacgatggagaggtagatgacgaggaagataaaaagaaaaagaaaaaaaaaaaaaaaaaaaaaaaaaaaaaaaaa

SEQ ID NO: 163785 - DNA, 2440 bp, Artificial Sequence
  derived and/or modified sequence
agtgtgcgccgcgggtgctgggggctcgagaaccgagcggagctggttgagccttcaaagtcctaaaacgcgcggccgtgggttcggggtttattgattgaattccgccggcgcgggagcctctgcagagagagagcgcgagagatggagatgggcagacggattcatttagagctgcggaacaggacgccctctgatgtgaaagaacttgtcctggacaacagtcggtcgaatgaaggcaaactcgaaggcctcacagatgaatttgaagaactggaattcttaagtacaatcaacgtaggcctcacctcaatcgcaaacttaccaaagttaaacaaacttaagaagcttgaactaagcgataacagagtctcagggggcctggaagtattggcagaaaagtgtccgaacctcacgcatctaaatttaagtggcaacaaaattaaagacctcagcacaatagagccactgaaaaagttagaaaacctcaagagcttagaccttttcaattgcgaggtaaccaacctgaacgactaccgagaaaatgtgttcaagctcctcccgcaactcacatatctcgacggctatgaccgggacgacaaggaggcccctgactcggatgctgagggctacgtggagggcctggatgatgaggaggaggatgaggatgaggaggagtatgatgaagatgctcaggtagtggaagacgaggaggacgaggatgaggaggaggaaggtgaagaggaggacgtgagtggagaggaggaggaggatgaagaaggttataacgatggagaggtagatgacgaggaagatgaagaagagcttggtgaagaagaaaggggtcagaagcgaaaacgagaacctgaagatgagggagaagatgatgactaagtggaataacctattttgaaaaattcctattgtgatttgactgtttttacccatatcccctctcccccccccctccaatcctgccccctgaaacttatttttttctgattgtaacgttgctgtgggaacgagaggggaagagtgtactgggggttgcggggggagggatggcgggtgggggtggaataaaatactatttttactgccactctttatttttttcccctactttttctttgtgtccggtttttgtccctgtaaatgcgatagctaagtacacactaagtgagcatttgttcctgactctcaaagaggatggtttggagttctcttacgtttcctggtatttcccaagtctcttgggttggttggaaggctgtggctggtctcagtttggttactcaatgcccaggaggggctgagcaccagccatatcttttgctttggttcacatgatgatacctgcttttctcaggcctgctagaggcatccaacgccctggtttgtaaatagcaacctaaaggcgtattttggcactggtctggggacattccccatctctcatcccttttcccccttcacagatggtggtgggcttcgctctacaaagaggactctgatgttactcttgagcttatgagccagagagctgaaaaccgcaggcttgttgtgttaagttacaaggaaaatggatttggtaattaaaattagaagaaacacaccttcaaacttcaacttctttaaaagaaaaaaaaaactgtcctatcttgttctgtaaaatattagaacgctttgttttacaaaaaatgatgagagaattcttccacatgtacttctgtgcttagaacatttttacggacctaagcgctggagacgttgctgcatgtcggctgggttttttttttcatacacccgagcacggaaaaactaacgcaaaattgtattttcttacctagtggaaatctgaaatgactgcaaattcctagtgaatgtacaggtttgctttcgtgtccctcttctggttgctttagaagtgacgtgtaatttctgaacccatgtttcatctgtataaaagaacatctgcaccagtttttctcctgcccctcagaagagccaaactttgagttttatgtctgtttgtcattgataaatttcaataaatctttttatacaatttttttggggatggcttctttgagtccaacaggccattgatcttttcaagatgcattccagatgaactgctaggtgagggggaagcttcatttttgttacctgatagaatagcttttcttatgagatatatataatgtgatactatgtttggatatttttggtcttaaagcaagactcagtggtgtatcttcattaaaagcttcctttaaaaaagttacagagttactaaaaaaacaagtacccaaacaatcaagttgggccaaccttggaaccttgttttgaatatctttcattgttttgtttgtcgtattgtaaaaagaatgtatggttgaaaactcaggaatgtttataaaacaaattatttcacaaa

SEQ ID NO: 163786 - DNA, 633 bp, Artificial Sequence
  derived and/or modified sequence
atggagatgggcagaagaatccacctggagctgagaaacagaacccccagcgacgtgaaggagctggtgctggacaacagcagaagcaacgagggcaagctggagggcctgaccgacgagttcgaggagctggagttcctgagcaccatcaacgtgggcctgaccagcatcgccaacctgcccaagctgaacaagctgaagaagctggagctgagcgacaacagagtgagcggcggcctggaggtgctggccgagaagtgccccaacctgacccacctgaacctgagcggcaacaagatcaaggacctgagcaccatcgagcccctgaagaagctggagaacctgaagagcctggacctgttcaactgcgaggtgaccaacctgaacgactacagagagaacgtgttcaagctgctgccccagctgacctacctggacggctacgacagagacgacaaggaggcccccgacagcgacgccgagggctacgtggagggcctggacgacgaggaggaggacgaggacgaggaggagtacgacgacgaggagggctacaacgacggcgaggtggacgacgaggaggacaagaagaagaagaagaagaagaagaagaagaagaagaagaagaagtag

SEQ ID NO: 163787 - DNA, 750 bp, Artificial Sequence
  derived and/or modified sequence
atggagatgggcagaagaatccacctggagctgagaaacagaacccccagcgacgtgaaggagctggtgctggacaacagcagaagcaacgagggcaagctggagggcctgaccgacgagttcgaggagctggagttcctgagcaccatcaacgtgggcctgaccagcatcgccaacctgcccaagctgaacaagctgaagaagctggagctgagcgacaacagagtgagcggcggcctggaggtgctggccgagaagtgccccaacctgacccacctgaacctgagcggcaacaagatcaaggacctgagcaccatcgagcccctgaagaagctggagaacctgaagagcctggacctgttcaactgcgaggtgaccaacctgaacgactacagagagaacgtgttcaagctgctgccccagctgacctacctggacggctacgacagagacgacaaggaggcccccgacagcgacgccgagggctacgtggagggcctggacgacgaggaggaggacgaggacgaggaggagtacgacgaggacgcccaggtggtggaggacgaggaggacgaggacgaggaggaggagggcgaggaggaggacgtgagcggcgaggaggaggaggacgaggagggctacaacgacggcgaggtggacgacgaggaggacgaggaggagctgggcgaggaggagagaggccagaagagaaagagagagcccgaggacgagggcgaggacgacgactag

SEQ ID NO: 163788 - protein, 1233 aa, Artificial Sequence
  derived and/or modified sequence
MGFLKLIEIENFKSYKGRQIIGPFQRFTAIIGPNGSGKSNLMDAISFVLGEKTSNLRVKTLRDLIHGAPVGKPAANRAFVSMVYSEEGAEDRTFARVIVGGSSEYKINNKVVQLHEYSEELEKLGILIKARNFLVFQGAVESIAMKNPKERTALFEEISRSGELAQEYDKRKKEMVKAEEDTQFNYHRKKNIAAERKEAKQEKEEADRYQRLKDEVVRAQVQLQLFKLYHNEVEIEKLNKELASKNKEIEKDKKRMDKVEDELKEKKKELGKMMREQQQIEKEIKEKDSELNQKRPQYIKAKENTSHKIKKLEAAKKSLQNAQKHYKKRKGDMDELEKEMLSVEKARQEFEERMEEESQSQGRDLTLEENQVKKYHRLKEEASKRAATLAQELEKFNRDQKADQDRLDLEERKKVETEAKIKQKLREIEENQKRIEKLEEYITTSKQSLEEQKKLEGELTEEVEMAKRRIDEINKELNQVMEQLGDARIDRQESSRQQRKAEIMESIKRLYPGSVYGRLIDLCQPTQKKYQIAVTKVLGKNMDAIIVDSEKTGRDCIQYIKEQRGEPETFLPLDYLEVKPTDEKLRELKGAKLVIDVIRYEPPHIKKALQYACGNALVCDNVEDARRIAFGGHQRHKTVALDGTLFQKSGVISGGASDLKAKARRWDEKAVDKLKEKKERLTEELKEQMKAKRKEAELRQVQSQAHGLQMRLKYSQSDLEQTKTRHLALNLQEKSKLESELANFGPRINDIKRIIQSREREMKDLKEKMNQVEDEVFEEFCREIGVRNIREFEEEKVKRQNEIAKKRLEFENQKTRLGIQLDFEKNQLKEDQDKVHMWEQTVKKDENEIEKLKKEEQRHMKIIDETMAQLQDLKNQHLAKKSEVNDKNHEMEEIRKKLGGANKEMTHLQKEVTAIETKLEQKRSDRHNLLQACKMQDIKLPLSKGTMDDISQEEGSSQGEDSVSGSQRISSIYAREALIEIDYGDLCEDLKDAQAEEEIKQEMNTLQQKLNEQQSVLQRIAAPNMKAMEKLESVRDKFQETSDEFEAARKRAKKAKQAFEQIKKERFDRFNACFESVATNIDEIYKALSRNSSAQAFLGPENPEEPYLDGINYNCVAPGKRFRPMDNLSGGEKTVAALALLFAIHSYKPAPFFVLDEIDAALDNTNIGKVANYIKEQSTCNFQAIVISLKEEFYTKAESLIGVYPEQGDCVISKVLTFDLTKYPDANPNPNEQ

SEQ ID NO: 163789 - protein, 203 aa, Artificial Sequence
  derived and/or modified sequence
MGFLKLIEIENFKSYKGRQIIGPFQRFTAIIGPNGSGKSNLMDAISFVLGEKTSNLRVKTLRDLIHGAPVGKPAANRAFVSMVYSEEGAEDRTFARVIVGGSSEYKINNKVVQLHEYSEELEKLGILIKARNFLVFQGCCGIYCHETPKRGQLYLKISRSGELAQEYDKRKKEMVKAEEDTQFNYHRKKNIAAERKEAKQEKE

SEQ ID NO: 163790 - DNA, 3702 bp, Artificial Sequence
  derived and/or modified sequence
atgggcttcctgaagctgatcgagatcgagaacttcaagagctacaagggcagacagatcatcggccccttccagagattcaccgccatcatcggccccaacggcagcggcaagagcaacctgatggacgccatcagcttcgtgctgggcgagaagaccagcaacctgagagtgaagaccctgagagacctgatccacggcgcccccgtgggcaagcccgccgccaacagagccttcgtgagcatggtgtacagcgaggagggcgccgaggacagaaccttcgccagagtgatcgtgggcggcagcagcgagtacaagatcaacaacaaggtggtgcagctgcacgagtacagcgaggagctggagaagctgggcatcctgatcaaggccagaaacttcctggtgttccagggcgccgtggagagcatcgccatgaagaaccccaaggagagaaccgccctgttcgaggagatcagcagaagcggcgagctggcccaggagtacgacaagagaaagaaggagatggtgaaggccgaggaggacacccagttcaactaccacagaaagaagaacatcgccgccgagagaaaggaggccaagcaggagaaggaggaggccgacagataccagagactgaaggacgaggtggtgagagcccaggtgcagctgcagctgttcaagctgtaccacaacgaggtggagatcgagaagctgaacaaggagctggccagcaagaacaaggagatcgagaaggacaagaagagaatggacaaggtggaggacgagctgaaggagaagaagaaggagctgggcaagatgatgagagagcagcagcagatcgagaaggagatcaaggagaaggacagcgagctgaaccagaagagaccccagtacatcaaggccaaggagaacaccagccacaagatcaagaagctggaggccgccaagaagagcctgcagaacgcccagaagcactacaagaagagaaagggcgacatggacgagctggagaaggagatgctgagcgtggagaaggccagacaggagttcgaggagagaatggaggaggagagccagagccagggcagagacctgaccctggaggagaaccaggtgaagaagtaccacagactgaaggaggaggccagcaagagagccgccaccctggcccaggagctggagaagttcaacagagaccagaaggccgaccaggacagactggacctggaggagagaaagaaggtggagaccgaggccaagatcaagcagaagctgagagagatcgaggagaaccagaagagaatcgagaagctggaggagtacatcaccaccagcaagcagagcctggaggagcagaagaagctggagggcgagctgaccgaggaggtggagatggccaagagaagaatcgacgagatcaacaaggagctgaaccaggtgatggagcagctgggcgacgccagaatcgacagacaggagagcagcagacagcagagaaaggccgagatcatggagagcatcaagagactgtaccccggcagcgtgtacggcagactgatcgacctgtgccagcccacccagaagaagtaccagatcgccgtgaccaaggtgctgggcaagaacatggacgccatcatcgtggacagcgagaagaccggcagagactgcatccagtacatcaaggagcagagaggcgagcccgagaccttcctgcccctggactacctggaggtgaagcccaccgacgagaagctgagagagctgaagggcgccaagctggtgatcgacgtgatcagatacgagcccccccacatcaagaaggccctgcagtacgcctgcggcaacgccctggtgtgcgacaacgtggaggacgccagaagaatcgccttcggcggccaccagagacacaagaccgtggccctggacggcaccctgttccagaagagcggcgtgatcagcggcggcgccagcgacctgaaggccaaggccagaagatgggacgagaaggccgtggacaagctgaaggagaagaaggagagactgaccgaggagctgaaggagcagatgaaggccaagagaaaggaggccgagctgagacaggtgcagagccaggcccacggcctgcagatgagactgaagtacagccagagcgacctggagcagaccaagaccagacacctggccctgaacctgcaggagaagagcaagctggagagcgagctggccaacttcggccccagaatcaacgacatcaagagaatcatccagagcagagagagagagatgaaggacctgaaggagaagatgaaccaggtggaggacgaggtgttcgaggagttctgcagagagatcggcgtgagaaacatcagagagttcgaggaggagaaggtgaagagacagaacgagatcgccaagaagagactggagttcgagaaccagaagaccagactgggcatccagctggacttcgagaagaaccagctgaaggaggaccaggacaaggtgcacatgtgggagcagaccgtgaagaaggacgagaacgagatcgagaagctgaagaaggaggagcagagacacatgaagatcatcgacgagaccatggcccagctgcaggacctgaagaaccagcacctggccaagaagagcgaggtgaacgacaagaaccacgagatggaggagatcagaaagaagctgggcggcgccaacaaggagatgacccacctgcagaaggaggtgaccgccatcgagaccaagctggagcagaagagaagcgacagacacaacctgctgcaggcctgcaagatgcaggacatcaagctgcccctgagcaagggcaccatggacgacatcagccaggaggagggcagcagccagggcgaggacagcgtgagcggcagccagagaatcagcagcatctacgccagagaggccctgatcgagatcgactacggcgacctgtgcgaggacctgaaggacgcccaggccgaggaggagatcaagcaggagatgaacaccctgcagcagaagctgaacgagcagcagagcgtgctgcagagaatcgccgcccccaacatgaaggccatggagaagctggagagcgtgagagacaagttccaggagaccagcgacgagttcgaggccgccagaaagagagccaagaaggccaagcaggccttcgagcagatcaagaaggagagattcgacagattcaacgcctgcttcgagagcgtggccaccaacatcgacgagatctacaaggccctgagcagaaacagcagcgcccaggccttcctgggccccgagaaccccgaggagccctacctggacggcatcaactacaactgcgtggcccccggcaagagattcagacccatggacaacctgagcggcggcgagaagaccgtggccgccctggccctgctgttcgccatccacagctacaagcccgcccccttcttcgtgctggacgagatcgacgccgccctggacaacaccaacatcggcaaggtggccaactacatcaaggagcagagcacctgcaacttccaggccatcgtgatcagcctgaaggaggagttctacaccaaggccgagagcctgatcggcgtgtaccccgagcagggcgactgcgtgatcagcaaggtgctgaccttcgacctgaccaagtaccccgacgccaaccccaaccccaacgagcagtag

SEQ ID NO: 163791 - DNA, 612 bp, Artificial Sequence
  derived and/or modified sequence
atgggcttcctgaagctgatcgagatcgagaacttcaagagctacaagggcagacagatcatcggccccttccagagattcaccgccatcatcggccccaacggcagcggcaagagcaacctgatggacgccatcagcttcgtgctgggcgagaagaccagcaacctgagagtgaagaccctgagagacctgatccacggcgcccccgtgggcaagcccgccgccaacagagccttcgtgagcatggtgtacagcgaggagggcgccgaggacagaaccttcgccagagtgatcgtgggcggcagcagcgagtacaagatcaacaacaaggtggtgcagctgcacgagtacagcgaggagctggagaagctgggcatcctgatcaaggccagaaacttcctggtgttccagggctgctgcggcatctactgccacgagacccccaagagaggccagctgtacctgaagatcagcagaagcggcgagctggcccaggagtacgacaagagaaagaaggagatggtgaaggccgaggaggacacccagttcaactaccacagaaagaagaacatcgccgccgagagaaaggaggccaagcaggagaaggagtag

SEQ ID NO: 163792 - DNA, 3702 bp, Artificial Sequence
  derived and/or modified sequence
atgggatttctcaaactgattgaaattgagaacttcaagagctacaaggggcgtcagatcatcggacccttccagcgctttactgccattatcggaccaaacggatcaggaaaaagcaacctgatggatgctattagctttgtgctcggtgagaagacttctaaccttcgggtaaagacactaagagatcttatacacggtgcccctgtggggaaacctgccgccaaccgggcatttgtgagtatggtctacagcgaagaaggcgccgaggacaggacattcgcacgcgtaatcgtggggggctcctcagagtacaagatcaataacaaagtcgtgcaactgcacgaatattcagaagagctcgaaaagctgggcatactgataaaggcacggaattttcttgtgttccagggcgccgttgaaagcattgccatgaaaaatccaaaggagaggactgcactttttgaagaaatatcacgatccggggaattggcacaagagtatgataagcgcaagaaggaaatggtgaaagctgaggaggatacccaattcaattaccacagaaagaaaaatatcgctgccgagaggaaagaggccaaacaggaaaaggaggaggccgatcgttatcagcgcctaaaggacgaagtcgtccgagcgcaggtccaactgcagctcttcaagctctatcacaacgaagtagaaattgaaaagctgaacaaggagctggcatctaagaacaaagaaatcgaaaaggataaaaagcggatggataaggtggaggatgaactcaaggagaagaagaaggaactaggcaaaatgatgagagaacagcagcagatcgaaaaagaaattaaggagaaggatagcgaactcaatcagaaacgaccacagtacataaaggccaaagagaacacgtctcataaaattaaaaagctcgaggctgccaagaagtcactccagaacgctcagaaacattacaagaagcggaagggggacatggacgagctagaaaaggaaatgctaagtgtggagaaggcacgacaagagttcgaggaacgaatggaggaagagtctcagtctcaggggcgtgatctgacgttggaggaaaaccaggttaaaaagtatcaccggttgaaggaggaagctagtaagcgcgctgccacactcgctcaggaactggagaagttcaaccgcgaccagaaggccgatcaggatcgcttggatctggaagagcgcaagaaggtcgagacagaagccaagatcaaacagaaattgcgggaaattgaggagaaccagaaacgcatcgagaaacttgaagagtacatcactacatccaagcagagtttggaggaacaaaagaagttagaaggggaattgacagaggaagtagagatggctaagagacgcattgatgagatcaataaagaacttaatcaggtcatggaacagcttggcgacgctcgtattgatcgccaggagtcctctcggcagcagcggaaggccgaaattatggagtctattaaacgactctatcctgggtcagtgtacgggaggttaattgacctctgtcagcctacacagaagaaataccaaatcgcagtcacgaaagttctgggtaagaacatggatgccatcatagtggattccgaaaaaacaggaagagattgtatccaatacatcaaagaacagcgcggagagcccgagacctttttgcctcttgattacttagaagtgaagcccaccgatgagaaactccgggaattaaagggggccaaactagtgattgacgtgattcggtacgaacctccacacattaaaaaggccttgcaatacgcctgcggaaacgcactcgtttgtgataacgtggaggacgcgaggaggatcgccttcggggggcaccagcggcacaagactgtagctttggacggtaccctattccagaagtcaggggtcatcagcggcggcgcctctgacctgaaagctaaggctcggcggtgggatgaaaaggcggtggacaaactgaaagaaaaaaaggaacgtctaactgaggagctcaaagaacagatgaaagccaagcggaaagaagccgaattgcggcaagtgcagtctcaggcacatggactgcagatgcggcttaagtatagccaatcagatctggaacaaactaagacgagacacctcgctttgaaccttcaggagaaatctaagctagaaagcgagctggccaattttggcccacgtatcaacgacatcaagaggattatccaatcccgcgagcgggaaatgaaagatttgaaagagaaaatgaatcaggtggaggacgaagtattcgaggagttctgtagagaaattggtgtcaggaatatccgtgaattcgaagaagagaaggtgaagcgtcagaatgagatcgccaaaaagcgcttagagtttgaaaatcagaagactcgcctggggatccagctcgatttcgagaagaaccagctgaaagaagaccaggataaagtccacatgtgggagcagacggtcaagaaggatgagaatgagattgaaaagctaaaaaaggaagagcagcggcacatgaaaattatagatgaaaccatggcccagttacaggacttgaaaaatcagcacctggcaaaaaagagtgaagtgaacgacaagaatcacgaaatggaggagataaggaagaagctgggaggagctaataaagagatgactcacctgcaaaaggaggtcacagcaattgagaccaagctcgagcagaaacggtctgaccgacataatctgctccaggcttgtaagatgcaagatataaaacttcctctgagcaaaggtacgatggatgacatcagtcaggaagaggggtcgagccagggcgaggacagcgtgagtggatcacagagaatttcgtcgatctatgccagagaagctctgattgagatcgattatggagacttgtgtgaggatctgaaggacgcccaggcagaggaagagattaaacaagagatgaataccctccagcagaagcttaatgaacaacagtccgtgcttcagaggattgctgcacccaacatgaaggccatggaaaagctggagtctgtgagagacaagttccaggagacatcagacgaattcgaagccgctcggaaaagagccaagaaagctaagcaggcctttgaacagattaaaaaggaacggtttgaccgcttcaacgcttgcttcgagtccgtagctacgaatattgacgagatctataaggccctgagtcggaatagctctgcacaggcctttctgggtcccgagaatccggaagagccatatctcgacgggatcaattataactgcgttgcgccgggtaagcgcttcagacccatggataatctatctggcggcgagaagaccgtcgctgcactcgccttgctgtttgccatacattcttacaagcccgcgccattttttgtgctcgacgaaattgacgcagcactcgataataccaatatcggtaaagtcgctaattacataaaggaacagtctacttgcaatttccaggccatcgttatcagtctgaaagaagagttctatactaaagcggagtctctgatcggggtgtaccctgagcagggcgactgtgttatttccaaggtgctgacatttgacttgacgaagtacccggacgctaaccccaatcccaatgaacaatag

SEQ ID NO: 163793 - DNA, 612 bp, Artificial Sequence
  derived and/or modified sequence
atgggattcttaaaacttatcgaaattgaaaactttaagagttataaaggccgccagatcatcggacccttccagaggttcaccgcaattatcggtccgaatggctctggaaaaagcaatcttatggatgccatatcctttgtcttaggagagaagacctccaacctaagggtaaaaacactgcgcgatttgatacacggtgctccagtcggcaaacccgccgcgaaccgtgctttcgtgtcaatggtctacagcgaagagggtgcagaggaccgaacctttgctagagtgatagttggagggagttcagaatataaaatcaacaataaggtggtgcagctccacgagtactccgaagagttagaaaaattgggaattcttataaaagcgaggaatttcctcgtcttccaaggctgctgcggcatttattgccatgagacgccaaaacgtgggcaactttacttaaagatctcgagatcgggcgagctggcccaggagtacgacaaacggaaaaaagagatggtcaaggctgaggaggatacgcaatttaactatcacagaaagaaaaacattgccgcagagcggaaagaggccaaacaggagaaggagtag

SEQ ID NO: 163794 - DNA, 3702 bp, Artificial Sequence
  derived and/or modified sequence
atgggcttcctgaagctgattgaaattgagaacttcaagagctacaagggccggcagatcatcggccccttccagcgcttcaccgccatcatcggccccaacggcagcggcaagagcaacctgatggatgccatcagctttgtgctgggggagaagaccagcaacctgcgggtgaagaccctgcgggacctgatccacggggcccctgtgggcaagccagctgccaacagagcctttgtgtccatggtgtacagcgaggagggcgctgaggacaggacctttgcccgggtcatcgtgggcggcagcagcgagtacaagatcaacaacaaggtggtgcagctgcacgagtacagcgaggagctggagaagctgggcatcctgatcaaggccaggaacttcctggtgttccagggcgctgtggagagcatcgccatgaagaaccccaaggagaggacagccctgtttgaggagatcagccgctctggagagctggcccaggagtatgacaagaggaagaaggagatggtgaaggccgaggaggacacccagttcaactaccacaggaagaagaacattgctgctgagaggaaggaggccaagcaggagaaggaggaggccgaccgctaccagaggctgaaggatgaggtggtgcgggcccaggtgcagctgcagctgttcaagctgtaccacaatgaggtggagattgagaagctgaacaaggagctggccagcaagaacaaggagattgagaaggacaagaagaggatggacaaggtggaggatgagctgaaggagaagaagaaggagctgggcaagatgatgagggagcagcagcagatcgagaaggagatcaaggagaaggacagcgagctgaaccagaagaggccccagtacatcaaggccaaggagaacaccagccacaagatcaagaagctggaggccgccaagaagagcctgcagaatgcccagaagcactacaagaagaggaagggggacatggatgagctggagaaggagatgctgtctgtggagaaggcccggcaggagtttgaggagaggatggaggaggagagccagagccagggccgggacctgaccctggaggagaaccaggtgaagaagtaccaccggctgaaggaggaggccagcaagagagctgccaccctggcccaggagctggagaagttcaacagagaccagaaggctgaccaggaccggctggacctggaggagaggaagaaggtggagacagaggccaagatcaagcagaagctgcgggagattgaggagaaccagaagagaattgagaagctggaggagtacatcaccaccagcaagcagagcctggaggagcagaagaagctggagggggagctgacagaggaggtggagatggccaagagaagaattgatgagatcaacaaggagctgaaccaggtgatggagcagctgggagatgccagaattgaccggcaggagagcagccggcagcagaggaaggccgagatcatggagagcatcaagaggctgtacccaggctctgtgtatggccgcctgattgacctgtgccagcccacccagaagaagtaccagattgctgtgaccaaggtgctgggcaagaacatggatgccatcatcgtggacagcgagaagacaggccgggactgcatccagtacatcaaggagcagagaggagagcctgagaccttcctgcccctggactacctggaggtgaagcccacagatgagaagctgcgggagctgaagggggccaagctggtgattgatgtgatccgctatgagcccccccacatcaagaaggccctgcagtatgcctgtggaaatgccctggtgtgtgacaacgtggaggatgcccggcgcatcgccttcggcggccaccagaggcacaagacagtggccctggatggcaccctcttccagaagtctggagtcatctctggaggagccagtgacctgaaggccaaggcccggcgctgggatgagaaggctgtggacaagctgaaggagaagaaggagcggctgacagaggagctgaaggagcagatgaaggccaagaggaaggaggccgagctgcggcaggtgcagagccaggcccacggcctgcagatgaggctgaagtacagccagagcgacctggagcagaccaagaccaggcacctggccctgaacctgcaggagaagagcaagctggagagcgagctggccaactttggcccccgcatcaatgacatcaagaggatcatccagagccgggagcgggagatgaaggacctgaaggagaagatgaaccaggtggaggatgaggtgtttgaggagttctgccgggagattggagtgaggaacatccgggagtttgaggaggagaaggtgaagaggcagaatgaaattgccaagaagaggctggagtttgagaaccagaagacccggctgggcatccagctggactttgagaagaaccagctgaaggaggaccaggacaaggtgcacatgtgggagcagacagtgaagaaggatgaaaatgaaattgagaagctgaagaaggaggagcagaggcacatgaagatcattgatgagaccatggcccagctgcaggacctgaagaaccagcacctggccaagaagtctgaggtgaatgacaagaaccacgagatggaggagatcaggaagaagctgggcggggccaacaaggagatgacccacctgcagaaggaggtgacagccatcgagaccaagctggagcagaagagaagtgacagacacaacctgctgcaggcctgcaagatgcaggacatcaagctgcccctgagcaagggcaccatggatgacatcagccaggaggagggcagcagccagggcgaggacagcgtgtctggcagccagaggatcagcagcatctatgcccgggaggccctgattgaaattgattatggagacctgtgtgaggacctgaaggatgcccaggccgaggaggagatcaagcaggagatgaacaccctgcagcagaagctgaatgagcagcagagcgtgctgcagagaattgctgcccccaacatgaaggccatggagaagctggagagcgtgcgggacaagttccaggagaccagtgatgaatttgaagctgccaggaagagggccaagaaggccaagcaggcctttgagcagatcaagaaggagagatttgaccgcttcaatgcctgctttgagagcgtggccaccaacattgatgagatctacaaggccctgagcaggaacagcagcgcccaggccttcctgggcccagaaaatcctgaggagccctacctggatggcatcaactacaactgtgtggcccctgggaagcgcttccggcccatggacaacctgtctggaggagagaagacagtggccgccctggccctgctgtttgccatccacagctacaagccagcccccttctttgtgctggatgaaattgatgctgccctggacaacaccaacatcggcaaggtggccaactacatcaaggagcagagcacctgcaacttccaggccatcgtcatcagcctgaaggaggagttctacaccaaggccgagagcctgattggagtgtacccagagcagggcgactgtgtgatcagcaaggtgctgacctttgacctgaccaagtacccagatgccaaccccaaccccaatgagcagtag

SEQ ID NO: 163795 - DNA, 612 bp, Artificial Sequence
  derived and/or modified sequence
atgggcttcctgaagctgattgaaattgagaacttcaagagctacaagggccggcagatcatcggccccttccagcgcttcaccgccatcatcggccccaacggcagcggcaagagcaacctgatggatgccatcagctttgtgctgggggagaagaccagcaacctgcgggtgaagaccctgcgggacctgatccacggggcccctgtgggcaagccagctgccaacagagcctttgtgtccatggtgtacagcgaggagggcgctgaggacaggacctttgcccgggtcatcgtgggcggcagcagcgagtacaagatcaacaacaaggtggtgcagctgcacgagtacagcgaggagctggagaagctgggcatcctgatcaaggccaggaacttcctggtgttccagggctgctgcggcatctactgccacgagacccccaagaggggccagctgtacctgaagatcagccgcagcggggagctggcccaggagtatgacaagaggaagaaggagatggtgaaggccgaggaggacacccagttcaactaccacaggaagaagaacattgctgctgagaggaaggaggccaagcaggagaaggagtag

SEQ ID NO: 163796 - DNA, 3702 bp, Artificial Sequence
  derived and/or modified sequence
atgggcttcctgaagctgatcgagatcgagaacttcaagagctacaaagggaggcagataatcggccctttccagcggttcaccgccattatcggccccaatggttcagggaagagtaatctcatggacgccatctcttttgttcttggggagaagacatccaacttaagagtcaaaactcttcgtgacctgattcatggtgctcccgttgggaaaccagccgctaacagagcctttgtcagcatggtgtactccgaggaaggggctgaggatagaaccttcgcaagagtgatagtagggggatcatctgagtacaaaatcaataataaagtcgtgcaattgcatgaatacagtgaggagttggagaagctcggcatccttattaaggcaaggaacttcctggtattccagggagcggtggagagcatcgctatgaagaaccctaaggagagaacagccttgttcgaggagatcagccggtctggcgaattggcccaggagtacgataaacggaagaaggaaatggtgaaagccgaggaggatactcagttcaattaccatcgaaagaagaacatcgcggccgaaagaaaggaagccaaacaggagaaggaggaagcggaccggtaccagcgattaaaggatgaggttgtacgcgctcaagttcagctccagctgttcaagctctatcacaacgaggtcgagatagagaagctcaacaaagagctagcctcgaagaataaggagatagaaaaggacaagaaacgaatggataaagtcgaagacgagctgaaagagaagaaaaaggaattaggaaagatgatgagagagcaacagcaaatcgaaaaggagattaaagaaaaggactccgaactgaaccaaaagagacctcaatatatcaaagcaaaggaaaatacatctcacaaaattaagaagctggaggcagcgaaaaagagcctgcaaaatgcacaaaagcactacaaaaaacgcaagggggatatggatgaactggaaaaagaaatgctcagtgtcgagaaagcccgccaggagtttgaggagcggatggaggaagaaagccaaagccaggggcgggatttaactcttgaggaaaatcaggtcaaaaaataccaccgcctaaaggaagaagcatctaagcgcgccgcaacactagctcaggaacttgaaaaattcaaccgggaccagaaagccgaccaggatcgcttagatttggaggagcggaaaaaggtggaaaccgaggcaaagattaaacagaagctaagagaaattgaagaaaatcagaaaaggattgaaaagctggaggaatatataacgacttccaaacaatctctggaggaacagaaaaaactcgagggagagctgaccgaagaggtggaaatggcaaaaaggcgaatcgatgagatcaataaggaacttaatcaagtgatggaacagctgggagacgctcgaatagatagacaggagagtagccgccaacaaagaaaggccgagattatggaaagcatcaagagattgtaccctggcagtgtgtatggtagattgattgacctgtgccaacccactcagaaaaaataccaaatcgctgttacaaaagttttgggcaaaaacatggacgccatcatagtcgactcagagaagacaggaagagattgtatacagtacataaaggagcagaggggagaaccagaaacatttctcccactggattacctggaggtcaagcctactgatgaaaagcttagagaactgaagggggcaaaactggtcatcgatgtgatcaggtatgagccaccccatattaagaaggccctgcagtacgcctgcggaaatgcactggtctgtgataatgtggaggacgcgcgcagaattgctttcgggggtcaccagcgtcacaaaacagtggcgctggacggcaccttgttccaaaaatctggggtcattagcgggggcgcctctgacctgaaagctaaggcgaggagatgggacgagaaggcggtcgataagctgaaggagaaaaaagagaggctgaccgaggagctgaaggagcagatgaaggctaagcgaaaagaagcggagttacggcaggtacagtcacaggcccacggattgcagatgagactcaagtactcacagagcgatctagagcaaaccaaaacgagacacctggctctaaacctgcaggaaaagagtaaactggaatccgagttggcaaacttcggcccaaggattaatgatattaaacgaattattcagtcaagagagcgggaaatgaaagatttgaaggaaaagatgaaccaggtcgaggacgaagtatttgaggaattttgtagggagatcggcgtccgcaatatcagagagtttgaggaagaaaaggtcaagcggcagaacgagattgcgaaaaagagattggaattcgagaaccaaaagactcgcctaggaatccagctggacttcgagaagaaccaactgaaagaggatcaggacaaggtccacatgtgggagcaaacggtcaaaaaggacgaaaacgagattgagaaactgaagaaggaggaacagcggcatatgaagattatcgacgagactatggcgcaactgcaagacctgaagaaccaacatttggcgaaaaagtcagaagtaaacgacaagaatcacgagatggaagagatcaggaagaagcttggaggagccaacaaagaaatgacccacctccagaaggaagtgaccgccatagaaactaaactcgaacagaagcgctcagatcggcacaatctcctacaggcctgtaagatgcaggatatcaaactgccactgagtaagggcaccatggatgatatcagccaagaagagggttcttctcagggtgaggacagcgtctctggtagccaacggatatcctcaatctacgccagagaggctcttattgaaatcgactatggtgatttatgtgaggacctaaaggacgcacaggcggaggaggagataaaacaggagatgaacactcttcaacagaaattaaatgaacaacagtccgtgctgcagagaatcgcggctccaaatatgaaagcgatggagaagctggaatcagtccgggataaatttcaggaaaccagcgatgagtttgaggcggcccgaaagagagctaagaaggccaagcaggcctttgaacagataaagaaggagagattcgacaggttcaatgcgtgtttcgagagtgtggctactaatatcgacgagatctataaggctctctccagaaatagcagcgcccaggcttttctaggtcccgaaaaccccgaggagccatatttggatggcattaactataattgtgtggcgcccggcaaaaggtttcggccaatggacaatctctctggcggcgaaaagacagtcgctgcccttgcactgcttttcgctatccattcttacaaacccgctcccttttttgttcttgacgagattgacgcagccctggacaacaccaacatcggcaaggtggccaattacataaaggagcaatctacttgcaattttcaggcaatagtgattagtctcaaggaagagttctacacaaaagccgaatcgcttattggcgtttatcccgaacaaggagattgtgtgattagtaaagtgctgacatttgatctgacaaaatatcccgacgctaatcctaatccaaatgaacagtag

SEQ ID NO: 163797 - DNA, 612 bp, Artificial Sequence
  derived and/or modified sequence
atgggcttcctgaagctgatcgagatcgagaacttcaagagctacaagggacgtcagattattggcccgttccagcgattcacggctatcattggccctaatggcagtggtaagagcaacctgatggacgcaatatccttcgtcttaggcgaaaagacaagcaacctgcgagtgaaaaccctgagagacctcatccatggcgcacctgtaggaaagcccgccgcaaacagggccttcgtatctatggtctactccgaggaaggagcagaggatcggactttcgcgcgggttatcgtgggaggctcttcagagtataaaatcaacaataaggtagtacagctgcacgaatattctgaggaactggagaagctgggcatcctaatcaaagctcgaaatttcttggtctttcaaggttgctgcggcatatactgccacgagacccccaaaaggggacaactgtatctgaagatctcaaggagcggggaactggcccaggagtacgataaacggaagaaggagatggtcaaggcggaggaggatactcaattcaattaccacaggaagaaaaacatcgccgctgagcggaaagaggcaaagcaggagaaggaatag

SEQ ID NO: 163798 - DNA, 3702 bp, Artificial Sequence
  derived and/or modified sequence
atgggattcctgaagctgatcgaaattgagaatttcaagtcatacaagggcagacagatcattggacctttccagcgtttcaccgccatcatcgggccaaacggaagtggcaagtcaaacttaatggatgccatatcattcgttctgggagaaaagacctcaaacctgagagtaaaaaccctgcgtgatttgatacatggcgctccggtgggaaagccggctgccaatagggcattcgtctctatggtttactctgaagaaggcgctgaagatcggaccttcgccagggtaattgtggggggttcttctgagtacaagatcaacaataaggtcgtccagctgcacgagtacagcgaagaactggagaagttaggcattcttatcaaggccaggaattttcttgtgttccagggggcagtagaaagtattgccatgaagaacccgaaagagagaaccgctttgttcgaggagatttcccgtagtggggagctggctcaggagtacgacaagagaaaaaaggagatggtcaaagccgaggaagacacgcaattcaactatcaccgcaagaaaaacattgctgccgaacggaaagaggcaaaacaggagaaagaggaagccgaccgttatcaaaggctgaaagacgaagttgtgcgagcacaggtgcagctgcagctatttaagttataccacaacgaagtcgaaatcgagaagctgaacaaggagttggcctctaagaacaaggagatcgaaaaagataagaaaagaatggacaaggttgaggacgaactgaaagagaagaagaaggaactcggcaagatgatgagggagcagcagcaaattgagaaggaaattaaggaaaaagactcagagctaaaccagaaacgccctcagtatatcaaggctaaagaaaacacatcacacaagattaaaaagctggaggcggctaagaagtccttgcagaatgctcagaaacactataagaaacgaaaaggcgatatggatgaactcgaaaaggagatgctgagcgttgagaaagcacgccaagagttcgaggaacgaatggaggaagaatcccagtctcagggacgggacctgaccttggaagagaatcaggtgaaaaagtaccatcggctcaaggaagaagcgagcaagcgtgccgcaacattggcacaggaattggagaaattcaatcgcgatcaaaaagcagaccaagacaggctggatctggaggaacggaaaaaggttgagaccgaagccaagattaaacagaaactgcgggagatcgaagaaaatcaaaaaagaatcgagaagcttgaagagtacatcacaactagcaagcagtctttggaggaacagaaaaagctggaaggcgaacttaccgaggaggttgaaatggctaaaagacgaatagacgagatcaataaggagctgaaccaagtgatggagcagctaggagacgccagaatagatcggcaggaatcatctcgacaacaaaggaaggctgagatcatggagtcaattaagcgcctctaccctgggtctgtgtatggacgcctaatcgacctgtgccagccgacccagaagaagtaccagatagctgttacaaaggtcttggggaaaaacatggacgccattatcgtcgattcagagaaaacagggagagattgcattcagtatattaaagagcagcgtggggagcccgagaccttccttccactggattacctggaagttaagcctactgatgagaaacttcgggagctgaaaggcgctaaactggtgatcgacgtcatccgctatgagccccctcacatcaagaaggctctgcagtacgcatgcggcaatgcgcttgtttgcgataacgtggaagatgctagaagaattgcttttggaggccaccagaggcacaagaccgtggcactggacgggaccctgttccagaagtcgggtgtcatttccggtggggcttccgatcttaaagctaaggctagacggtgggacgaaaaggccgtcgataaactcaaggaaaagaaggaaaggttaacagaagaacttaaggaacagatgaaggcgaaaaggaaggaagctgaactgaggcaggtgcagtcacaagcccacggtctccagatgcgtctcaaatattcccagagcgatttagagcaaactaaaacaaggcacttagcacttaacctgcaagagaaaagcaagttagagagcgagcttgcaaacttcggacccaggattaacgatatcaagcgcatcatccagtcaagggagcgggagatgaaggatttgaaggagaagatgaaccaggtggaagatgaagtctttgaagagttttgtagagagattggtgtgaggaacatcagggagtttgaagaggagaaggtcaaacgacaaaatgaaatagctaaaaaaaggttggagttcgagaaccagaagacacgactgggtatccaattggactttgagaagaatcaactgaaagaagatcaggataaagttcatatgtgggaacagactgtgaagaaagacgagaacgaaatcgaaaaactcaagaaggaggagcagcgtcacatgaagataatcgatgaaacgatggcccaactccaggatctgaagaaccagcatcttgctaagaaatctgaagtgaatgacaagaaccatgagatggaggagattcggaagaagctgggcggagccaataaagagatgactcatctgcaaaaagaagtgacggcaatcgaaactaaacttgagcagaaaagaagtgacaggcataaccttctgcaggcgtgtaaaatgcaggatataaaactccctctgagtaaggggacaatggacgacatcagtcaggaagaagggagctcacagggagaggactctgtgtcaggctcccagaggatttcttctatctacgctagggaagccctcatcgaaatcgattatggtgacctgtgtgaggacctaaaagacgcacaggcggaggaggaaatcaaacaggagatgaacacactgcagcagaagctaaatgaacagcaatcagttttacagagaattgctgcacccaatatgaaagcgatggaaaagctggaatccgttagggataagtttcaggagacctccgacgaattcgaggccgcaagaaaacgcgcaaagaaggcaaagcaggccttcgagcagattaagaaggagagattcgatcggtttaacgcatgctttgagagtgtggcgacaaatattgacgagatttacaaagctttaagccgcaattcaagcgcccaagcttttttgggcccagaaaatcctgaagaaccttatctcgatggtatcaattacaattgtgttgcccctggtaaaaggtttcggccaatggacaacctgagcggcggagagaagacagttgcagcgttagcgctccttttcgctattcatagctacaagcctgccccatttttcgtgctggatgagatcgatgcagcacttgacaacaccaatatcggcaaagtggcaaattatattaaagagcagtcaacgtgcaatttccaggctattgtgatatctctgaaagaagaattttacacaaaagccgaaagcctgatcggagtctacccagagcagggggattgtgtgatctcaaaggtcctgacattcgatctcacaaaatatccagatgccaatccaaacccaaacgaacagtag

SEQ ID NO: 163799 - DNA, 612 bp, Artificial Sequence
  derived and/or modified sequence
atgggattcctaaagctcatcgaaatcgagaatttcaagtcttacaaaggcaggcagatcatcgggccttttcaaagatttactgcaattatcggcccaaatgggagcgggaaaagtaacttgatggacgcgatcagttttgtcctaggcgaaaaaacgtccaacctccgggtcaagaccctgagagacttgattcacggggctcctgtcgggaagcccgctgcaaacagagccttcgtatctatggtgtattctgaggagggggcagaggacaggacattcgcacgggtaatcgtcgggggaagttcagagtacaagatcaataataaagtggtgcagctgcatgagtactctgaggagcttgaaaagctaggcattctgatcaaggctagaaacttcctggtcttccagggctgttgcggcatatattgtcatgagacccccaaacgcggacaactataccttaaaatctcgaggagtggagaacttgctcaggagtacgacaaacgaaaaaaagaaatggtaaaggctgaggaagatacccagtttaattaccacaggaagaagaatatcgcggcagagcgtaaagaggcaaagcaagagaaggagtag

SEQ ID NO: 163800 - DNA, 9784 bp, Artificial Sequence
  derived and/or modified sequence
aggcctggacgtattctcgcgacatttgccggtcgcccggcttgcactgcggcgtttcccgcgcgggctacctcagttctcgggcgtacggcgcggcctgtcctactgccgccggcgccgcggccgtcatggggttcctgaaactgattgagattgagaactttaagtcgtacaagggtcgacagattatcggaccatttcagaggttcaccgccatcattggacccaatggctctggtaagtcaaatctcatggatgccatcagctttgtgctaggtgaaaaaaccagcaacctgcgggtaaagaccctgcgggacctgatccatggagctcctgtgggcaagccagctgccaaccgggcctttgtcagcatggtctactctgaggagggtgctgaggaccgtacctttgcccgtgtcattgtaggaggttcttctgagtacaagatcaacaacaaagtggtccaactacatgagtacagtgaggaattagagaagttgggcattctcatcaaagctcgtaacttcctcgttttccagggtgctgtggaatctattgccatgaagaaccccaaagagaggacagctctatttgaagagattagtcgttctggggagctggcgcaggagtatgacaagcgaaagaaggaaatggtgaaggctgaagaggacacacagtttaattaccatcgcaagaaaaatattgcggctgaacgcaaggaagcaaagcaggagaaagaagaggctgaccggtaccagcgcctgaaggatgaggtagtacgggctcaggtacagctgcagctctttaagctttaccataatgaagtggaaattgagaagctcaacaaggaactggcctcaaagaacaaggagatcgagaaggacaagaagcgtatggacaaggtggaggatgaactgaaggagaagaagaaggagctgggcaaaatgatgcgggagcagcagcagattgagaaggagatcaaggagaaggactcagaattgaaccagaagcggcctcagtacatcaaagccaaggagaacacctcccacaaaatcaagaagctggaagcagccaagaagtctctgcagaatgctcagaagcactacaagaagcgtaaaggtgacatggatgagctggagaaggagatgctgtcagtggagaaggctcggcaggagtttgaagaacggatggaagaagagagtcagagtcagggcagagatttgacgttggaggagaatcaggtgaagaaataccaccggttgaaagaagaagccagcaagagagcagctaccctggcccaggagctggagaaattcaatcgagaccagaaagctgaccaggaccgtctggatctggaagaacggaagaaagtagagacagaggccaagatcaagcaaaagctgcgggaaattgaagagaatcagaagcggattgagaaactggaggaatacatcaccactagcaagcagtccctagaagagcagaagaagctagagggggagctgacagaggaggtggagatggccaagcggcgtattgatgaaatcaataaggagctgaaccaggtgatggagcagctaggggatgcccgcatcgaccgccaggagagcagccgccagcagcgaaaggcagagataatggaaagcatcaagcgcctttaccctggctctgtgtacggccgcctcattgacctatgccagcccacacaaaagaagtatcagattgctgtaaccaaggttttgggcaagaacatggatgccattattgtggactcggagaagacaggccgggactgtattcagtatatcaaggagcagcgtggggagcctgagaccttcttgcctcttgactacctggaggtgaagcctacagatgagaaactccgggagctgaagggggccaagctagtgattgatgtgattcgctatgagccacctcatatcaaaaaggccctgcagtatgcttgtggcaatgcccttgtctgtgacaacgtggaagatgcccgccgcattgcctttggaggccaccagcgccacaagacagtggcactggatggaaccctattccagaagtcaggagtgatctctggtggggccagtgacctgaaggccaaggcacggcgctgggatgagaaagcagtagacaagttgaaagagaagaaggagcgcttgacagaggagctgaaagagcagatgaaggcaaaacggaaagaggcagagctgcgtcaggtgcagtctcaggcccatggactgcagatgcggctcaagtactcccagagtgacctagaacagaccaagacacgacatctagccctgaatctgcaggaaaaatccaagctggagagtgagctagccaactttgggcctcgcattaatgatatcaagaggatcattcagagccgagagagggaaatgaaagacttgaaggagaagatgaaccaggtagaggatgaggtgtttgaagagttttgtcgggagattggtgtgcgcaacatccgggagtttgaggaagaaaaggtgaaacggcagaatgaaatcgccaagaagcgtttggagtttgagaatcagaagactcgcttgggcattcagttggattttgaaaagaaccaactgaaggaggaccaagataaagtacacatgtgggagcagacagtgaaaaaagatgaaaatgagatagaaaagctcaaaaaggaggaacaaagacacatgaagatcatagatgagaccatggctcagctacaagacctgaagaatcagcatctggccaagaagtcggaagtgaatgacaagaatcatgagatggaggagattcgtaagaaactcgggggcgccaacaaggaaatgacccatttacagaaggaggtgacagccattgagaccaagcttgaacagaagcgcagtgaccgtcacaacttgctacaggcctgtaagatgcaggacattaagttgccactgtcaaaaggcaccatggatgatattagtcaggaagagggtagctcccagggggaggactcagtgagtggttcacagagaatttccagtatctatgcacgagaggccctcattgagattgactacggtgatctgtgtgaggatctgaaggatgcccaggctgaggaagagatcaagcaagagatgaacacactgcagcagaagctgaatgagcagcagagtgtgcttcagcgtattgccgcccccaacatgaaggccatggaaaagctggaaagtgtccgagacaagttccaggagacctcagatgagtttgaagcagcccgaaagcgagcaaagaaggccaagcaggcattcgaacagatcaagaaggagcgctttgaccgcttcaatgcttgttttgaatctgtggctaccaacattgatgagatctataaggccctgtcccgcaatagcagtgcccaggcattcctgggccctgagaaccctgaagagccctacttggatggcatcaactacaactgtgtggctcctgggaaacgcttccggcctatggacaacttgtcaggcggggagaagacagtggcagctctggccctgctctttgccatccacagctacaagccagcccccttcttcgtcctggatgagattgatgctgccttggataacaccaacattggcaaggtggcaaattacatcaaggagcagtcgacttgcaacttccaggccatcgtcatctctctcaaggaggagttctacaccaaggccgagagcctcattggagtctatcctgagcaaggggactgtgtgatcagcaaagtcctgaccttcgacctcaccaagtacccagatgccaaccccaaccccaatgagcagtagcagtatttttgccctcccgccctgtctggatccctaagctgtccctctcccaatctctggatatttgactcccaaccttccccctacctcctggccctttttggtgtagtcatgggatttaggcactgctaatcaagcatgaagaggaacagaggtgatgttaggtctggagcaaaaattcctgaacgacagggagtattctggcctctgaaaggaggtgctgagctgaacagggccatctgttcatcacacacacccccttcctccccctcatcacccataatcgtgggccccttgggcctcttgcccactgtgtgtgtgggtatgtatgtgtgtatgtatgtatccgcatgtgtgcatgtgagtatgtttgcaaaataataaaggatattggagacctgttttagaaggagcctaggctgaatttgattccaagagagcttaggatgacagcacccctgagctgggcaaaggtactcaggacctcataggagtcttaggcagttacctgaaactgccttcattcactcatttgtgtattcattcatttatgtattcatcagacacataccgaacaccctctatttgtcaggctctgtgcttggaatacagagttgaatcagacatgatctctaccctcctagtaaggagatacagtgggttcatgaatgactatagttagctgaatgtcatatgtactttgaatttgagaagtgggtgatcccctctaggcttcctggaggtcacatttaagctagaccttgacaaattggtaggatttggtcaggcactaggagtggagcatgagctctggggacagacagttatgggttctggtcccactttttatcacttactagttgtttgaccttgggcaagtcatttgaccttctgtgcctcagtttcctcatctgtaaaatggggctaacaatattacctacctcataggatttaatgatgtcaagctcctcactggaggccttatcccttcgtggagcccactaggtgccgacccctcagaatataaccctcatgcctggacccctgagagcttctgatcccagctattagggacagaagaagcctccaaatctggaaggtgctgaatgccctgctgactgggaaagtttcagggcactgatggggtctacctggtaagcggagggcctgaggaaacctgtagcttcaatcatgtctggtaaccgggtgcctgagccccaatctgggttgtgaggaaataggggagaggtatcctgggccacatcccagcctaacacctgtgaggttcattttaggaactaacctcattagctataaggatcatgcagaggcagcaaagccgggtgcgatgagctcagcctttactcattcacatacaccatcacactttaattccaatctgtatattgctttttaaaagttaagtccattctaattacccaaatatgcatgaattcattctccttttgagaagttagattgttaaagatagtctcattcagctaccaaccactccttgatccttcccttcttagtggctgttgtttgttgtacttccgtttagactttgttttaatgcttgtacgtacatatgtgaactcattggaaatattgtgtgtttaatgcaaatgatatattgaattgtttagcaatttgttttctttgcttaacgatgtttttgagatctgtgcatgttacttaatgtagctcaatccatcttctgtaattgctgtatagattgtcatcatatgattaccacattttacttacgcatttcttttgtgatggacattaagactgtttttaggttttgctattacaaaatactacacaggagcatcactatgcctgtgtgaaagtatatgtatgaaagtttacctagggttgattcctagaagtggaattgcaaagtcataggatatttatatattggtttttaataatacttccaaattgccctcctgtactatttactcagtatttttcttgaggttgatctgaggtctaacattgttatcctatatcattttcatcccaagtagtgatatctgtgaaatcacaggtttgatgtgtgctaattatgtattcttctaatacatattaaaagacataactatcaaaacaaaataaatttgtctgttttcaaccaaagaagtcacgtaccactggtggtactgtgtgccataatttggcaaatgctggcctttatggacgagcacaattcgggggtcagacctggttcaaattctagctgtagaaacttgtgcaagttacttcacctctgagcctaagtttccacatctgtaaaaggagataataaacacctaccttgcagtagtgaagcaaagagaaaattaaatatatatgaagcaatttggctggcatctagatcattcacagccctttaaaggtcacctttgctgttctccccactttacagataaggaaactgaggcccaaaaaggtttgaacccaggtcttccaagtcattcaagtgctttctccactgtacaggtggttatcaaccttggctgcgcatcagaatcgtttgtaaagctttttctttttcctttttaaaaagtaaagcaatatatacacaggtaaaaaaataaaatagtacagaagggcttataatgagaagcagcagttccctgcttgcacccccacatccaaaggatgtggagctctttaaaaataaattgctctggtcccacctctggaaatctgattcagccagcatggataataacccagataactaacccctacctcacaggataaaaaggattacatgagatgccttaggctaaggccctggcacacaggaacacatgtgctacaaaggagctttggggacttaagtcctgaggatccaggaggtgaggtgacttgtccaagattccactggtttagtggcagagcctagacttccactcggatctatttagtgcttgccccctgctctctcctgtcgtgccccaccacctcctggcatcacagggcaaccgttgtcaaggctatgctcacgggaggctgggcaccacagtgtttccaagagcaagctggatccgagtagattccctagggcttgttggaggaactagtttgactcccttatactgtggacgcagtagccttgctgtagggagttgaagagtactccacaacagtatcttaagtttaactgggcacttccctctggaaatcacagtgttgtgcaccaggaacacaaagatgagtcaaatctttatcctgcctttgaggagctcactgtttagttggggaaaccatttgtaaaacagccattaaccatacagtgtgatcaacactgacaggagcacaggaaaaacatctagcttatgtgaagattcagagaaggcatcctgtagtctaggtggtgatacctgaactgagtcttgagggacgggtaggaattagccagttgaggaagtagaaggaatttccagatattggaaacagtatgcatgaagacatgaaggcaagaaacagcaaaacaaatactgaagcatgaagattcctggggtggggggaaagcagcaagaaaaggtagagaggaaccagattggaagagggtcgtaaatgcatggctacagaattcagatttgttttgtaggacagtgtggttcccaaactggctgtataccacaaacaggtacggcattctgggccccggcccctaaaacattcattaagtctggggtgaagatttggaatcttgaatgcttataaaggttaccacatgactagggtacagccagatttggaaaccatagcttgaaggcagtgagggagccatgaaatggtttttaatagggggactccagatcagatgtgaacttaacctgtttctggctggctagccaaccagcatggaaaacagattaggttagatgttcatgctgtatgtgcccgtgcctgtagcttccctgttaatcagcttcttacactactatatttgcttattttgtctctgaataagctttaggcaccacaagggtgggcctggggatattttgcttaccagtatagcccctgcaaaaaagcacagtgcctgacacaaaacaggcacccagtaaagtttttgaatgaatgaatgcatgagtgaatccatttgtgagagagcgaatggagatgacaagattagctaggagactggaaaaagaccaggaggcctgcactagggcaaaggccagtaggaatagattggaggtgttaaggtgtgaactgttaaggtaagatgataacttaatgactgattattggatgtggagggtgactgagaggatagaatgagtacccatgaatagccatgattcctaccctgtcccagtcatctctttccttatccatctctgaaacaatctgcttacatcctcctcagcaactggaattcctcaagttagttagacattctgtgtgctgtgtggtctctcactgcccccccactccccacccctccacaagccattgattcattcatccagttcaataaatcttggctaagcacctccagtgtgcagtaaggctcttccaagccaggactctgactccctctttcctacctcaagagatgtttttgagggctttcccaggtaagagtcacatctcttatacaataacttatagtgagatacccagaatgtcagacttgtaagggaagactgcccaaaccccttctgaggtcctcagaggggaattaacttcctaaggtccgactgctaggaagtgttggagccagaaatggaacctaggtttcctttctatgtcatctctggagtcttgatcttgatctatcccattgtagatcaggacaggcagaggtggtcagggagaaggtgggacttaggttgaaccttgaaggtcaatgtattggacaggtcaaacaagatggttgccaattacactgcccccttctggaaacccttagcaaacctgccatgcttgcagtcccttctaaggggtttccttagcataagttgccatgctctgtaccatgtgacctcacaatcctggccacagatagctagatgtggatagtgtctggttcaagggcaaccaatctctaggctggccagtggcctgttagctggactggcataaggacttcaccttacaggggtggcatgtatcaaatggcaaatgtatgaaacaaccagatctttcagggaggcagaatgtgagctattcagaagaagtgaacgttaattagaatttaatgaggcattagtggtggtggatgaggggtggccagaaactaaacagcaaaagcaaagagaaagctgcagaaaccataagtaagcagaggtcatgagacatttgtataatgagatcacggagccacagggtggcagaagccatgaagcagcaaggcaacaatgggctagaagccatgaagcaataggagccacgaggaacagaaaccgtgagacaaaactgactatgagatccacaaagcagcagaaggcttgaatagataagatcatgagacagtagaagcgatgagactgcaagaaccacaaggtagccagaaccatgtggcaacatggcaacaggaatggaagaggcagcaggagctacaatgcagaaaagccatggattaataggaactgaagcgccgggagccatgaagctgcaggacccatgaggcagaaaaagccatgggctagcatcgaggggggcagaaagaagttagtcagtagcagtaggaggagtataaatacagccagaaaggagttgagtcaccaatttgggaagcactagagaagggagcaacagatgcctgcagctgagggggtgacaagataagccaggctctagagctgctttggatcatgaaccattttcaagtttctgttcttccatgaggctgcctgtgtagctgttcttgtcttccttatttccctgtgaatgctttaataaatccccatcactaa

SEQ ID NO: 163801 - DNA, 677 bp, Artificial Sequence
  derived and/or modified sequence
gcgcgggctacctcagttctcgggcgtacggcgcggcctgtcctactgccgccggcgccgcggccgtcatggggttcctgaaactgattgagattgagaactttaagtcgtacaagggtcgacagattatcggaccatttcagaggttcaccgccatcattggacccaatggctctggtaagtcaaatctcatggatgccatcagctttgtgctaggtgaaaaaaccagcaacctgcgggtaaagaccctgcgggacctgatccatggagctcctgtgggcaagccagctgccaaccgggcctttgtcagcatggtctactctgaggagggtgctgaggaccgtacctttgcccgtgtcattgtaggaggttcttctgagtacaagatcaacaacaaagtggtccaactacatgagtacagtgaggaattagagaagttgggcattctcatcaaagctcgtaacttcctcgttttccaggggtgctgtggaatctattgccatgaaaccccaaagagaggacagctctatttgaagattagtcgttctggggagctggcgcaggagtatgacaagcgaaagaaggaaatggtgaaggctgaagaggacacacagtttaattaccatcgcaagaaaaatattgcggctgaacgcaaggaagcaaagcaggagaaagaa

SEQ ID NO: 163802 - protein, 451 aa, Artificial Sequence
  derived and/or modified sequence
MDFDVGRTTHLSSSPCSASNGGESGQVSKRRCLIGESGHDTPWCSPIKVKYGDVYCRAPQGGYYKTALGTRCDIRCQKGYELHGSSLLICQSNKRWSDKVICKQKRCPTLAMPANGGFKCVDGAYFNSRCEYYCSPGYTLKGERTVTCMDNKAWSGRPASCVDMEPPRIKCPSVKERIAEPNKLTVRVSWETPEGRDTADGILTDVILKGLPPGSNFPEGDHKIQYTVYDRAENKGTCKFRVKVRVKRCGKLNAPENGYMKCSSDGDNYGATCEFSCIGGYELQGSPARVCQSNLAWSGTEPTCAAMNVNVGVRTAAALLDQFYEKRRLLIVSTPTARNLLYRLQLGMLQQAQCGLDLRHITVVELVGVFPTLIGRIGAKIMPPALALQLRLLLRIPLYSFSMVLVDKHGMDKERYVSLVMPVALFNLIDTFPLRKEEMVLQAEMSQTCNT

SEQ ID NO: 163803 - protein, 464 aa, Artificial Sequence
  derived and/or modified sequence
MGSPAHRPALLLLLPPLLLLLLLRVPPSRSFPGSGDSPLEDDEVGYSHPRYKDTPWCSPIKVKYGDVYCRAPQGGYYKTALGTRCDIRCQKGYELHGSSLLICQSNKRWSDKVICKQKRCPTLAMPANGGFKCVDGAYFNSRCEYYCSPGYTLKGERTVTCMDNKAWSGRPASCVDMEPPRIKCPSVKERIAEPNKLTVRVSWETPEGRDTADGILTDVILKGLPPGSNFPEGDHKIQYTVYDRAENKGTCKFRVKVRVKRCGKLNAPENGYMKCSSDGDNYGATCEFSCIGGYELQGSPARVCQSNLAWSGTEPTCAAMNVNVGVRTAAALLDQFYEKRRLLIVSTPTARNLLYRLQLGMLQQAQCGLDLRHITVVELVGVFPTLIGRIGAKIMPPALALQLRLLLRIPLYSFSMVLVDKHGMDKERYVSLVMPVALFNLIDTFPLRKEEMVLQAEMSQTCNT

SEQ ID NO: 163804 - DNA, 1395 bp, Artificial Sequence
  derived and/or modified sequence
atgggcagccccgcccacagacccgccctgctgctgctgctgccccccctgctgctgctgctgctgctgagagtgccccccagcagaagcttccccggcagcggcgacagccccctggaggacgacgaggtgggctacagccaccccagatacaaggacaccccctggtgcagccccatcaaggtgaagtacggcgacgtgtactgcagagccccccagggcggctactacaagaccgccctgggcaccagatgcgacatcagatgccagaagggctacgagctgcacggcagcagcctgctgatctgccagagcaacaagagatggagcgacaaggtgatctgcaagcagaagagatgccccaccctggccatgcccgccaacggcggcttcaagtgcgtggacggcgcctacttcaacagcagatgcgagtactactgcagccccggctacaccctgaagggcgagagaaccgtgacctgcatggacaacaaggcctggagcggcagacccgccagctgcgtggacatggagccccccagaatcaagtgccccagcgtgaaggagagaatcgccgagcccaacaagctgaccgtgagagtgagctgggagacccccgagggcagagacaccgccgacggcatcctgaccgacgtgatcctgaagggcctgccccccggcagcaacttccccgagggcgaccacaagatccagtacaccgtgtacgacagagccgagaacaagggcacctgcaagttcagagtgaaggtgagagtgaagagatgcggcaagctgaacgcccccgagaacggctacatgaagtgcagcagcgacggcgacaactacggcgccacctgcgagttcagctgcatcggcggctacgagctgcagggcagccccgccagagtgtgccagagcaacctggcctggagcggcaccgagcccacctgcgccgccatgaacgtgaacgtgggcgtgagaaccgccgccgccctgctggaccagttctacgagaagagaagactgctgatcgtgagcacccccaccgccagaaacctgctgtacagactgcagctgggcatgctgcagcaggcccagtgcggcctggacctgagacacatcaccgtggtggagctggtgggcgtgttccccaccctgatcggcagaatcggcgccaagatcatgccccccgccctggccctgcagctgagactgctgctgagaatccccctgtacagcttcagcatggtgctggtggacaagcacggcatggacaaggagagatacgtgagcctggtgatgcccgtggccctgttcaacctgatcgacaccttccccctgagaaaggaggagatggtgctgcaggccgagatgagccagacctgcaacacctag

SEQ ID NO: 163805 - DNA, 1395 bp, Artificial Sequence
  derived and/or modified sequence
atggggtcacccgcccacagacccgccctgctgcttctgctacctccccttctgttactgcttctgctccgggtgcccccatccaggagctttccaggttcaggagactcccctctagaggatgatgaagtcggctactcacatccgcgatataaagacacaccttggtgtagccccattaaagtgaagtatggcgacgtatactgtcgcgcgccccagggggggtattataagacagcgttggggactaggtgcgacatcaggtgtcagaagggctatgagttgcatggttcttctctcctgatctgtcaatctaataaaaggtggagcgacaaggttatctgtaagcagaagaggtgtccaaccctagccatgcctgcaaacggtgggttcaagtgcgtggatggagcatatttcaatagcagatgtgagtattactgctcacctggatataccctaaaaggcgaaagaacagtcacctgcatggataacaaggcttggtctggtcgcccggcgtcctgcgtggacatggagccaccacgcataaagtgcccatccgttaaggagcgcatcgcagagccgaataagctgacagtgcgcgtttcttgggaaactccagaaggcagggataccgcggacggcattcttaccgacgttatcctgaaaggcctgcctcctgggagcaacttcccagaaggagatcataaaatccaatacaccgtgtatgacagagccgagaataagggcacatgtaagtttcgggtgaaggtgcgagtcaagagatgcggtaaattgaatgcaccggagaatgggtatatgaagtgcagttccgatggggataactacggagccacttgtgaattttcttgcattggtggatatgaactccaagggtccccagccagggtgtgtcagtccaacctggcttggagtgggacagaacccacctgcgccgctatgaacgtgaatgtcggagttcgcaccgccgccgccctgctcgaccagttttacgagaagagacgccttctcattgtaagtacccctacggctcggaacctcctttacagactgcagctggggatgctgcagcaagcccagtgcggtcttgacctgcggcatatcactgtagttgagctcgtgggtgtcttcccgaccctgattggacgaataggtgccaagattatgccccccgccttggcgctccagctgaggctgctcctgcgcatccctctgtattccttctcaatggtcctagtggataagcacggtatggataaagagcgctacgtgagcctggtgatgcccgtagccctgttcaatctcatcgacacctttccactcaggaaggaggaaatggtcttacaggctgaaatgagtcagacctgcaatacctag

SEQ ID NO: 163806 - DNA, 1395 bp, Artificial Sequence
  derived and/or modified sequence
atgggcagccctgcccacaggcctgccctgctgctgctgctgccccccctgctgctgctgctgctgctgcgggtgccccccagccgctccttccctggcagcggggacagccccctggaggatgatgaggtgggctacagccacccccgctacaaggacaccccctggtgcagccccatcaaggtgaagtatggagatgtgtactgccgggccccccagggcggctactacaagacagccctgggcacccgctgtgacatccgctgccagaagggctatgagctgcacggcagcagcctgctgatctgccagagcaacaagcgctggagcgacaaggtgatctgcaagcagaagcgctgccccaccctggccatgcctgccaacggcggcttcaagtgtgtggatggagcctacttcaacagccgctgtgagtactactgcagccctggctacaccctgaagggggagaggacagtgacctgcatggacaacaaggcctggagcggccgcccagccagctgtgtggacatggagcccccacgcatcaagtgccccagcgtgaaggagagaattgctgagcccaacaagctgactgtgcgggtgtcctgggagaccccagagggccgggacacagcagatggcatcctgacagatgtgatcctgaagggcctgcccccaggcagcaacttccctgagggggaccacaagatccagtacacagtgtatgacagagctgagaacaagggcacctgcaagttccgggtgaaggtgcgggtgaagagatgtgggaagctgaatgccccagaaaatggctacatgaagtgcagcagtgatggagacaactacggggccacctgtgagttcagctgcattggaggctatgagctgcagggcagccctgcccgggtgtgccagagcaacctggcctggagcggcacagagcccacctgtgccgccatgaatgtgaatgtgggcgtgaggacagctgctgccctgctggaccagttctatgagaagaggcggctgctgattgtgtccacccccacagccaggaacctgctgtaccgcctgcagctgggcatgctgcagcaggcccagtgtggcctggacctgcggcacatcaccgtggtggagctggtgggcgtcttccccaccctgattggccgcatcggggccaagatcatgcccccagccctggccctgcagctgcggctgctgctgcgcatccccctgtacagcttctccatggtgctggtggacaagcacggcatggacaaggagagatatgtgtccctggtgatgcctgtggccctcttcaacctgattgacaccttccccctgaggaaggaggagatggtgctgcaggccgagatgagccagacctgcaacacctag

SEQ ID NO: 163807 - DNA, 1395 bp, Artificial Sequence
  derived and/or modified sequence
atgggcagccccgcccaccggcccgccctgctgctgctgctgcccccactattgctgctgctcctccttagggtacccccatctagatctttcccagggagtggcgactcgccattggaggacgatgaagtgggatactcccacccgagatacaaggatactccttggtgttctcccattaaggttaaatacggagatgtatattgtcgggccccgcaaggtggctattacaagaccgcgttagggacaagatgcgacatcagatgccagaagggttatgaattgcacgggtcatccttactgatctgccagtccaacaaaagatggtcagataaagtaatctgcaaacagaaacggtgcccaactcttgctatgcccgccaacggggggttcaaatgcgtagacggagcctatttcaactcccggtgtgagtattactgtagccccggttataccttaaaaggcgagaggaccgttacgtgtatggacaataaggcttggtccggaaggccggcctcatgtgtggatatggaacctccccgcatcaaatgcccgagcgtcaaggaacgtatagcagagcccaacaagttgaccgtgcgcgtttcgtgggagacacctgaaggaagagatacagcggacggcatcctgacagacgtgatcctcaaaggcttaccgccaggatccaatttccctgaaggagaccataagatccagtacaccgtgtacgatagggccgaaaacaagggtacatgtaagtttcgggtaaaagtgagggtgaaacggtgcggaaaactcaacgccccagaaaatggctacatgaaatgcagtagcgacggggacaattacggtgcaacctgcgagttttcttgcatcgggggctatgaactgcagggctctcctgcgagggtctgccagtccaacctcgcatggtccgggaccgagcccacatgtgctgccatgaatgtgaacgtgggggttagaacagcggcggcactcttagatcagttttacgagaaacgtcgcctcctgatcgtcagcacgcccaccgcccggaacttgctgtaccggctgcagctgggcatgctgcaacaggcccagtgcggactcgacttgcggcatattacagtcgtcgaacttgtgggtgtgtttcccacgctcatcggacgcatcggtgcaaagattatgccaccagcactcgcacttcaattacggctcctgttacggatccctttgtatagcttctccatggtgctcgtggacaaacacggcatggacaaggagcggtatgtgtcactggttatgccagtcgcactgttcaatttgattgatacctttccacttcggaaggaagaaatggtgctccaagccgagatgtctcagacttgtaacacgtag

SEQ ID NO: 163808 - DNA, 1395 bp, Artificial Sequence
  derived and/or modified sequence
atgggatctccagctcataggcccgcactgctgctgctgttacctcctcttttgctgctactgctccttagagtacccccttccaggagttttcctgggtcaggagactctcccctagaagacgatgaggtgggctactcacacccccgttacaaggacacaccctggtgtagtccgataaaagtcaaatatggcgacgtgtactgtagggctccccagggcggttattacaagactgctctgggaacacgatgcgatatcaggtgtcagaagggatatgagctacacggcagtagccttcttatttgtcaaagtaataagagatggagcgataaggtcatatgtaaacagaaaaggtgtcccaccctggcaatgcctgctaatggagggtttaagtgtgtggacggggcatactttaacagtcgctgtgaatactattgtagcccaggttatacgctcaagggtgaacggaccgttacctgtatggataacaaagcctggagtgggaggccagcctcttgcgtcgacatggagcctcctcgaattaaatgtccaagtgtgaaggagagaattgccgagcctaataaattgaccgtccgcgtaagctgggagacacccgaaggaagagataccgctgacggcatcttgaccgatgtaattctgaagggtttacccccaggttccaacttccccgagggcgatcacaaaattcagtatacagtgtatgaccgagcagagaacaaaggcacatgcaaatttagagtgaaggttagggtgaagaggtgcggaaagctgaatgctccggaaaatggctatatgaaatgctcttccgatggggataactacggcgctacctgcgaattctcctgtatcggcggttatgaactgcagggctcccctgctcgcgtgtgtcagagtaacctggcatggagcggtaccgagccaacatgcgcagccatgaacgtgaacgttggtgtccgcaccgctgccgcattattggatcagttctacgagaaacgcagactccttattgtatcaacaccaacggccaggaacctcttatacaggctgcagctgggcatgctgcagcaggcgcaatgcgggctcgatctccgccatatcactgttgtcgagctggtcggcgtgtttcctactctgattggccgaatcggagctaagataatgcctcccgctctcgcactccagcttagactcctgttgagaattcctctgtattccttcagcatggtgctggtggacaagcacggtatggacaaggagcggtacgtgtctctcgtgatgccggtggcactctttaacctaattgacacattcccccttcggaaggaagaaatggtgctccaggctgagatgtcccagacgtgcaacacttag

SEQ ID NO: 163809 - DNA, 1874 bp, Artificial Sequence
  derived and/or modified sequence
cccggccttcgcccgcccgctagcacgcagtcccttggtctcttcggtctcctgccgcccccgggaagcgcgctgcgctgccgaggcgagctaagcgcccgctcgccatggggagccccgcacatcggcccgcgctgctgctgctgctgccgcctctgctgctgctgctgctgctgcgcgtcccgcccagccgcagcttcccaggatcgggagactcaccactagaagacgatgaagtcgggtattcacaccctagatataaagataccccgtggtgctcccccatcaaggtgaagtatggggatgtgtactgcagggcccctcaaggaggatactacaaaacagccctgggaaccaggtgcgacattcgctgccagaagggctacgagctgcatggctcttccctactgatctgccagtcaaacaaacgatggtctgacaaggtcatctgcaaacaaaagcgatgtcctacccttgccatgccagcaaatggagggtttaagtgtgtagatggtgcctactttaactcccggtgtgagtattattgttcaccaggatacacgttgaaaggggagcggaccgtcacatgtatggacaacaaggcctggagcggccggccagcctcctgtgtggatatggaacctcctagaatcaagtgcccaagtgtgaaggaacgcattgcagaacccaacaaactgacagtccgggtgtcctgggagacacccgaaggaagagacacagcagatggaattcttactgatgtcattctaaaaggcctccccccaggctccaactttccagaaggagaccacaagatccagtacacagtctatgacagagctgagaataagggcacttgcaaatttcgagttaaagtaagagtcaaacgctgtggcaaactcaatgccccagagaatggttacatgaagtgctccagcgacggtgataattatggagccacctgtgagttctcctgcatcggcggctatgagctccagggtagccctgcccgagtatgtcaatccaacctggcttggtctggcacggagcccacctgtgcagccatgaacgtcaatgtgggtgtcagaacggcagctgcacttctggatcagttttatgagaaaaggagactcctcattgtgtccacacccacagcccgaaacctcctttaccggctccagctaggaatgctgcagcaagcacagtgtggccttgatcttcgacacatcaccgtggtggagctggtgggtgtgttcccgactctcattggcaggataggagcaaagattatgcctccagccctagcgctgcagctcaggctgttgctgcgaatcccactctactccttcagtatggtgctagtggataagcatggcatggacaaagagcgctatgtctccctggtgatgcctgtggccctgttcaacctgattgacacttttcccttgagaaaagaagagatggtcctacaagccgaaatgagccagacctgtaacacctgacatgatggttcctctcttggcaattcctcttcattgtctacatagtgacatgcacacgggaaagccttaaaaatatccttgatgtacagattttatttgtaattttaaaagtctattttattatgagctttctttgcacttaaaaattagcatgctgctttttgtacttggaagtgtttcaaaaaattatatgaccatatttactctttctaactttctttactccatcatggctgcttgattttgtagagaaattagaacccataaccatacacaggctatcaacatgttattcaatgtgacacctaactcttttctattttgttttttaagtaagacttttattaataaaacaaaatgttttggagcaaa

SEQ ID NO: 163810 - protein, 150 aa, Artificial Sequence
  derived and/or modified sequence
MAKIILRHLIEIPVRYQEEFEARGLEDCRLDHALYALPGPTIVDLRKTRAAQSPPVDSAAETPPREGKSHFQILLDVVQFLPEDIIIQTFEGWLLIKAQHGTRMDEHGFISRSFTRQYKLPDGVEIKDLSAVLCHDGILVVEVKDPVGTK

SEQ ID NO: 163811 - DNA, 453 bp, Artificial Sequence
  derived and/or modified sequence
atggccaagatcatcctgaggcatcttattgagatacccgtgcgataccaggaggagttcgaagcccgtgggttggaggattgccggctggatcatgccctgtacgctttgcccggacccaccattgtagaccttcggaagacgagggcagcccagtcccctcctgtggatagcgccgcagagacccctcctcgggaaggtaagagtcactttcagatcctcctggacgtggtgcagtttttgcccgaggacatcatcatacagacgtttgaagggtggttgctgattaaggcacagcacggaactcgaatggacgagcacggatttattagcaggtccttcacaaggcagtataagctccccgatggagtggagatcaaggacctgagcgcagtgctgtgtcatgatggaatactggttgtggaggttaaggaccccgtgggaaccaagtag

SEQ ID NO: 163812 - DNA, 763 bp, Artificial Sequence
  derived and/or modified sequence
gcattccgtgctatgattcaggcctaattaagtgattgcgtctgggcacggctataaaccactagctgcttcaactggtaatccagtcagtaggcaactgcaggggctcgccactgactgaaggcagtggaaggttggcagaaggaggctgttcaaggctgtttttgccttcactatggcaaaaatcattttgaggcacctcatagagattccagtgcgttaccaggaagagtttgaagctcgaggtctagaagactgcaggctggatcatgctttatatgcactgcctgggccaaccatcgtggacctgaggaaaaccagggcagcgcagtctcctccagtggactcagcggcagagacgccaccccgagaaggcaaatcccactttcagatcctgctggacgtggtccagttcctccctgaagacatcatcattcagaccttcgaaggctggctgctgataaaagcacaacacggaaccagaatggatgagcacggttttatctcaagaagcttcacccgacagtacaaactaccagatggtgtggaaatcaaagatttgtctgcagtcctctgtcatgatggaattttggtggtggaagtaaaggatccagttgggactaagtgacatcgtatcggttcctgttcagatgacatggggaagatgatggttcagccactggtactacgagaatgtttgtattacccacatttgaaatgatttgctatgatttttatgaagattaaaaatatatacacagtt

SEQ ID NO: 163813 - DNA, 453 bp, Artificial Sequence
  derived and/or modified sequence
atggccaagatcatcctgcggcacctgattgagatccctgtgcgctaccaggaggagtttgaggcccggggcctggaggactgccgcctggaccacgccctgtatgccctgcccggccccaccatcgtggacctgaggaagacccgggccgcccagagcccccctgtggacagcgctgctgagaccccaccccgggagggcaagagccacttccagatcctgctggatgtggtgcagttcctgcctgaggacatcatcatccagacctttgagggctggctgctgatcaaggcccagcacggcaccaggatggatgaacatggcttcatcagccgctccttcacccggcagtacaagctgcctgatggagtggagatcaaggacctgtctgctgtgctgtgccatgatggcatcctggtggtggaggtgaaggaccctgtgggcaccaagtag

SEQ ID NO: 163814 - DNA, 453 bp, Artificial Sequence
  derived and/or modified sequence
atggccaagatcatcctgcggcacctgatcgagatccccgtgcggtatcaggaggagtttgaggctcgcggcctcgaagactgccgtctggaccatgcgctttatgccctgcccggcccgactatagtggatctgagaaagacacgagccgcccagtctccgcccgtggacagcgcagctgaaacccctcctcgggaaggcaaatctcacttccagatcctgctggacgtggtgcaattcttacccgaggacatcattattcagacttttgaagggtggcttctcattaaggcccagcatgggacaaggatggatgaacacggctttattagccgcagcttcactcgtcagtacaaattacctgacggagttgaaatcaaagatctgagcgcagtgttgtgtcatgacggcatactggtcgtggaagtgaaggatccggtaggaacaaaatag

SEQ ID NO: 163815 - DNA, 453 bp, Artificial Sequence
  derived and/or modified sequence
atggcaaaaataatcttacgccacctaatagaaatacccgtgcgatatcaagaagaattcgaggccagagggcttgaggactgtaggctggatcacgcgttatatgcactcccaggcccaactattgtcgacttgagaaaaacccgggctgcgcaatctccccctgtggatagcgctgccgaaaccccccctcgggaaggtaagtcccattttcagattctgttagacgttgtccagttcctgccagaagacattataattcagacctttgagggttggttgttgatcaaagcacagcacgggacccggatggacgaacatggcttcatttctagatcctttacgaggcaatataaactcccagacggagtggagattaaggacctgtcagccgtgttgtgtcacgatggaatcctggtggtagaggtaaaagatcccgtggggacaaaatag

SEQ ID NO: 163816 - DNA, 453 bp, Artificial Sequence
  derived and/or modified sequence
atggccaagatcatcctgagacacctgatcgagatccccgtgagataccaggaggagttcgaggccagaggcctggaggactgcagactggaccacgccctgtacgccctgcccggccccaccatcgtggacctgagaaagaccagagccgcccagagcccccccgtggacagcgccgccgagaccccccccagagagggcaagagccacttccagatcctgctggacgtggtgcagttcctgcccgaggacatcatcatccagaccttcgagggctggctgctgatcaaggcccagcacggcaccagaatggacgagcacggcttcatcagcagaagcttcaccagacagtacaagctgcccgacggcgtggagatcaaggacctgagcgccgtgctgtgccacgacggcatcctggtggtggaggtgaaggaccccgtgggcaccaagtag

SEQ ID NO: 163817 - DNA, 787 bp, Artificial Sequence
  derived and/or modified sequence
gaaaagacaagagagcattccgtgctatgattcaggcctaattaagtgattgcgtctgggcacggctataaaccactagctgcttcaactggtaatccagtcagtaggcaactgcaggggctcgccactgactgaaggcagtggaaggttggcagaaggaggctgttcaaggctgtttttgccttcactatggcaaaaatcattttgaggcacctcatagagattccagtgcgttaccaggaagagtttgaagctcgaggtctagaagactgcaggctggatcatgctttatatgcactgcctgggccaaccatcgtggacctgaggaaaaccagggcagcgcagtctcctccagtggactcagcggcagagacgccaccccgagaaggcaaatcccactttcagatcctgctggacgtggtccagttcctccctgaagacatcatcattcagaccttcgaaggctggctgctgataaaagcacaacacggaaccagaatggatgagcacggttttatctcaagaagcttcacccgacagtacaaactaccagatggtgtggaaatcaaagatttgtctgcagtcctctgtcatgatggaattttggtggtggaagtaaaggatccagttgggactaagtgacatcgtatcggttcctgttcagatgacatggggaagatgatggttcagccactggtactacgagaatgtttgtattacccacatttgaaatgatttgctatgatttttatgaagattaaaaatatatacacagttcctggtaaaa

SEQ ID NO: 163818 - protein, 721 aa, Artificial Sequence
  derived and/or modified sequence
MGTPASGRKRTPVKDRFSAEDEALSNIAREAEARLAAKRAARAEARDIRMRELERQQKEYSLHSFDRKWGQIQKWLEDSERARYSHRSSHHRPYLGVEDALSIRSVGSHRYDMFKDRSSRLSSLNHSYSHSHGMKKRSSDSHKDLLSGLYFDQRNYSSLRHSKPTSAYYTRQSSSLYSDPLATYKSDRASPTANSGLLRSASLASLYNGGLYNPYGPRTPSECSYYSSRISSARSSPGFTNDDTASIVSSDRASRGRRESVVSAADYFSRSNRRGSVVSEVDDISIPDLSSLDEKSDKQYAENYTRPSSRNSASATTPLSGNSSRRGSGDTSSLIDPDTSLSELRDIYDLKDQIQDVEGRYMQGLKELKESLSEVEEKYKKAMVSNAQLDNEKNNLIYQVDTLKDVIEEQEEQMAEFYRENEEKSKELERQKHMCSVLQHKMEELKEGLRQRDELIEEKQRMQQKIDTMTKEVFDLQETLLWKDKKIGALEKQKEYIACLRNERDMLREELADLQETVKTGEKHGLVIIPDGTPNGDVSHEPVAGAITVVSQEAAQVLESAGEGPLDVRLRKLAGEKEELLSQIRKLKLQLEEERQKCSRNDGTVGDLAGLQNGSDLQFIEMQRDANRQISEYKFKLSKAEQDITTLEQSISRLEGQVLRYKTAAENAEKVEDELKAEKRKLQRELRTALDKIEEMEMTNSHLAKRLEKMKANRTALLAQQ

SEQ ID NO: 163819 - DNA, 2166 bp, Artificial Sequence
  derived and/or modified sequence
atgggaactccagcttcaggaaggaagcgcacccctgtgaaggataggttcagcgccgaggatgaagcactttccaatatcgctagagaggccgaggctcggctggcagccaaacgagctgcccgtgcggaagcacgcgatatccgcatgcgtgagcttgaacgccaacagaaagagtactcactgcacagcttcgatagaaaatggggtcagatccagaaatggctggaagatagtgagcgtgcacgctacagccatagatcttctcatcatcgaccgtacctcggcgttgaagacgccctcagcatccgctctgtgggctcgcatcgttatgacatgttcaaagaccgatcatctcgattgagctccctgaatcacagctatagccactcacacgggatgaaaaagcgcagtagtgattcccacaaggaccttctaagcggtctttatttcgaccagagaaactactcctctctgagacattctaaacctacatccgcctactacacacggcagtcgagcagcctgtattcagacccgctggcaacttataaatccgaccgggcttcccctacagccaatagcggcctgctgcggtcagcatccctcgcttcgctctacaatggtggcctatacaatccatatggacccaggaccccctccgaatgttcctactactccagccggattagttctgcccgcagtagcccgggattcaccaatgatgatactgccagcatcgtttcctccgaccgagcatcaagagggagacgagagtccgttgtaagcgctgctgactattttagcagatcaaacagacggggatccgttgtgtccgaggtagacgatatcagcataccagacctttccagcctagacgagaaatccgataaacaatacgccgagaattatactagaccaagttccaggaactctgcttccgctaccaccccactctctggcaactctagcaggagggggtcgggagacacatctagcctgatcgaccccgacacgtcactatctgagctgcgggatatctacgatctgaaagatcaaatccaggatgtagaggggagatacatgcaaggcctgaaagaattaaaagaatccctcagtgaagtggaggaaaagtataagaaggccatggtgtccaacgcacagctggacaacgaaaagaacaacctcatctaccaggttgatacgcttaaggacgtgatcgaggagcaagaggaacagatggccgagttctaccgtgagaacgaggaaaaatccaaagagcttgaaaggcagaagcacatgtgctccgtgcttcagcataagatggaagaactcaaagaaggtttgcgacaacgcgacgagttgattgaggagaaacagaggatgcaacagaaaattgataccatgacaaaagaggtatttgatctacaggaaaccctcctgtggaaagataagaaaataggcgcactggagaaacaaaaggagtatattgcgtgcttacgtaatgagagagacatgttgcgggaggaattagccgatctacaggaaaccgtgaaaaccggggagaagcacggcttggtcattattccagacggaacaccaaacggagacgtgtcacacgaacctgttgcaggtgctattacagttgtctcacaggaggcggcccaggtgctggaaagcgcaggtgaaggacctctggacgtccgacttcggaaattagccggagagaaggaggagctgttgagccaaatcagaaagttaaagttgcaactggaggaagagaggcagaaatgcagcaggaatgatgggaccgtgggagacctggccggcctacagaacgggtctgatctgcagttcatcgagatgcaaagagatgccaatcgacagattagcgagtacaaattcaagttaagcaaggccgagcaggacattactaccctggaacagtcaatatcaagattggaagggcaggtgctccgctacaaaaccgcagccgagaacgcggaaaaagtggaggacgaactcaaagccgaaaagaggaagctccagagagagttacgtacggcattggataaaattgaagagatggaaatgacaaactctcacctggccaagaggctagagaagatgaaggccaataggaccgctctgctcgcccaacagtag

SEQ ID NO: 163820 - DNA, 2166 bp, Artificial Sequence
  derived and/or modified sequence
atgggaacaccagcctccgggcgtaagaggactcccgttaaagatcgattcagtgcagaggacgaggctctatctaatattgcccgggaagctgaggcccgtctggccgcaaagcgtgccgccagggcggaggctcgcgacatacgtatgagggagctggaaaggcaacaaaaagaatactctctccattcatttgatcgtaagtggggacagattcaaaagtggcttgaagattctgagcgcgcgaggtacagtcaccgctcgagccaccatcggccttacctgggggtcgaggatgcactgtcaattagaagtgttgggagccatcgttatgacatgtttaaagaccggtcctcgaggctgtcatccctcaaccactcttactctcacagccacggtatgaagaaacggtcctcggactctcacaaggatctgctgagcgggctttattttgaccaacgcaattatagttcccttcgccactcgaaacccacgagcgcctactatacaagacagtctagctcactgtattccgatcccctcgctacctataaatccgatcgtgctagccctaccgcaaattctgggctgctgagaagcgcttcactggcttcactttataacggtgggctctacaacccatacggacccaggaccccaagtgaatgcagctattactcttcaaggatctcttccgcccgtagcagcccgggctttactaatgacgacaccgcatcaatagtctcctctgacagggcttcaagggggcgcagggagtctgttgtctctgccgctgactacttcagtaggagtaatagacggggaagtgtcgtgtcggaagtggacgatatatcaatcccagacttgtcatcactggatgagaaatccgataaacagtatgccgagaattacactcggccctctagtagaaatagtgcatctgctacaacgccgctgtccggaaactccagccgaagaggatcaggggacacctcaagtttaattgatcctgacacatccctgagtgagctgcgggacatctacgatcttaaggatcagattcaggatgtggagggccgctacatgcaaggtctcaaggagcttaaggaaagcctgtccgaggttgaagagaaatacaaaaaagctatggtatctaacgcccagcttgacaatgagaagaataatctcatctatcaggtcgatactcttaaggacgtgatcgaggagcaggaggaacagatggcagagttctatagggagaacgaggagaagtctaaagagcttgagcgtcaaaaacacatgtgctcagtcttgcagcacaaaatggaggagctgaaagaaggattgcgccaacgggacgaattgatagaagaaaaacaacgaatgcaacagaaaatagacaccatgactaaggaagtgtttgatcttcaggagaccctgctatggaaggataagaaaatcggcgccctagagaagcagaaagagtacatagcctgtctgaggaatgagagggatatgctgcgcgaagaactggccgatcttcaggagactgtgaagacgggcgagaaacatggtcttgttatcattcccgatgggactcctaacggggacgtgtctcacgaacctgtggccggagcaattaccgtcgtgtctcaggaggccgcacaggtcttagaatctgctggcgaaggtcctttagatgtgcgcttgagaaagctcgctggggaaaaggaggaactcttatcccagattagaaaattgaaactgcagcttgaagaagaacgacaaaagtgcagccggaacgacggcaccgtgggtgacctggcaggattacagaacggttccgatttgcaattcattgaaatgcagcgcgacgcgaaccgccagatatccgagtataaatttaagctgagtaaggccgagcaggacatcaccactttggaacagtcaatatctcgtcttgaggggcaggtcctgcgttataagaccgctgccgaaaacgctgagaaggttgaggacgagctaaaggctgagaagaggaagttgcagagagagttacggacagcgttagacaagatcgaagagatggaaatgaccaatagccatctggctaagagactggaaaaaatgaaagcaaaccggactgcactgctcgcccagcagtag

SEQ ID NO: 163821 - DNA, 2166 bp, Artificial Sequence
  derived and/or modified sequence
atgggcaccccagccagcggcaggaagaggacccctgtgaaggaccgcttcagcgcagaagatgaggccctgagcaacatcgcccgggaggccgaggcccggctggccgccaagagagctgcccgggcagaggcccgggacatccgcatgagggagctggagcggcagcagaaggagtacagcctgcacagctttgacaggaagtggggccagatccagaagtggctggaggacagcgagcgggcccgctacagccacaggagcagccaccaccggccctacctgggcgtggaggatgccctgagcatccgctctgtgggcagccacagatatgacatgttcaaggacaggagcagccggctgagcagcctgaaccacagctacagccacagccacggcatgaagaagaggagcagtgacagccacaaggacctgctgagcggcctgtactttgaccagaggaactacagcagcctgcggcacagcaagcccaccagcgcctactacacccggcagagcagcagcctgtacagcgaccccctggccacctacaagagtgaccgggccagccccacagccaacagcggcctgctgcggagcgccagcctggccagcctgtacaacggcggcctgtacaacccctacggccccaggaccccatctgagtgcagctactacagcagccgcatcagcagcgcccggagcagccctggcttcaccaatgatgacacagccagcatcgtgtccagtgaccgggccagccggggcagaagagagagcgtggtgtctgctgctgactacttcagccgcagcaacagaagaggctctgtggtgtctgaggtggatgacatcagcatcccagacctgagcagcctggatgagaagagtgacaagcagtatgcagagaactacacccggcccagcagcaggaacagcgccagcgccaccacccccctgagcggcaacagcagcagaagaggcagcggggacaccagcagcctgattgatcctgacaccagcctgtctgagctgcgggacatctatgacctgaaggaccagatccaggatgtggagggccgctacatgcagggcctgaaggagctgaaggagagcctgtctgaggtggaggagaagtacaagaaggccatggtgtccaatgcccagctggacaatgagaagaacaacctgatctaccaggtggacaccctgaaggatgtgattgaggagcaggaggagcagatggccgagttctaccgggagaatgaggagaagagcaaggagctggagcggcagaagcacatgtgcagcgtgctgcagcacaagatggaggagctgaaggagggcctgcggcagagagatgagctgattgaggagaagcagaggatgcagcagaagattgacaccatgaccaaggaggtgtttgacctgcaggagaccctgctgtggaaggacaagaagattggagccctggagaagcagaaggagtacatcgcctgcctgagaaatgaaagagacatgctgcgggaggagctggccgacctgcaggagaccgtgaagacaggagagaagcacggcctggtgatcatcccagatggcaccccaaatggagatgtgtcccatgagcctgtggccggggccatcaccgtggtgtcccaggaggccgcccaggtgctggagagcgctggggagggccccctggatgtgcggctgaggaagctggccggggagaaggaggagctgctgagccagatcaggaagctgaagctgcagctggaggaggagcggcagaagtgcagcagaaatgatggcaccgtgggggacctggccggcctgcagaatggaagtgacctgcagttcatcgagatgcagagagatgccaaccggcagatcagcgagtacaagttcaagctgagcaaggccgagcaggacatcaccaccctggagcagagcatcagccggctggagggccaggtgctgcgctacaagacagctgctgaaaatgctgagaaggtggaggatgagctgaaggccgagaagaggaagctgcagcgggagctgaggacagccctggacaagattgaggagatggagatgaccaacagccacctggccaagaggctggagaagatgaaggccaacagaacagccctgctggcccagcagtag

SEQ ID NO: 163822 - DNA, 3208 bp, Artificial Sequence
  derived and/or modified sequence
tggaaaggagagctaccatcactaagggctgaaaacacagttaaatcactttcaaagttaaaagactattaagaacacaagatggggactcctgcttctggaaggaaaagaacacctgtgaaagaccgattttctgcagaagatgaagctttgagtaacattgccagagaggcagaggcaaggctggcagcaaaacgggctgcccgggcagaagcaagagatatacgcatgagagaactggaacgacaacaaaaagagtactctcttcattcctttgatcggaagtggggacagattcagaagtggctggaagattcggaaagggccaggtattcccaccggtccagtcaccatcgtccttatctgggagttgaggatgcattgtccattcgaagtgttggcagtcacaggtatgatatgttcaaggatagatcatcaagactttcatcattaaatcattcttacagtcactctcatggaatgaagaagaggtcttctgattctcataaagacctactgagtggcctctactttgaccagagaaactatagcagtcttagacatagcaaacccacctctgcctactacactcggcagtcttcttccctgtacagtgaccctctggcaacatataagagtgacagggcctctcctactgcaaattctggtctgctgagaagtgccagtctggcatcattgtacaatggtggattatataacccttatggtcctcgaactccatctgaatgcagttattattcatcaagaataagttcagcccgaagcagtccagggtttaccaacgatgacactgcaagcattgtgtcttctgatcgtgccagtcgtggacgaagggagagtgtggtatctgccgctgattatttcagtcgctccaatcgtaggggaagtgttgtctctgaggtggatgatatcagtatcccagatttgtccagcttggatgaaaaatctgacaaacagtatgctgaaaattatacaagaccttcatctcgaaattctgcctcagcaacaacccctctaagtggaaactcatccagacgaggaagtggggacaccagcagcttaatagatccagacacttcattaagtgaattgcgggatatctatgaccttaaggaccagatacaggatgtagaagggagatacatgcaggggcttaaagaactaaaggaatctttgtctgaagtggaagaaaaatacaagaaagccatggtttccaatgcacagttagacaatgagaagaacaatttgatctaccaagtagacacactcaaggatgttattgaagagcaggaggaacagatggcagaattttatagagaaaatgaagaaaaatcaaaggagttagaaaggcagaaacatatgtgtagtgtgctgcagcataagatggaagaacttaaagaaggcctgcggcaaagagatgagcttattgaggagaagcagcgcatgcagcagaaaatagacaccatgacaaaagaggtgtttgacctccaggagacacttctttggaaagataaaaaaattggggccctagagaaacagaaagaatacattgcctgccttaggaatgagcgagatatgctcagagaggagctggctgacctgcaggagacagtgaagacgggagagaaacatggcttagttataatccccgatggcactcccaatggtgatgtcagtcatgaaccagtggctggagccatcactgttgtgtctcaggaagctgctcaggtcttggagtcagcaggagaagggccattagatgtaaggctacgaaaacttgctggagagaaggaagaactactgtcacagattagaaaactgaagcttcagttagaggaggaacgacagaaatgctccaggaatgatggcacagtgggtgacctggcaggactgcagaatggctcagacttgcagttcatcgaaatgcagagagatgccaatagacaaattagcgaatacaaatttaagctttcaaaagcagaacaggatataactaccttggagcaaagtattagccggcttgagggacaggttctgagatataaaactgctgctgagaatgctgagaaagttgaagatgaattgaaagcagaaaaacggaagctacaacgagagttacgaacagcactggacaagattgaggagatggagatgaccaacagccacctggccaagcggctggagaagatgaaggccaataggacagcacttctggcccagcagtaggaaaaccacccttcaacctgggtgatgctccttggggccctacctagagggactgacttttgtccattgacacaaaccccttttagtactgttttgagttttgtcattaaaacagccacctttgtattttataatttatgacagaatgaagtcattttgaatctacatgaatgaacactttggattttgttgtagtttgattctagggtagaaccagtccatgctgtttttattttttatctccgtaattgtagaatcatgtttactcaacgtttttccccagctgcctcagtaactgggcactcggaggccttggcacgggttctggaggacagacagcaattctatgagtgctcactgagatacttgctggagacctcagaaaacacaagtgccttctccacggtgcaattcagacttcagtgatctccagtggtcaaaagacatttacccttaatatcagacaacatttatattttagtgaagaaacaagttctcgggtggggaatctatgtttcactcagatttatatgtttggaggaaaaaagcctttttttgtaaaatatttaaatttatataagaaaatgttagaaaaaaatatggggagtgtatataaaacttgctttattgcatggggcaggggaagtccaggcctaatactcctaaagtaagagttgggtcctttttttcttcaatacaactgtgctgtaccttgtaaagtattttatctgctgcttatttgtggaatgaaacctcaaacaaacccaaagggggagggtagggcagggcaggcagattggaaatctgcctgcagattctattaaatacacccttttgccaaccacaattggctactgacatgttcattttgttataggagactttaaaacaaatcatggcaaccacatccctcttcttttgtctccttctcaaggaaaaacaatctggaatgtagaacttt

SEQ ID NO: 163823 - DNA, 3814 bp, Artificial Sequence
  derived and/or modified sequence
gtcgtcgaccctgtggccccgcccatccttcgcctcctcagtcggccgctcaggctgcggctcctcccggggccggttcccgctgtctcagccgcggcgcagagggcacatcggcctgaccgactagccggctgccagtgccgggagccgccgcgtccatccccgcccgcctggccggggacccaggactgagtcgtccagctgcgcccctcgcccatagccccagcgggcgccgggcgggcgagcagctcttcggcccttcccggacagcgacgcagtcgcagcgcgcgccctaacacagatgtgggaagataaatgaaggggtctagatgtaaatgtcagtggaaaggagagctaccatcactaagggctgaaaacacagttaaatcactttcaaagttaaaagactattaagaacacaagatggggactcctgcttctggaaggaaaagaacacctgtgaaagaccgattttctgcagaagatgaagctttgagtaacattgccagagaggcagaggcaaggctggcagcaaaacgggctgcccgggcagaagcaagagatatacgcatgagagaactggaacgacaacaaaaagagtactctcttcattcctttgatcggaagtggggacagattcagaagtggctggaagattcggaaagggccaggtattcccaccggtccagtcaccatcgtccttatctgggagttgaggatgcattgtccattcgaagtgttggcagtcacaggtatgatatgttcaaggatagatcatcaagactttcatcattaaatcattcttacagtcactctcatggaatgaagaagaggtcttctgattctcataaagacctactgagtggcctctactttgaccagagaaactatagcagtcttagacatagcaaacccacctctgcctactacactcggcagtcttcttccctgtacagtgaccctctggcaacatataagagtgacagggcctctcctactgcaaattctggtctgctgagaagtgccagtctggcatcattgtacaatggtggattatataacccttatggtcctcgaactccatctgaatgcagttattattcatcaagaataagttcagcccgaagcagtccagggtttaccaacgatgacactgcaagcattgtgtcttctgatcgtgccagtcgtggacgaagggagagtgtggtatctgccgctgattatttcagtcgctccaatcgtaggggaagtgttgtctctgaggtggatgatatcagtatcccagatttgtccagcttggatgaaaaatctgacaaacagtatgctgaaaattatacaagaccttcatctcgaaattctgcctcagcaacaacccctctaagtggaaactcatccagacgaggaagtggggacaccagcagcttaatagatccagacacttcattaagtgaattgcgggatatctatgaccttaaggaccagatacaggatgtagaagggagatacatgcaggggcttaaagaactaaaggaatctttgtctgaagtggaagaaaaatacaagaaagccatggtttccaatgcacagttagacaatgagaagaacaatttgatctaccaagtagacacactcaaggatgttattgaagagcaggaggaacagatggcagaattttatagagaaaatgaagaaaaatcaaaggagttagaaaggcagaaacatatgtgtagtgtgctgcagcataagatggaagaacttaaagaaggcctgcggcaaagagatgagcttattgaggagaagcagcgcatgcagcagaaaatagacaccatgacaaaagaggtgtttgacctccaggagacacttctttggaaagataaaaaaattggggccctagagaaacagaaagaatacattgcctgccttaggaatgagcgagatatgctcagagaggagctggctgacctgcaggagacagtgaagacgggagagaaacatggcttagttataatccccgatggcactcccaatggtgatgtcagtcatgaaccagtggctggagccatcactgttgtgtctcaggaagctgctcaggtcttggagtcagcaggagaagggccattagatgtaaggctacgaaaacttgctggagagaaggaagaactactgtcacagattagaaaactgaagcttcagttagaggaggaacgacagaaatgctccaggaatgatggcacagtgggtgacctggcaggactgcagaatggctcagacttgcagttcatcgaaatgcagagagatgccaatagacaaattagcgaatacaaatttaagctttcaaaagcagaacaggatataactaccttggagcaaagtattagccggcttgagggacaggttctgagatataaaactgctgctgagaatgctgagaaagttgaagatgaattgaaagcagaaaaacggaagctacaacgagagttacgaacagcactggacaagattgaggagatggagatgaccaacagccacctggccaagcggctggagaagatgaaggccaataggacagcacttctggcccagcagtaggaaaaccacccttcaacctgggtgatgctccttggggccctacctagagggactgacttttgtccattgacacaaaccccttttagtactgttttgagttttgtcattaaaacagccacctttgtattttataatttatgacagaatgaagtcattttgaatctacatgaatgaacactttggattttgttgtagtttgattctagggtagaaccagtccatgctgtttttattttttatctccgtaattgtagaatcatgtttactcaacgtttttccccagctgcctcagtaactgggcactcggaggccttggcacgggttctggaggacagacagcaattctatgagtgctcactgagatacttgctggagacctcagaaaacacaagtgccttctccacggtgcaattcagacttcagtgatctccagtggtcaaaagacatttacccttaatatcagacaacatttatattttagtgaagaaacaagttctcgggtggggaatctatgtttcactcagatttatatgtttggaggaaaaaagcctttttttgtaaaatatttaaatttatataagaaaatgttagaaaaaaatatggggagtgtatataaaacttgctttattgcatggggcaggggaagtccaggcctaatactcctaaagtaagagttgggtcctttttttcttcaatacaactgtgctgtaccttgtaaagtattttatctgctgcttatttgtggaatgaaacctcaaacaaacccaaagggggagggtagggcagggcaggcagattggaaatctgcctgcagattctattaaatacacccttttgccaaccacaattggctactgacatgttcattttgttataggagactttaaaacaaatcatggcaaccacatccctcttcttttgtctccttctcaaggaaaaacaatctggaatgtagaacttttaaagacttgagtttcacctttagaggtaccctgtccaagaggtttttttaaaatcatggagtgcaactactttgcagaatttatgattctcttttgctcttagtacccaggtggttttatagaaatgattattgtatctttaaagtgcttacacagaaaatatattgggggaaaatctagtgactaaaggcacataagataataaaactagactttaaaaaggtaactcaaaagtgaataaaatctctaatatttgttccttt

SEQ ID NO: 163824 - DNA, 2166 bp, Artificial Sequence
  derived and/or modified sequence
atgggcacccccgccagcggccggaagcggacccccgtgaaggaccgcttcagcgctgaggacgaggcgttgagtaatattgcccgggaggccgaagcaagactcgccgccaagagagctgcgcgcgccgaggcgcgcgacattcgaatgcgtgaactggaaaggcaacagaaggaatatagtctacattctttcgacagaaaatgggggcagatacagaagtggctcgaagattcggagcgtgccaggtatagtcacaggtctagtcaccatcgtccctacctgggtgtagaggatgcactgagtatcaggagcgtgggcagccataggtacgatatgtttaaggaccgctccagcagactaagttcactgaaccattcctacagccattcacatggtatgaagaagaggagctctgatagccataaagacctgctgagcggcctgtactttgatcagcggaactattcatccctccgtcattccaaacctactagtgcctactataccaggcagagctcctctctgtactcggatccactggcgacatataagtctgacagagcctctccaaccgccaattccgggctgcttagatcagcctcattggctagcctgtataacggtgggttatataacccctacggaccccgcactccctcagagtgctcttattacagcagccgaatctccagcgctagatcgtctccaggcttcaccaatgacgacaccgccagcatagtgagctctgaccgggcctcccgtggcagaagggagagcgtggtctccgctgccgattacttttctcggagcaatagacgggggtccgtcgtaagtgaagtcgacgacatctccatccccgacctcagctctctggacgagaaatcagataaacaatacgctgaaaactacacaaggccctccagtaggaactctgctagcgccaccacacccctatcaggaaactcctcccgcagagggagtggcgatacaagttccctgatcgaccccgatacttcactttcagaactccgggatatctacgacctcaaagatcaaatccaggacgttgagggcaggtacatgcagggcctgaaagagctgaaagaaagcctgtcagaagtggaagaaaagtacaagaaggccatggtgtcaaatgctcagttggataacgagaagaataatttaatttaccaagttgacaccttgaaggatgttatagaagagcaggaggagcaaatggcggagttttacagggagaacgaggaaaaatccaaagaattagaaagacaaaaacacatgtgctcagtgctacagcacaagatggaagagctgaaggaaggtctgcggcaaagagatgagttgatagaggaaaagcagaggatgcagcaaaaaattgacactatgaccaaggaggtgttcgatctgcaggaaacgctgctctggaaggacaaaaagataggtgccctggaaaagcagaaggagtacattgcatgcctgcgaaatgagagggatatgttgcgtgaggagctggcagacctgcaggagactgtgaaaacaggagagaagcatggcctggttattatccctgatggcacgcccaatggcgatgttagtcacgagcccgttgcaggcgccataacagtggttagccaagaggctgcccaggtgctcgagagcgccggcgagggaccactcgacgtgcgccttcggaaactggctggagagaaggaggaactgttatcccagatacgaaaacttaagctccagctggaggaagagaggcagaagtgtagtcgcaacgatggtacagtcggcgaccttgccggcttacagaatggctccgaccttcagttcatagagatgcaacgcgatgccaacaggcagatttccgaatacaagtttaaactgtctaaggcggaacaggatattacaactctggagcaatccatttcacgtctggagggacaggtcctcagatataaaaccgcagcggaaaacgccgagaaagttgaagatgaactcaaggcagagaaaaggaaattgcagagggagctcaggactgctctggataagatcgaagagatggagatgacgaatagtcacctcgccaagaggctggagaaaatgaaggcaaacaggactgccctgctcgctcagcaatag

SEQ ID NO: 163825 - DNA, 2166 bp, Artificial Sequence
  derived and/or modified sequence
atgggcacccccgccagcggccggaagcggacccccgtgaaggaccggtttagcgccgaagacgaagctctcagcaatattgcgcgggaggctgaagccagactggcagccaaaagagctgctcgggccgaggcgagggacatacgcatgagagagctcgagcgccaacagaaggaatactccctgcacagcttcgaccgtaagtggggccagatccagaagtggctggaggatagcgagcgcgcaaggtacagccaccggagctctcaccacagaccctacctgggggttgaagacgcgctgtctattcgttccgtgggatcacatcggtacgacatgttcaaagataggagttcaagactgtctagcctaaaccactcctactcacacagccacggcatgaaaaagagatcatccgacagccataaagatctactatctggactgtatttcgaccagaggaattattcgagcctgcgccacagcaagccaacctccgcatactacactcgccagtcctcctccctgtactcagacccactcgccacatacaaaagcgatagggcatccccgacagccaatagcggcctgttgcgcagcgcctcattagcgtcgctctataacggcggcctctataatccatacggtccgcggaccccctcggaatgcagctactattcatcccgaattagctcagcacgctcttctccagggttcacaaacgacgacaccgccagcattgtctcgtccgaccgagcaagtcggggacggagagaatcagtggttagcgcggccgattactttagtagatctaaccgtagaggtagcgtagtttctgaagtcgacgacatcagcattcccgacctcagtagtcttgatgaaaagtctgataagcagtatgcagaaaattacactcgtcccagcagccgcaactcagccagcgccaccaccccactatccggtaatagctctcgaaggggctcaggagacaccagcagcttaatcgatcctgacacgtccctgagcgaattgagagacatttacgacctgaaggatcaaattcaggacgtggaaggaagatatatgcaaggactgaaagagttaaaggagtcgctgtccgaggtggaggaaaaatacaagaaagccatggtgagcaacgcccagctggacaatgagaagaacaatctcatttatcaggttgacaccctgaaggacgtcattgaggagcaggaggagcagatggccgagttttaccgggagaacgaggaaaaatccaaagaactcgagcggcagaagcacatgtgtagcgttctgcagcacaaaatggaggagctgaaggaggggctcaggcagagagacgagttgatagaggagaagcagagaatgcagcagaaaattgacacaatgacaaaggaggtattcgatcttcaagaaacactgttgtggaaagataagaaaattggtgccctggaaaagcagaaagagtatatcgcatgcttgagaaacgagcgcgacatgttgcgcgaggagcttgccgacttgcaggaaacggtaaaaacaggagagaaacatggcttagtgataattcccgatggcacgcctaacggcgacgtgagccacgagccagtcgcgggcgctatcactgtggtgtctcaagaagcagcccaggtattggaaagtgcaggtgaagggccccttgatgttcggctccgaaaactggccggtgaaaaggaggagctgctgagccaaatccggaagctgaagctgcagttagaggaggaaaggcagaaatgttctcggaacgatgggactgtgggtgatcttgccggcctgcagaatggatcagacttgcagtttatcgaaatgcagcgtgacgccaacagacagatctcagagtataaattcaaactgagtaaagcagaacaggatatcaccacattggagcaatctatctccaggctggaagggcaagtcctaagatataaaacagccgccgagaacgccgagaaagtggaggacgagctgaaggccgagaaaagaaaattgcagcgcgagcttagaactgcactcgacaagattgaagagatggagatgactaattcacacctggctaagcggttggagaagatgaaggccaaccggactgccctgcttgctcagcagtag

SEQ ID NO: 163826 - DNA, 2166 bp, Artificial Sequence
  derived and/or modified sequence
atgggcacccccgctagcggaagaaaaaggacacctgtgaaggacagattttccgccgaggacgaagcactgagcaatatcgcccgagaggccgaggcacgattggcagctaagagggcggcacgcgcagaagccagggatataagaatgcgagagctcgaaaggcagcagaaagagtattcgctgcactcttttgatcgcaagtgggggcaaattcagaaatggctggaggattcagagcgggctcgatatagtcaccggtcatcccatcataggccttacctaggagtggaagacgctctgagcattcgcagcgttggctctcaccggtacgacatgtttaaggataggagctctcgtcttagctccctcaaccattcatacagccatagtcatggcatgaaaaagaggtctagtgactctcataaagacctgctgtctggcctttacttcgaccagcggaactactctagtttgcggcatagcaaaccgacatctgcatattacactcgacagagcagcagtctatactctgaccctctggctacttacaagtcagatcgcgcttcccctacagcaaacagtgggctgctcagatctgccagcttagcctccttatataacggcggtctgtacaatccctacggcccaagaacaccgtcagagtgctcctactacagcagccgtatctcttctgccagatctagtcctggctttacgaatgatgataccgcgtctatcgtctcttccgatagggcttccaggggaaggcgtgagagtgttgtgtctgcggcagattatttctctcggtccaatagaagaggctctgttgtgtctgaagtcgacgacatttcaatccctgacctatctagcctagatgaaaagtctgacaagcagtatgctgagaactacacccgaccctccagccgtaactccgcctccgcaacgacacccctgtcgggcaattcttctcgccgaggctctggggatacttcctctctcattgatcctgatacctcgctcagcgagctgagggacatatacgacctaaaagaccagatccaggacgtggagggaaggtacatgcaggggctaaaggagttgaaagaaagtcttagcgaagtagaggaaaaatacaagaaagctatggtatcaaacgcacagctggacaacgaaaaaaacaaccttatctaccaggtggacaccctgaaggacgtcatcgaggagcaggaggagcagatggcggaattctacagagagaacgaggaaaagtctaaagaactggagcgccaaaagcacatgtgttccgtcttgcagcacaagatggaggagttgaaagagggtctgagacagcgcgatgagcttatcgaagaaaagcagagaatgcagcagaaaatagacaccatgacaaaagaagttttcgatctgcaggagaccctcctctggaaggacaaaaagatcggggctttggagaagcagaaggaatacatagcttgtttgcggaacgagcgggatatgctgagagaagagcttgcagatctccaggagactgtcaagactggggaaaagcacggtcttgtgattattcctgatggcacgccaaacggggacgtgtctcacgaacctgtggccggagccatcaccgtggtgtctcaggaagctgcccaagtcctggagagtgccggagaaggcccactcgatgtgcgccttcggaagctggccggtgagaaggaagagcttctcagccaaatccgcaagctgaagcttcaactggaggaggagcgacagaagtgctctagaaatgatggcacagttggagacctggctggactacaaaacgggagcgatctacaatttatcgaaatgcagagagatgcaaatcggcagatatcggagtataaattcaagctctcgaaggcggagcaggacatcactacactcgagcagagcatctcccggctggaaggtcaagtgctaaggtacaagactgcagctgagaatgcggaaaaggtggaggacgaactcaaggccgaaaagcggaaactgcagagggagctgcggacagcattggacaaaattgaggaaatggagatgactaactcccatcttgcgaagaggctcgaaaaaatgaaagctaataggacggccctactcgcacagcaatag

SEQ ID NO: 163827 - DNA, 2166 bp, Artificial Sequence
  derived and/or modified sequence
atgggcacaccagcctctggaagaaagcgcactccagtgaaagatcgattctcagccgaagacgaggctttgagtaacattgccagggaggcggaagcaagactggcagctaagagggccgctagggccgaagccagagatatccgtatgagagagctggaacggcagcagaaggagtatagcctgcattcctttgatcgtaagtggggacagattcagaaatggctggaggacagcgagagagctcggtactcccacaggagctcccatcataggccttacttaggggtggaagacgccctcagcatccggtcggttggttcccacaggtatgatatgtttaaggataggagttcccgcctgagctccctgaaccattcttatagtcatagccacggaatgaagaagcgttcatccgacagccacaaggatcttttgtctgggctgtatttcgaccaacgaaactactcgtccctgcgccacagcaagccaacgagcgcatattacactcgccagtcatcgtccctctatagtgaccctctagctacctataagtctgatcgggcatctcccaccgccaactctggcttattgcggtccgcctctttggcttcactttacaatgggggactgtacaacccctacgggcctcggaccccctcagagtgctcatactactcttcacgaattagttctgcaagaagctcaccagggtttactaatgacgacacggcttccattgtctcctctgacagagcctctcgtggaaggagagagtccgtcgtgtccgcggctgattacttcagccgttcaaacaggagaggctccgttgtgagtgaggttgacgatattagtatccctgacctgtctagtctggacgaaaagagcgacaagcagtatgctgaaaattatacccgtcccagtagtcggaattccgccagcgcaaccacccccctgtccgggaattcatccaggcggggaagtggtgatacttcctccctgattgaccccgatacctctttgtctgaactccgcgacatctacgatctaaaggaccagatccaggatgtggaagggagatacatgcaggggttgaaggaattaaaggaatctctatccgaggtggaagaaaaatacaagaaagccatggtttccaacgctcaactggacaatgagaagaacaacctgatctatcaagtggacactcttaaggatgttattgaagaacaggaggaacagatggccgaattctatagagagaatgaggagaagtcaaaagaactggagcggcagaagcacatgtgttctgtgcttcaacataagatggaggagctgaaggaaggcttacggcaaagggacgaactcattgaagagaagcagagaatgcagcaaaagatcgacacaatgacaaaggaagtgttcgacctccaggagactcttttgtggaaagataagaaaatcggagccctagagaaacagaaggaatacattgcgtgtttgagaaacgagcgcgacatgctcagggaagagcttgccgatctccaagagactgtaaagaccggagagaaacatggacttgtgataatccccgacggaaccccgaacggtgatgtctctcatgagccagtggcgggagctattaccgtggtttcgcaggaagcagcacaagtgctcgaaagcgccggagagggaccgctggacgtgcgactccgaaaactcgcaggtgagaaggaggagttgctgagccagatccggaagctgaagttgcagctcgaggaggaaagacaaaagtgctcccggaatgatggaaccgtgggggacctcgcaggattacagaacggttcagacctgcagttcatcgaaatgcagagagatgccaatagacaaatcagcgagtacaagtttaagctctctaaagctgagcaggacatcacaacactggagcagagtattagtagactagagggacaggttctgaggtacaagactgctgccgagaatgcggagaaggttgaggacgagctgaaagcagagaaaagaaaactccagagagagcttaggaccgcgctggataaaatcgaggaaatggagatgaccaacagccacctggctaagagactggagaagatgaaagcgaaccgcacagccttgctggcccagcagtag

SEQ ID NO: 163828 - DNA, 2166 bp, Artificial Sequence
  derived and/or modified sequence
atgggcacccccgccagcggcagaaagagaacccccgtgaaggacagattcagcgccgaggacgaggccctgagcaacatcgccagagaggccgaggccagactggccgccaagagagccgccagagccgaggccagagacatcagaatgagagagctggagagacagcagaaggagtacagcctgcacagcttcgacagaaagtggggccagatccagaagtggctggaggacagcgagagagccagatacagccacagaagcagccaccacagaccctacctgggcgtggaggacgccctgagcatcagaagcgtgggcagccacagatacgacatgttcaaggacagaagcagcagactgagcagcctgaaccacagctacagccacagccacggcatgaagaagagaagcagcgacagccacaaggacctgctgagcggcctgtacttcgaccagagaaactacagcagcctgagacacagcaagcccaccagcgcctactacaccagacagagcagcagcctgtacagcgaccccctggccacctacaagagcgacagagccagccccaccgccaacagcggcctgctgagaagcgccagcctggccagcctgtacaacggcggcctgtacaacccctacggccccagaacccccagcgagtgcagctactacagcagcagaatcagcagcgccagaagcagccccggcttcaccaacgacgacaccgccagcatcgtgagcagcgacagagccagcagaggcagaagagagagcgtggtgagcgccgccgactacttcagcagaagcaacagaagaggcagcgtggtgagcgaggtggacgacatcagcatccccgacctgagcagcctggacgagaagagcgacaagcagtacgccgagaactacaccagacccagcagcagaaacagcgccagcgccaccacccccctgagcggcaacagcagcagaagaggcagcggcgacaccagcagcctgatcgaccccgacaccagcctgagcgagctgagagacatctacgacctgaaggaccagatccaggacgtggagggcagatacatgcagggcctgaaggagctgaaggagagcctgagcgaggtggaggagaagtacaagaaggccatggtgagcaacgcccagctggacaacgagaagaacaacctgatctaccaggtggacaccctgaaggacgtgatcgaggagcaggaggagcagatggccgagttctacagagagaacgaggagaagagcaaggagctggagagacagaagcacatgtgcagcgtgctgcagcacaagatggaggagctgaaggagggcctgagacagagagacgagctgatcgaggagaagcagagaatgcagcagaagatcgacaccatgaccaaggaggtgttcgacctgcaggagaccctgctgtggaaggacaagaagatcggcgccctggagaagcagaaggagtacatcgcctgcctgagaaacgagagagacatgctgagagaggagctggccgacctgcaggagaccgtgaagaccggcgagaagcacggcctggtgatcatccccgacggcacccccaacggcgacgtgagccacgagcccgtggccggcgccatcaccgtggtgagccaggaggccgcccaggtgctggagagcgccggcgagggccccctggacgtgagactgagaaagctggccggcgagaaggaggagctgctgagccagatcagaaagctgaagctgcagctggaggaggagagacagaagtgcagcagaaacgacggcaccgtgggcgacctggccggcctgcagaacggcagcgacctgcagttcatcgagatgcagagagacgccaacagacagatcagcgagtacaagttcaagctgagcaaggccgagcaggacatcaccaccctggagcagagcatcagcagactggagggccaggtgctgagatacaagaccgccgccgagaacgccgagaaggtggaggacgagctgaaggccgagaagagaaagctgcagagagagctgagaaccgccctggacaagatcgaggagatggagatgaccaacagccacctggccaagagactggagaagatgaaggccaacagaaccgccctgctggcccagcagtag

SEQ ID NO: 163829 - protein, 478 aa, Artificial Sequence
  derived and/or modified sequence
MWLAAAAPSLARRLLFLGPPPPPLLLLVFSRSSRRRLHSLGLAAMPEKRPFERLPADVSPINCSLCLKPDLLDFTFEGKLEAAAQVRQATNQIVMNCADIDIITASYAPEGDEEIHATGFNYQNEDEKVTLSFPSTLQTGTGTLKIDFVGELNDKMKGFYRSKYTTPSGEVRYAAVTQFEATDARRAFPCWDEPAIKATFDISLVVPKDRVALSNMNVIDRKPYPDDENLVEVKFARTPVTSTYLVAFVVGEYDFVETRSKDGVCVCVYTPVGKAEQGKFAIEVAAKTLPFYKDYFNVPYPLPKIDLIAIADFAAGAMENWDLVTYRETALLIDPKNSCSSSRQWVALVVGHELAHQWFGNLVTMEWWTHLWLNEGFASWIEYLCVDHCFPEYDIWTQFVSADYTRAQELDALDNSHPIEVSVGHPSEVDEIFDAISYSKGASVIRMLHDYIGDKDFKKGMNMYLTKFQQKNAAAGNL

SEQ ID NO: 163830 - protein, 324 aa, Artificial Sequence
  derived and/or modified sequence
MKGFYRSKYTTPSGEVRYAAVTQFEATDARRAFPCWDEPAIKATFDISLVVPKDRVALSNMNVIDRKPYPDDENLVEVKFARTPVTSTYLVAFVVGEYDFVETRSKDGVCVCVYTPVGKAEQGKFAIEVAAKTLPFYKDYFNVPYPLPKIDLIAIADFAAGAMENWDLVTYRETALLIDPKNSCSSSRQWVALVVGHELAHQWFGNLVTMEWWTHLWLNEGFASWIEYLCVDHCFPEYDIWTQFVSADYTRAQELDALDNSHPIEVSVGHPSEVDEIFDAISYSKGASVIRMLHDYIGDKDFKKGMNMYLTKFQQKNAAAGWTW

SEQ ID NO: 163831 - protein, 919 aa, Artificial Sequence
  derived and/or modified sequence
MWLAAAAPSLARRLLFLGPPPPPLLLLVFSRSSRRRLHSLGLAAMPEKRPFERLPADVSPINYSLCLKPDLLDFTFEGKLEAAAQVRQATNQIVMNCADIDIITASYAPEGDEEIHATGFNYQNEDEKVTLSFPSTLQTGTGTLKIDFVGELNDKMKGFYRSKYTTPSGEVRYAAVTQFEATDARRAFPCWDEPAIKATFDISLVVPKDRVALSNMNVIDRKPYPDDENLVEVKFARTPVMSTYLVAFVVGEYDFVETRSKDGVCVRVYTPVGKAEQGKFALEVAAKTLPFYKDYFNVPYPLPKIDLIAIADFAAGAMENWGLVTYRETALLIDPKNSCSSSRQWVALVVGHELAHQWFGNLVTMEWWTHLWLNEGFASWIEYLCVDHCFPEYDIWTQFVSADYTRAQELDALDNSHPIEVSVGHPSEVDEIFDAISYSKGASVIRMLHDYIGDKDFKKGMNMYLTKFQQKNAATEDLWESLENASGKPIAAVMNTWTKQMGFPLIYVEAEQVEDDRLLRLSQKKFCAGGSYVGEDCPQWMVPITISTSEDPNQAKLKILMDKPEMNVVLKNVKPDQWVKLNLGTVGFYRTQYSSAMLESLLPGIRDLSLPPVDRLGLQNDLFSLARAGIISTVEVLKVMEAFVNEPNYTVWSDLSCNLGILSTLLSHTDFYEEIQEFVKDVFSPIGERLGWDPKPGEGHLDALLRGLVLGKLGKAGHKATLEEARRRFKDHVEGKQILSADLRSPVYLTVLKHGDGTTLDIMLKLHKQADMQEEKNRIERVLGATLLPDLIQKVLTFALSEEVRPQDTVSVIGGVAGGSKHGRKAAWKFIKDNWEELYNRYQGGFLISRLIKLSVEGFAVDKMAGEVKAFFESHPAPSAERTIQQCCENILLNAAWLKRDAESIHQYLLQRKASPPTV

SEQ ID NO: 163832 - protein, 627 aa, Artificial Sequence
  derived and/or modified sequence
MWLAAAAPSLARRLLFLGPPPPPLLLLVFSRSSRRRLHSLGLADVSPINYSLCLKPDLLDFTFEGKLEAAAQVRQATNQIVMNCADIDIITASYAPEGDEEIHATGFNYQNEDEKVTLSFPSTLQTGTGTLKIDFVGELNDKMKGFYRSKYTTPSGEVRYAAVTQFEATDARRAFPCWDEPAIKATFDISLVVPKDRVALSNMNVIDRKPYPDDENLVEVKFARTPVMSTYLVAFVVGEYDFVETRSKDGVCVRVYTPVGKAEQGKFALEVAAKTLPFYKDYFNVPYPLPKIDLIAIADFAAGAMENWGLVTYRETALLIDPKNSCSSSRQWVALVVGHELAHQWFGNLVTMEWWTHLWLNEGFASWIEYLCVDHCFPEYDIWTQFVSADYTRAQELDALDNSHPIEVSVGHPSEVDEIFDAISYSKGASVIRMLHDYIGDKDFKKGMNMYLTKFQQKNAATEDLWESLENASGKPIAAVMNTWTKQMGFPLIYVEAEQVEDDRLLRLSQKKFCAGGSYVGEDCPQWMVPITISTSEDPNQAKLKILMDKPEMNVVLKNVKPDQWVKLNLGTVGFYRTQYSSAMLESLLPGIRDLSLPPVDRLGLQNDLFSLFILCVREVSGNCCRA

SEQ ID NO: 163833 - protein, 839 aa, Artificial Sequence
  derived and/or modified sequence
MPEKRPFERLPADVSPINYSLCLKPDLLDFTFEGKLEAAAQVRQATNQIVMNCADIDIITASYAPEGDEEIHATGFNYQNEDEKVTLSFPSTLQTGTGTLKIDFVGELNDKMKGFYRSKYTTPSGEVRYAAVTQFENVIDRKPYPDDENLVEVKFARTPVMSTYLVAFVVGEYDFVETRSKDGVCVRVYTPVGKAEQGKFALEVAAKTLPFYKDYFNVPYPLPKIDLIAIADFAAGAMENWGLVTYRETALLIDPKNSCSSSRQWVALVVGHELAHQWFGNLVTMEWWTHLWLNEGFASWIEYLCVDHCFPEYDIWTQFVSADYTRAQELDALDNSHPIEVSVGHPSEVDEIFDAISYSKGASVIRMLHDYIGDKDFKKGMNMYLTKFQQKNAATEDLWESLENASGKPIAAVMNTWTKQMGFPLIYVEAEQVEDDRLLRLSQKKFCAGGSYVGEDCPQWMVPITISTSEDPNQAKLKILMDKPEMNVVLKNVKPDQWVKLNLGTVGFYRTQYSSAMLESLLPGIRDLSLPPVDRLGLQNDLFSLARAGIISTVEVLKVMEAFVNEPNYTVWSDLSCNLGILSTLLSHTDFYEEIQEFVKDVFSPIGERLGWDPKPGEGHLDALLRGLVLGKLGKAGHKATLEEARRRFKDHVEGKQILSADLRSPVYLTVLKHGDGTTLDIMLKLHKQADMQEEKNRIERVLGATLLPDLIQKVLTFALSEEVRPQDTVSVIGGVAGGSKHGRKAAWKFIKDNWEELYNRYQGGFLISRLIKLSVEGFAVDKMAGEVKAFFESHPAPSAERTIQQCCENILLNAAWLKRDAESIHQYLLQRKASPPTV

SEQ ID NO: 163834 - protein, 2440 aa, Artificial Sequence
  derived and/or modified sequence
MSSSGYPPNQGAFSTEQSRYPPHSVQYTFPNTRHQQEFAVPDYRSSHLEVSQASQLLQQQQQQQLRRRPSLLSEFHPGSDRPQERRTSYEPFHPGPSPVDHDSLESKRPRLEQVSDSHFQRVSAAVLPLVHPLPEGLRASADAKKDPAFGGKHEAPSSPISGQPCGDDQNASPSKLSKEELIQSMDRVDREIAKVEQQILKLKKKQQQLEEEAAKPPEPEKPVSPPPVEQKHRSIVQIIYDENRKKAEEAHKIFEGLGPKVELPLYNQPSDTKVYHENIKTNQVMRKKLILFFKRRNHARKQREQKICQRYDQLMEAWEKKVDRIENNPRRKAKESKTREYYEKQFPEIRKQREQQERFQRVGQRGAGLSATIARSEHEISEIIDGLSEQENNEKQMRQLSVIPPMMFDAEQRRVKFINMNGLMEDPMKVYKDRQFMNVWTDHEKEIFKDKFIQHPKNFGLIASYLERKSVPDCVLYYYLTKKNENYKALVRRNYGKRRGRNQQIARPSQEEKVEEKEEDKAEKTEKKEEEKKDEEEKDEKEDSKENTKEKDKIDGTAEETEEREQATPRGRKTANSQGRRKGRITRSMTNEAAAASAAAAAATEEPPPPLPPPPEPISTEPVETSRWTEEEMEVAKKGLVEHGRNWAAIAKMVGTKSEAQCKNFYFNYKRRHNLDNLLQQHKQKTSRKPREERDVSQCESVASTVSAQEDEDIEASNEEENPEDSEVEAVKPSEDSPENATSRGNTEPAVELEPTTETAPSTSPSLAVPSTKPAEDESVETQVNDSISAETAEQMDVDQQEHSAEEGSVCDPPPATKADSVDVEVRVPENHASKVEGDNTKERDLDRASEKVEPRDEDLVVAQQINAQRPEPQSDNDSSATCSADEDVDGEPERQRMFPMDSKPSLLNPTGSILVSSPLKPNPLDLPQLQHRAAVIPPMVSCTPCNIPIGTPVSGYALYQRHIKAMHESALLEEQRQRQEQIDLECRSSTSPCGTSKSPNREWEVLQPAPHQVITNLPEGVRLPTTRPTRPPPPLIPSSKTTVASEKPSFIMGGSISQGTPGTYLTSHNQASYTQETPKPSVGSISLGLPRQQESAKSATLPYIKQEEFSPRSQNSQPEGLLVRAQHEGVVRGTAGAIQEGSITRGTPTSKISVESIPSLRGSITQGTPALPQTGIPTEALVKGSISRMPIEDSSPEKGREEAASKGHVIYEGKSGHILSYDNIKNAREGTRSPRTAHEISLKRSYESVEGNIKQGMSMRESPVSAPLEGLICRALPRGSPHSDLKERTVLSGSIMQGTPRATTESFEDGLKYPKQIKRESPPIRAFEGAITKGKPYDGITTIKEMGRSIHEIPRQDILTQESRKTPEVVQSTRPIIEGSISQGTPIKFDNNSGQSAIKHNVKSLITGPSKLSRGMPPLEIVPENIKVVERGKYEDVKAGETVRSRHTSVVSSGPSVLRSTLHEAPKAQLSPGIYDDTSARRTPVSYQNTMSRGSPMMNRTSDVTISSNKSTNHERKSTLTPTQRESIPAKSPVPGVDPVVSHSPFDPHHRGSTAGEVYRSHLPTHLDPAMPFHRALDPAAAAYLFQRQLSPTPGYPSQYQLYAMENTRQTILNDYITSQQMQVNLRPDVARGLSPREQPLGLPYPATRGIIDLTNMPPTILVPHPGGTSTPPMDRITYIPGTQITFPPRPYNSASMSPGHPTHLAAAASAEREREREREKERERERIAAASSDLYLRPGSEQPGRPGSHGYVRSPSPSVRTQETMLQQRPSVFQGTNGTSVITPLDPTAQLRIMPLPAGGPSISQGLPASRYNTAADALAALVDAAASAPQMDVSKTKESKHEAARLEENLRSRSAAVSEQQQLEQKTLEVEKRSVQCLYTSSAFPSGKPQPHSSVVYSEAGKDKGPPPKSRYEEELRTRGKTTITAANFIDVIITRQIASDKDARERGSQSSDSSSSLSSHRYETPSDAIEVISPASSPAPPQEKLQTYQPEVVKANQAENDPTRQYEGPLHHYRPQQESPSPQQQLPPSSQAEGMGQVPRTHRLITLADHICQIITQDFARNQVSSQTPQQPPTSTFQNSPSALVSTPVRTKTSNRYSPESQAQSVHHQRPGSRVSPENLVDKSRGSRPGKSPERSHVSSEPYEPISPPQVPVVHEKQDSLLLLSQRGAEPAEQRNDARSPGSISYLPSFFTKLENTSPMVKSKKQEIFRKLNSSGGGDSDMAAAQPGTEIFNLPAVTTSGSVSSRGHSFADPASNLGLEDIIRKALMGSFDDKVEDHGVVMSQPMGVVPGTANTSVVTSGETRREEGDPSPHSGGVCKPKLISKSNSRKSKSPIPGQGYLGTERPSSVSSVHSEGDYHRQTPGWAWEDRPSSTGSTQFPYNPLTMRMLSSTPPTPIACAPSAVNQAAPHQQNRIWEREPAPLLSAQYETLSDSDD

SEQ ID NO: 163835 - protein, 1024 aa, Artificial Sequence
  derived and/or modified sequence
MPPLEIVPENIKVVERGKYEDVKAGETVRSRHTSVVSSGPSVLRSTLHEAPKAQLSPGIYDDTSARRTPVSYQNTMSRGSPMMNRTSDVTISSNKSTNHERKSTLTPTQRESIPAKSPVPGVDPVVSHSPFDPHHRGSTAGEVYRSHLPTHLDPAMPFHRALDPAAAAYLFQRQLSPTPGYPSQYQLYAMENTRQTILNDYITSQQMQVNLRPDVARGLSPREQPLGLPYPATRGIIDLTNMPPTILVPHPGGTSTPPMDRITYIPGTQITFPPRPYNSASMSPGHPTHLAAAASAEREREREREKERERERIAAASSDLYLRPGSEQPGRPGSHGYVRSPSPSVRTQETMLQQRPSVFQGTNGTSVITPLDPTAQLRIMPLPAGGPSISQGLPASRYNTAADALAALVDAAASAPQMDVSKTKESKHEAARLEENLRSRSAAVSEQQQLEQKTLEVEKRSVQCLYTSSAFPSGKPQPHSSVVYSEAGKDKGPPPKSRYEEELRTRGKTTITAANFIDVIITRQIASDKDARERGSQSSDSSSSLSSHRYETPSDAIEVISPASSPAPPQEKLQTYQPEVVKANQAENDPTRQYEGPLHHYRPQQESPSPQQQLPPSSQAEGMGQVPRTHRLITLADHICQIITQDFARNQVSSQTPQQPPTSTFQNSPSALVSTPVRTKTSNRYSPESQAQSVHHQRPGSRVSPENLVDKSRGSRPGKSPERSHVSSEPYEPISPPQVPVVHEKQDSLLLLSQRGAEPAEQRNDARSPGSISYLPSFFTKLENTSPMVKSKKQEIFRKLNSSGGGDSDMAAAQPGTEIFNLPAVTTSGSVSSRGHSFADPASNLGLEDIIRKALMGSFDDKVEDHGVVMSQPMGVVPGTANTSVVTSGETRREEGDPSPHSGGVCKPKLISKSNSRKSKSPIPGQGYLGTERPSSVSSVHSEGDYHRQTPGWAWEDRPSSTGSTQFPYNPLTMRMLSSTPPTPIACAPSAVNQAAPHQQNRIWEREPAPLLSAQYETLSDSDD

SEQ ID NO: 163836 - DNA, 7323 bp, Artificial Sequence
  derived and/or modified sequence
atgtccagttccggttaccccccaaatcagggcgccttctccaccgaacagagccgatatcctccacactccgtgcagtatacatttccgaatacacgtcaccaacaggagtttgccgtgccagactacaggtcttcacatttggaagtgagtcaggcatcgcaactgctgcaacaacagcagcagcagcagttgcggcgccggccttccttactgtcagaatttcaccctgggtccgaccgcccacaagaaagaagaaccagctacgaaccttttcatcccgggccttcccctgtggaccacgattcactggaaagcaaacgaccccgtcttgagcaggtgtcagactcccactttcagcgcgtgtctgccgcagtccttcctctggtgcatccgctcccagagggattgagggccagtgccgacgcgaagaaggacccagcctttggcggtaaacatgaggccccaagctcacccattagcggccagccatgcggggatgatcaaaatgcttcacctagtaaactttcaaaagaggagctcatacagtccatggaccgtgtggatagagaaatagctaaggtcgaacaacagatcttgaaactgaaaaaaaagcagcagcagctcgaggaggaggctgctaagccccccgagcccgaaaagcccgtatccccccctcctgtcgaacagaagcataggtccatcgtgcagataatttacgatgaaaatcgcaaaaaagcggaagaggcccataagatattcgaaggactgggtcccaaggtggaacttccgctgtataaccagcccagcgacactaaggtctatcatgagaatatcaaaaccaaccaggttatgagaaaaaaactgatcctcttcttcaagcggcggaaccacgcccgtaaacagagagaacagaaaatatgtcaaaggtacgatcagctgatggaggcatgggagaagaaggtggatcgcatcgagaataatcccagaagaaaagccaaggagtctaaaacgcgtgagtattatgagaagcagtttcccgagatccgtaaacagagggagcagcaggaacggtttcaacgggtcggacagcgcggagcaggcctttccgccactatcgcccggagcgaacacgagattagcgaaatcatagatggactatctgaacaagaaaacaacgagaaacagatgaggcagctctccgtaatccccccaatgatgttcgacgcagagcagcggagagtcaagtttatcaacatgaatggactgatggaagaccccatgaaggtctataaagatcgacagttcatgaacgtatggactgatcacgagaaggaaattttcaaggataagtttatccagcacccaaagaatttcggcctgatcgcctcctacttggagcgtaaatcggtgcccgactgcgtactgtattactaccttaccaagaaaaacgagaactacaaagcactggtgagacgcaattatggcaagcgtcgtggccggaatcagcagattgccaggccctctcaagaggagaaagtggaggaaaaagaagaggataaagctgaaaagacggaaaagaaggaggaggaaaagaaggatgaggaagaaaaagatgaaaaggaggattcaaaagaaaatactaaggagaaggataagatcgatgggaccgcagaggagactgaggaacgcgagcaagcgacacccaggggccggaaaactgccaatagtcaggggcggagaaagggacgtattacccgctctatgacaaatgaggccgcagctgcctctgctgccgcggccgccgccactgaggaaccccctccacccctgcctccacctcccgaacctatctcgacggagccagtggagacctctcgatggacagaggaggaaatggaagtggccaagaagggacttgtagaacatgggaggaactgggcagccatcgccaaaatggtcggcactaagtccgaggcacagtgcaaaaacttctattttaactacaagcggaggcataacctagataacctcctgcagcagcacaagcaaaaaacctcaagaaagccccgggaggaacgggatgttagccaatgcgaatccgttgcatcaaccgtctccgcccaggaagacgaggacattgaagcgagcaacgaggaagaaaatccagaagatagtgaggttgaggctgtcaagccaagtgaagactcaccggagaatgccacatcaagggggaacaccgagccagcagtagaacttgaaccgactacggagaccgcaccttcaacctccccctccctggcggtaccctccacgaaaccggcagaggatgagtccgtcgaaactcaggtgaatgactctatctccgctgagacagccgaacagatggacgtcgaccagcaagagcacagtgcagaagaaggtagtgtgtgtgaccctcccccggccacaaaggcagattcagtggatgtagaagtgcgagtgcccgagaatcacgcgtcaaaggtcgagggcgataatacaaaagagagagacctggaccgagcaagcgagaaagtggagcccagggacgaggatttagtggtcgcacaacagataaacgcgcaacgaccggagccccagagcgacaacgattcctccgctacttgttccgcggacgaggatgtcgacggtgaacctgaacgacagcgcatgttcccaatggatagcaaaccaagtttgctaaatccaaccggtagcattctggtttctagtcccctgaagcccaacccgctggatctgccccagctgcagcatcgagcagccgtgataccacccatggttagctgtaccccttgcaacatccctattggcactcccgtttcaggctatgctctgtaccagcggcatatcaaggcaatgcacgagagcgcgctgcttgaagaacagcggcaaaggcaagaacagatcgatctggaatgccgcagctctacctccccctgtggcacaagcaaaagcccaaatagggagtgggaggtgcttcagccagctccccaccaggtaatcaccaacctccccgagggggttagactgcccactactcgccctactcgtcctccccctcctttaatcccctcctccaaaaccactgtggcctcagagaagccctccttcattatggggggctccatcagccagggtacacctggaacctatctgactagtcacaatcaggcctcatacactcaggagactccaaagcctagtgtgggcagcatttccctgggcctaccaaggcagcaggagagcgccaagagcgccaccctgccatatatcaaacaagaggaattttccccacgcagccagaattcccagcctgagggcctgctggttagagctcagcatgagggagtcgtgaggggtactgctggggctatccaggaaggcagcatcacgagggggacgcctactagtaaaatttcagtggagagtattccctctctgcgggggtcaataacacaggggacgccagcattgcctcagacaggtattccgaccgaggccctagtcaagggctcaatcagtcggatgccaatcgaggattcctcccctgaaaaaggccgcgaagaggccgcttctaagggccacgttatctatgagggaaaatctgggcacatactctcctatgacaacatcaagaatgccagagagggtacccggtcgcccagaaccgcccacgagatctccctgaagaggagctacgaaagcgttgagggtaacataaagcagggaatgtctatgcgcgagtcccctgtgagtgcgcctttggagggtctgatctgccgcgccctgcctcgagggagtccccattcagacttaaaagaaaggaccgtgctatccggatctatcatgcaagggactccgagggctacgacagaatccttcgaagatggactgaagtaccccaaacagataaagcgcgaatcaccacctataagagccttcgagggggcaattaccaagggcaagccctatgatgggatcacgacaattaaggagatggggcgtagcatacatgagattccgcgacaagatatcctgactcaggagtctcgaaaaaccccagaggtggtccagtcgaccagaccaattatcgaaggtagcatttcccagggaactccgattaagttcgataacaattccggacagtccgcgattaagcataacgtgaaatctctgattactggccccagcaagctgtcccggggcatgcctccactggagatcgtccctgagaatattaaggtggtggagagaggtaagtacgaggacgtgaaggctggggagactgttcgatcgcggcacacgtccgtggtgtcatccggtcctagcgtgttacggagcacattgcatgaagcccctaaagcccagctgagccccgggatatatgacgataccagcgctaggaggacacccgtgagctaccagaacacaatgtcacgtggatccccaatgatgaatagaaccagcgacgtgaccatatcaagcaataagtctaccaaccatgagaggaagagcacattgaccccaacgcaacgggagtcaattcctgcgaagtctccggtgccaggcgtggaccctgtggtgtctcattccccattcgatcctcaccatcggggatccactgccggggaggtttacagaagccatctcccaacgcatttggacccagctatgccttttcaccgcgccctggaccctgctgccgcagcctaccttttccagaggcagctctccccaacacctgggtatccgtcccagtatcagctgtacgccatggagaatacaagacagactatcctcaatgactatataacctcacagcagatgcaggtaaacctccgcccagatgtggcccggggcctaagccctcgggagcagccactggggcttccatatcctgccactagaggtatcatagacctgactaatatgccacctactattctggtgccccacccaggcggaacatcaacccccccaatggacagaattacctacatccctggcacacaaatcaccttcccaccaaggccatacaatagtgcgtctatgtcaccaggacacccgacacatctagctgccgctgcctccgccgagagagagcgcgagagagaacgagagaaggaaagagagcgagaacgcattgcagcagcttcatcagacttatacctcaggccagggtccgagcagccaggacgtcccgggagccacggctatgtgagaagccccagcccaagcgtacgaactcaagagaccatgctgcagcagagaccgtccgtatttcaaggcacaaacggcacaagtgtcatcaccccgttggacccaaccgcgcagctgagaatcatgcctttgcccgccggcggcccatctattagccagggcctaccagcatcccgttacaacacggcggctgatgccctggcggccttggtggatgctgcagccagcgcgccgcagatggacgtctcaaagaccaaggagtctaaacacgaggcagctagattagaggaaaatctgagatcacggtctgccgccgtttccgagcagcagcagctggaacagaagactcttgaagtagaaaagcgatctgtgcaatgcctctacacctcctccgcctttcccagtggaaaaccgcaaccacattctagtgtggtttattccgaagccggaaaagataagggtccacctccgaagtccaggtatgaagaagagcttcgcacccgcggcaagacaacaatcacagctgcaaactttattgatgtaattatcacccggcaaatagcttccgacaaggacgctagggaacgcggcagtcaaagtagcgactccagcagttctctgtcatcgcatagatacgagacccccagcgacgctatcgaagtgatttcccctgcctcatcacctgcaccaccacaggaaaagctgcagacctaccagcctgaggtagtgaaggcaaatcaagctgagaatgaccctactcggcaatatgaaggtccacttcaccactataggcctcaacaggaatctcccagcccccagcagcagctccctccatccagccaggccgaaggcatgggtcaggttccccgtactcatcggctgataaccttggctgatcatatctgtcaaatcatcacgcaggattttgccagaaatcaagtgtcctcacaaacaccccagcagcctccgacatctacttttcaaaattccccctccgccttagttagcactcccgtgcggaccaaaacatccaaccggtacagtcccgaatcccaagcacaatcagtgcatcatcaacggcccggctcaagggtctcaccagaaaatctcgtcgacaagtcgagagggagccggccaggcaagagccctgaacgctcacatgtgtcaagcgaaccatacgaacccatttctccaccgcaggtcccggtggtacacgaaaagcaggattccctactgctactttcacagcggggtgccgagcctgccgaacagcgcaacgacgctcggtctcctggctccatcagctaccttccttccttcttcaccaagctcgagaacacatctcctatggtgaaatccaagaaacaagagatctttaggaagctcaattccagcggggggggggattccgatatggcagccgctcagcctgggacagagattttcaaccttccagccgtgacgacgtccggctccgtgtcctcaagagggcatagttttgcggatccagccagcaatctggggcttgaagatataataaggaaggctctgatgggatcgtttgatgataaggtagaggatcatggcgtggtgatgagccaacccatgggtgtagttcccggaaccgctaatactagtgtcgtaactagtggagagacaagaagagaagagggagatcccagcccacattccgggggggtgtgtaagcctaagctgatttccaagagtaattctcggaaatcaaaatcccctatacctgggcagggttatctgggcacggaaagaccatcatctgtctcctctgttcattcagagggcgattaccacaggcagaccccgggctgggcatgggaggatcgcccaagtagcaccggttccactcaattcccttacaatcccttgacaatgcgtatgttgagcagcactccccctacgccaatcgcatgtgccccttcagctgttaaccaggccgcacctcatcagcagaatcgcatctgggaacgagagcccgctcccttgctgtcagcccagtacgagaccctgtcagatagtgatgactag

SEQ ID NO: 163837 - DNA, 7323 bp, Artificial Sequence
  derived and/or modified sequence
atgagcagcagcggctacccacccaaccagggcgccttcagcacagagcagagccgctacccaccccacagcgtgcagtacaccttccccaacaccaggcaccagcaggagtttgctgtgcctgactaccgcagcagccacctggaggtgtcccaggccagccagctgctgcagcagcagcagcagcagcagctgcggcggcggcccagcctgctgtctgagttccaccctggcagtgaccggccccaggagaggaggaccagctatgagcccttccaccctggccccagccctgtggaccatgacagcctggagagcaagaggccccggctggagcaggtgtctgacagccacttccagagggtgtctgctgctgtgctgcccctggtgcaccccctgcctgagggcctgcgggccagcgcagatgccaagaaggaccctgcctttggaggcaagcatgaggcccccagcagccccatcagcggccagccctgtggagatgaccagaatgccagccccagcaagctgagcaaggaggagctgatccagagcatggacagagtggaccgggagatcgccaaggtggagcagcagatcctgaagctgaagaagaagcagcagcagctggaggaggaggccgccaagcccccagagcctgagaagcctgtgtccccacctcctgtggagcagaagcacaggagcatcgtgcagatcatctatgatgagaacaggaagaaggccgaggaggcccacaagatctttgagggcctgggccccaaggtggagctgcccctgtacaaccagcccagcgacaccaaggtgtaccacgagaacatcaagaccaaccaggtgatgaggaagaagctgatcctcttcttcaagagaagaaaccacgccaggaagcagcgggagcagaagatctgccagagatatgaccagctgatggaggcctgggagaagaaggtggacagaattgagaacaaccccaggaggaaggccaaggagagcaagacccgggagtactatgagaagcagtttcctgagatcaggaagcagcgggagcagcaggagcgcttccagagggtgggccagagaggagctggcctgagcgccaccatcgcccggtctgagcacgagatcagcgagatcattgatggcctgtctgagcaggagaacaatgagaagcagatgaggcagctgagcgtcatcccccccatgatgtttgatgctgagcagaggagagtgaagttcatcaacatgaatggcctgatggaggaccccatgaaggtgtacaaggaccggcagttcatgaatgtgtggacagaccacgagaaggagatcttcaaggacaagttcatccagcaccccaagaactttggcctcatcgccagctacctggagaggaagtctgtgcctgactgtgtgctgtactactacctgaccaagaagaatgaaaactacaaggccctggtgagaagaaattatggcaagaggcggggcaggaaccagcagatcgcccggcccagccaggaggagaaggtggaggagaaggaggaggacaaggccgagaagacagagaagaaggaggaggagaagaaggatgaggaggagaaggatgagaaggaggacagcaaggagaacaccaaggagaaggacaagattgatggaacagctgaggagacagaggagcgggagcaggccaccccccggggcaggaagacagccaacagccagggccgcaggaagggccgcatcaccaggtccatgaccaatgaagctgctgctgccagcgctgctgctgctgctgccacagaggagcccccaccacccctgcccccacctcctgagcccatcagcacagagcctgtggagaccagccgctggacagaggaggagatggaggtggccaagaagggcctggtggagcacggcaggaactgggccgccatcgccaagatggtgggcaccaagtctgaggcccagtgcaagaacttctacttcaactacaagagaagacacaacctggacaacctgctgcagcagcacaagcagaagaccagcaggaagccccgggaggagagagatgtgtcccagtgtgagagcgtggccagcacagtgtctgcccaggaggatgaggacatcgaggccagcaatgaggaggagaaccctgaggacagcgaggtggaggccgtgaagcccagcgaggacagcccagaaaatgccaccagccggggcaacacagagcctgctgtggagctggagcccaccacagaaacagcccccagcaccagccccagcctggccgtgcccagcaccaagccagcagaagatgaatctgtggagacccaggtgaatgacagcatctctgctgagacagctgagcagatggatgtggaccagcaggagcacagcgctgaggagggctctgtgtgtgaccccccaccagccaccaaggctgacagcgtggatgtggaggtgcgggtgcctgagaaccacgccagcaaggtggagggggacaacaccaaggagcgggacctggaccgggccagcgagaaggtggagcccagagatgaggacctggtggtggcccagcagatcaatgcccagaggcctgagccccagagcgacaatgacagcagcgccacctgcagcgcagatgaagatgtggatggagagcctgagcggcagaggatgttccccatggacagcaagcccagcctgctgaaccccaccggcagcatcctggtgagcagccccctgaagcccaaccccctggacctgccccagctgcagcacagagctgctgtgatcccccccatggtgtcctgcaccccctgcaacatccccatcggcacccctgtgtctggctacgccctgtaccagaggcacatcaaggccatgcatgagagcgccctgctggaggagcagaggcagaggcaggagcagattgacctggagtgccgcagcagcaccagcccctgtggcaccagcaagagccccaaccgggagtgggaggtgctgcagcctgccccccaccaggtgatcaccaacctgcctgagggcgtgcggctgcccaccacccggcccacccggcccccaccacccctcatccccagcagcaagaccaccgtggccagcgagaagcccagcttcatcatgggcggcagcatcagccagggcaccccaggcacctacctgaccagccacaaccaggccagctacacccaggagacccccaagcccagcgtgggcagcatcagcctgggcctgccccggcagcaggagagcgccaagagcgccaccctgccctacatcaagcaggaggagttcagccccaggagccagaacagccagcctgagggcctgctggtgcgggcccagcacgagggcgtggtgcggggcacagctggggccatccaggagggcagcatcacccggggcacccccaccagcaagatctctgtggagagcatccccagcctgcggggcagcatcacccagggcaccccagccctgccccagacaggcatccccacagaggccctggtgaagggcagcatcagcaggatgcccatcgaggacagcagccctgagaagggccgggaggaggccgccagcaaaggacatgtgatctatgagggcaagagcggccacatcctgtcctatgacaacatcaagaatgcccgggagggcaccaggagccccaggacagcccacgagatcagcctgaagaggagctatgaatctgtggagggcaacatcaagcagggcatgtccatgagggagagccctgtgtctgcccccctggagggcctcatctgccgggccctgccccggggcagcccccacagcgacctgaaggagaggacagtgctgagcggcagcatcatgcagggcaccccccgggccaccacagagagctttgaagatggcctgaagtaccccaagcagatcaagcgggagagcccccccatccgggcctttgagggcgccatcaccaagggcaagccctatgatggcatcaccaccatcaaggagatgggccgcagcatccacgagatcccccggcaggacatcctgacccaggagagcaggaagaccccagaggtggtgcagagcacccggcccatcatcgagggcagcatcagccagggcacccccatcaagtttgacaacaacagcggccagagcgccatcaagcacaacgtgaagagcctcatcaccggccccagcaagctgagccggggcatgccacccctggagatcgtgcctgagaacatcaaggtggtggagcggggcaagtatgaagatgtgaaggccggggagaccgtgcgcagccgccacacctctgtggtgagcagcggccccagcgtgctgcggagcaccctgcacgaggcccccaaggcccagctgagccctggcatctatgatgacaccagcgcccggaggacccctgtgtcctaccagaacaccatgagccggggcagccccatgatgaacagaacatctgatgtgaccatcagcagcaacaagagcaccaaccacgagaggaagagcaccctgacccccacccagcgggagagcatcccagccaagagccctgtgcctggggtggaccctgtggtgagccacagcccctttgacccccaccaccggggcagcacagctggggaggtgtaccgcagccacctgcccacccacctggaccctgccatgcccttccaccgggccctggaccctgctgctgctgcctacctgttccagaggcagctgagccccaccccaggctaccccagccagtaccagctgtatgccatggagaacacccggcagaccatcctgaatgactacatcaccagccagcagatgcaggtgaacctgcggccagatgtggcccggggcctgagcccccgggagcagcccctgggcctgccctacccagccacccggggcatcatcgacctgaccaacatgccacccaccatcctggtgccccaccctgggggcaccagcaccccacccatggaccgcatcacctacatccctggcacccagatcaccttccccccccggccctacaacagcgcctccatgagccctggccaccccacccacctggccgctgctgccagcgctgagcgggagcgggagcgggagcgggagaaggagcgggagcgggagagaattgctgctgccagcagtgacctgtacctgcggcccggcagcgagcagcccggccggcccggcagccacggctacgtgcgcagccccagccccagcgtgaggacccaggagaccatgctgcagcagaggccttctgtgttccagggcaccaacggcaccagcgtcatcacccccctggaccccacagcccagctgcgcatcatgcccctgcctgctgggggccccagcatcagccagggcctgcctgccagccgctacaacacagctgctgatgccctggccgccctggtggatgctgctgccagcgccccccagatggatgtgtccaagaccaaggagagcaagcatgaggccgcccggctggaggagaacctgcggagccgctctgctgctgtgtctgagcagcagcagctggagcagaagaccctggaggtggagaagaggtctgtgcagtgcctgtacaccagcagcgccttccccagcggcaagccccagccccacagctctgtggtgtacagcgaggccggcaaggacaagggccccccacccaagagccgctatgaggaggagctgcggacccggggcaagaccaccatcacagctgccaacttcattgatgtgatcatcacccggcagatcgccagtgacaaggatgcccgggagcggggcagccagagcagtgacagcagcagcagcctgagcagccacagatatgagacccccagtgatgccattgaagtcatcagccctgccagcagccctgccccaccccaggagaagctgcagacctaccagcctgaggtggtgaaggccaaccaggctgaaaatgaccccacccggcagtatgagggccccctgcaccactaccggccccagcaggagagccccagcccccagcagcagctgccccccagcagccaggccgagggcatgggccaggtgcccaggacccacaggctcatcaccctggccgaccacatctgccagatcatcacccaggactttgccaggaaccaggtgagcagccagaccccccagcagccccccaccagcaccttccagaacagccccagcgccctggtgtccacccctgtgaggaccaagaccagcaaccgctacagccctgagagccaggcccagagcgtgcaccaccagaggcctggcagccgggtgtccccagagaacctggtggacaagagccggggcagcaggcctgggaagagccctgagaggagccacgtgagcagcgagccctatgagcccatcagccccccccaggtgcctgtggtgcatgagaagcaggacagcctgctgctgctgagccagagaggagctgagcctgctgagcagagaaatgatgcccggagccctggcagcatctcctacctgcccagcttcttcaccaagctggagaacaccagccccatggtgaagagcaagaagcaggagatcttcaggaagctgaacagcagcggcggcggggacagcgacatggccgccgcccagcctggaacagagatcttcaacctgcctgctgtgaccaccagcggctctgtgagcagccggggccacagctttgctgaccctgccagcaacctgggcctggaggacatcatcaggaaggccctgatgggcagctttgatgacaaggtggaggaccacggcgtggtgatgagccagcccatgggcgtggtgcccggcacagccaacacctctgtggtgaccagcggggagacccggcgggaggagggggaccccagcccccacagcggcggcgtgtgcaagcccaagctgatcagcaagagcaacagcaggaagagcaagagccccatccctggccagggctacctgggcacagagcggcccagctctgtgtcctctgtgcacagcgagggggactaccaccggcagaccccaggctgggcctgggaggaccggcccagcagcacaggcagcacccagttcccctacaaccccctgaccatgaggatgctgagcagcaccccacccacccccatcgcctgtgcccccagcgctgtgaaccaggccgccccccaccagcagaaccgcatctgggagcgggagcccgcccccctgctgagcgcccagtatgagaccctgagtgacagtgatgactag

SEQ ID NO: 163838 - DNA, 7323 bp, Artificial Sequence
  derived and/or modified sequence
atgagcagcagcggctacccccccaaccagggcgccttcagcaccgaacagagccgctaccctccacactcagtccagtatacatttcctaataccaggcatcagcaagagtttgccgtgccagactatcgttccagtcatcttgaagtctcgcaggcaagccagttactccagcagcaacagcagcaacagcttcggcgcaggcctagcctgctgtctgaatttcatccaggatccgaccgcccacaagagcgcaggacttcttatgagccatttcacccgggtccaagccctgtcgaccatgactcactggagtctaagagaccccggctggaacaggtgtctgattctcattttcagagggtgtccgccgctgtcttacccctagtgcaccctcttcctgagggcctgagggctagtgctgacgccaagaaggatccggcattcggaggaaaacacgaggccccctcaagccctatctctggacaaccctgcggcgatgaccagaacgcctccccatctaagttaagtaaggaagaactcatccagagtatggacagggtggatcgcgagatagctaaggtggagcaacaaattttgaagctgaagaagaagcagcagcagctggaggaggaggcagccaaacctccagaaccggagaagccggtaagtccccccccagtggaacagaagcacagaagtattgttcagatcatctatgacgagaaccgtaaaaaggcagaggaggcccataaaattttcgagggtctcgggcccaaagtcgagctgccactgtacaatcagccttccgacacgaaggtatatcacgagaacatcaagactaaccaggtcatgcggaaaaaactcatcctttttttcaagaggagaaatcatgcccgaaaacagagagagcaaaaaatctgccagagatacgaccagctcatggaagcatgggaaaagaaggtagaccggattgagaataacccaaggcggaaagctaaggaatccaagacgagggagtactacgaaaagcaatttcctgagatacggaagcaacgggaacagcaagagcggttccagagggtgggacagcgtggagctgggctgagtgctaccatcgcccggtccgagcatgaaatctctgagattattgatgggctcagcgagcaggaaaacaacgagaagcagatgagacagctttccgtgatcccaccaatgatgtttgatgccgaacagagaagggtgaagtttataaacatgaacgggttgatggaagatccaatgaaggtgtacaaagacaggcagttcatgaacgtgtggacagaccacgaaaaggaaattttcaaggacaagttcatccagcacccaaagaacttcggcctgatcgcgagttacctggagcgtaagtctgtgccggattgtgtgctctactactacctgaccaaaaagaatgaaaactataaagcgctcgtgcgccgaaactacggaaagaggcgtggccgcaatcagcagatagcaaggcctagccaggaagaaaaggttgaagagaaggaggaggacaaggccgagaagacagagaaaaaggaggaagagaagaaggacgaagaggagaaagatgagaaagaagattcaaaagaaaatactaaggaaaaggacaagatcgatggtactgctgaggagaccgaagagagggagcaggctactccaagggggagaaaaactgccaacagtcaagggcgaagaaaaggccgcatcacgcggtcaatgactaacgaagctgcagctgccagcgctgccgccgccgccgctaccgaagagccccctccaccactgcccccccctccggagccaatttcaacagagcccgtagaaacatcccggtggacggaagaggaaatggaggtggctaagaagggcctggtggagcatggtaggaactgggcagccattgctaagatggtgggcaccaagagcgaggcccagtgcaaaaatttctatttcaactataaaagacgtcacaaccttgacaatctgctccagcagcacaagcagaagacaagccgcaaaccccgagaggagagggatgtttctcagtgcgagagcgtggcttccaccgtttcagcccaggaggatgaagacattgaagcatctaatgaggaggagaaccccgaagacagcgaagtggaagctgtgaaaccgagcgaggactcaccggagaacgcaaccagtcgcggtaatactgagcccgcagtggagcttgagccaacgaccgaaacggctccaagcacgagcccttcacttgcggttcctagtaccaagccagccgaagacgagtcagtggagactcaggtgaatgactccatctccgccgaaaccgcggaacagatggacgtggaccagcaagagcacagcgccgaagaggggagcgtttgtgatccaccgccagccaccaaggctgactccgtggatgtggaagttcgcgttcccgagaatcatgctagcaaggtcgagggagacaatactaaggagcgagacttggatagggctagcgagaaggtggagcctagggacgaagacttggtcgtggcccagcagattaatgcacagcgacccgagccacagtcagataacgatagctccgccacgtgttcggcagacgaagacgtcgacggggaacccgagcgtcagcgcatgtttcctatggatagcaagcctagccttctcaacccgacaggctccattcttgtgagtagcccgctgaagcctaatcctctggatctgccgcagctgcagcatagagctgctgtgattccacctatggtgtcttgtactccctgtaacatccccatcggaactcccgtgtccggatacgcattgtaccagcgccacatcaaagcaatgcacgagagcgctttactggaggaacagaggcagcgtcaggagcagattgacttggagtgtaggtcctctacatccccttgcggtactagtaagagtccaaatcgggagtgggaagtactccagccagccccgcaccaggtgattaccaatttgcccgagggagtacggttgccaacaacgcggccaactaggcccccgcctcctctgatcccttcttctaaaacaacggtcgcctctgaaaagcctagcttcattatgggcgggagtatctcccagggcactcccgggacatatctcacttcccataaccaggcaagttatacacaggagacgcctaaacctagtgttggctccatctcactcgggcttccacgacaacaggaatcagccaaaagcgcaaccctgccttatattaaacaggaagagtttagcccacgtagccagaactcacagcccgagggcctgctcgttagggctcagcacgagggagttgtgcggggaacggcgggtgctattcaggaagggtcaataaccagaggtacaccaacctctaaaatctcagtagaatctattccgagcctacggggaagtataacacagggtacacccgccttaccccagacaggcattccaactgaagcactggttaaggggtctattagcagaatgccgattgaagatagcagccccgaaaagggccgagaagaagctgcctccaagggccacgtgatctatgaggggaagtcagggcacattctttcttacgataacattaaaaacgcacgggaaggaaccagaagccctcggacagcccacgagatatctttaaaacggagctacgagagtgtcgaggggaacattaagcaggggatgtctatgcgagaaagcccagtgagcgcacccctggagggcctgatctgcagggccttgccgcgtggtagcccgcactccgatttgaaggagcgaacggtgctctcaggctccatcatgcagggcaccccccgagccacgaccgagagctttgaggacgggcttaagtaccctaagcagatcaaacgggaatctccaccaattcgggcctttgagggagcaattaccaaaggaaagccttatgatggcattaccactataaaagaaatggggcggtctattcacgagattccacgacaggatattctgactcaggaatccaggaagacccctgaggtggtgcagtctactcgtccaattatagaaggatctattagccaggggacccctataaagttcgacaataattccggccagtcagcaatcaaacacaacgttaaaagtcttattactgggccctctaaactgagccgggggatgccacctcttgaaatcgtgcccgagaacatcaaggtggtcgaacggggcaaatacgaggacgtgaaagccggtgaaaccgtgagaagcaggcacacatccgtggtaagttctggcccctccgtcttaaggagtaccctgcatgaagcaccaaaggcccagttgtcgcccggcatctacgacgacaccagcgccaggaggacaccggtttcttaccagaatacaatgagtagaggatcccctatgatgaaccgcacttccgacgttaccatatcgagtaataagtccactaaccatgagagaaagtcaactttgactcccacacaaagagagtcaatccccgccaaatcccctgtgcctggagtggacccagttgtctcacactccccattcgaccctcaccatcggggctcgacggccggggaggtgtacagaagccatctcccgactcacctagaccccgccatgccattccacagagccctggatccggctgccgccgcctatctttttcaacggcagctctcacctacgcctggatatccaagccagtatcagttgtacgcgatggagaatacccgtcagaccatcctcaacgactacataacctctcagcaaatgcaagtgaacctgcggcctgatgtcgctagaggtctttcgcctcgtgagcaaccgcttggcttgccataccccgccactcggggtattattgatctgactaatatgccaccaaccattttagtgccgcacccaggaggaactagcaccccacccatggaccgcattacctatatccccgggacccagataacgttcccacccaggccatacaactcggcctcaatgtccccaggacacccaactcacctggccgctgccgcttcggccgagagagaaagagagcgtgaaagagaaaaagagagggaacgtgagaggatcgctgccgctagtagcgacctgtatctgcggcctgggtccgagcagccaggccggcctgggtctcacgggtacgtacgcagccccagtccctccgtgcggactcaggaaacgatgttacaacaacgtccttccgtgtttcaagggacaaacggaacgagcgtgattacccctttagatcctacagctcagcttagaatcatgcccctgcccgcaggaggtccaagcattagccagggcctgcccgcaagcagatataacactgctgccgatgcccttgcagcccttgttgacgccgccgcatccgccccccagatggacgtgagcaagaccaaggagtccaagcacgaagccgctcggctcgaagaaaatctgcgctcccggtccgctgcggtgagtgagcagcagcaactagaacagaagaccctcgaagtggaaaaacggtctgtacagtgcctctacacttcatctgccttcccttccggcaagcctcagcctcacagctctgtggtgtatagtgaagccgggaaggataaagggccccctcccaagtctagatacgaggaagaacttcggacgagggggaaaacaacgattaccgcagcaaactttatcgatgtgattattacgcgtcaaatcgcttctgacaaagatgcccgggagcggggttcccagtcttctgactcttcttcaagtctatcaagtcatcgctacgagaccccttcggatgccatagaggtgattagtccggcttctagccctgcccccccccaggaaaaactccagacataccaacccgaggtggtcaaagccaaccaggccgagaatgaccctactcgccagtacgagggccctctacaccattatcgaccccaacaggagagcccctcgccacagcagcagctgccacctagttctcaagccgaagggatgggccaggtcccacgtacacacagactgattacactggcagatcacatctgccaaattattacgcaagactttgccaggaaccaggtgagctcccagaccccacagcaaccccccacctctaccttccaaaatagccccagtgcactggtgtccacccccgtcagaaccaaaacctctaacagatactcgcctgagtcccaggctcagagtgtacatcatcaacgacccggttctagggtgtcccctgagaacctggtcgacaagagccgggggtcgcgccccggtaagtcccctgagcgaagccatgtttccagtgagccttatgagccaatttcacccccccaggttcctgtcgtacatgagaagcaagacagtttacttcttttatcccagcgaggagctgagcccgctgagcagcgaaatgacgctagatccccaggttccataagttaccttcctagctttttcacaaagttggaaaacacaagcccaatggttaaatccaagaaacaagaaatcttccggaaattgaactcctctggcggaggagactccgatatggctgccgcccagcctggaacggaaatcttcaaccttcccgcagttactaccagcggttcagtgtctagtcgcggccactcctttgcagaccctgcatctaatctggggctcgaagatatcataaggaaggcactgatgggttctttcgatgacaaagtggaggaccacggggtggtgatgagtcagccaatgggagtggtccccgggaccgccaacacatccgtggttacttctggcgagacaaggagggaagagggagatccctccccgcattctggaggtgtgtgcaagccaaaactaatcagcaaatccaactctcgtaagtcaaaaagccccattccaggacaaggttacttgggaacggagcgtccgtctagcgtgtcatccgtgcacagcgagggcgattaccaccggcagacccctggatgggcctgggaggaccgaccatcatctacaggtagcacccagtttccatacaaccctctgaccatgcgtatgttatcatcgaccccccctacccccattgcatgtgcccccagcgccgtgaaccaagcagcgcctcatcagcaaaatcgaatctgggaaagggagcccgcgcccttactgtctgctcagtatgagactctctccgattctgacgactag

SEQ ID NO: 163839 - DNA, 7322 bp, Artificial Sequence
  derived and/or modified sequence
atgagttcctccggctatcccccaaatcagggagcctttagcactgagcaaagtcgatatccgccacatagtgtgcagtatactttcccgaacaccaggcaccaacaagaatttgccgtgccagattaccgcagttcccacctcgaagtcagtcaggcctcccagctgctccagcagcagcagcagcagcaactgagacggaggcccagtttgctttcggagtttcacccagggagcgaccgcccacaggaaaggcgcacctcttacgaaccttttcacccaggtccctctcccgtggaccatgactcactggagagcaaacgaccaagattagagcaggtgtccgattcacactttcagcgtgtctcagccgctgtgcttccacttgtacaccccttgcccgaggggctgcgcgcatccgctgatgctaagaaagaccccgcattcggaggaaagcacgaagcccctagcagtcctatttctgggcagccctgtggcgacgatcaaaatgccagcccttccaagctttcaaaggaggagctcattcaatcgatggacagggtcgatcgagagatcgccaaggtcgagcagcagatactaaaactgaagaaaaagcagcagcagctggaagaggaagccgctaagccaccagaacctgagaagccagtgtccccccctccggtggaacagaagcataggtcaatcgtgcagattatatacgacgagaatcgaaagaaggctgaagaagcccataagatctttgaaggcctgggcccaaaagtggaactcccactttacaaccagcctagtgatacgaaagtttatcacgagaatattaagaccaatcaggtgatgaggaagaagctcattctcttttttaagcgccgtaaccatgcacgaaagcagcgcgagcagaagatctgtcaacgctacgaccaactgatggaagcatgggagaagaaagtcgataggattgaaaacaacccgagaagaaaggctaaggagtccaagacccgagagtattacgagaagcagtttcctgaaatccgcaagcagagggaacagcaggaacgcttccagcgtgtgggacagcgaggggctggcctaagcgctacaatagcacgcagtgagcacgaaattagcgaaataattgatgggctgagcgagcaggagaataatgagaagcagatgcgccagctcagcgtcatcccccctatgatgtttgatgctgaacagaggcgcgttaagtttatcaatatgaacggcctcatggaagatcctatgaaggtgtataaggaccggcagttcatgaacgtctggacagaccacgagaaggagatctttaaggataagttcatacagcatcctaagaacttcggcttgatcgcctcctacctggagcggaagagcgtgcccgattgcgtgttatactactatctgaccaaaaagaacgaaaactacaaggccctggtccggcgaaattacggcaagcggaggggtcggaaccaacagattgcacgcccttcccaagaagagaaggtggaagagaaggaggaggataaggccgagaagaccgaaaaaaaagaggaggaaaagaaggacgaggaggaaaaagacgagaaggaggattcgaaggagaacaccaaggaaaaggacaagatcgatgggacagctgaagagacggaggagagagaacaggccacaccaagagggaggaagactgcaaactctcaggggagaaggaaggggcgaatcacacggtcaatgacaaacgaagcagctgcggcaagcgccgcagcagcggcagccacagaggagccaccccctcctctcccaccacctcctgagccaattagcacggaacctgtggagaccagccggtggacagaagaggagatggaagtggcgaagaagggccttgttgagcacggacggaactgggccgctatagccaagatggtgggaacaaaaagcgaagctcaatgtaaaaacttttattttaattacaagcgcagacataatttagacaatctcttgcagcagcacaaacagaaaacctctagaaagccacgcgaagagagggacgtttcccaatgtgaaagcgttgcgtcaacggtgtccgctcaggaagacgaagacattgaagcctctaatgaagaggaaaatcctgaggatagcgaggtagaggctgtgaaaccttccgaagattcgcctgaaaacgcaacctcacgtggaaatactgagcctgccgttgaactggagcctactacggagacagcaccttctactagtcccagcctggctgtaccctccaccaagccggctgaggatgaatccgttgaaacacaggtcaatgactcgattagtgctgagacagctgaacaaatggatgtcgatcaacaggagcacagcgcggaagagggcagtgtgtgcgacccaccccctgccacgaaggcagactccgttgatgttgaggtgcgcgttccagagaatcacgcctctaaggtcgaaggggacaacaccaaggagagggacttggacagagcttctgagaaagtggagccgagagacgaggacttagtcgtggctcagcaaatcaatgcgcagcgtccagaaccacagtccgataacgacagttcagcaacgtgctccgcagatgaagacgtggacggagagccagagcgccagcgcatgtttcctatggactcaaagccaagtctgctgaatcccacagggtcaattctggtgagctccccgctcaagcctaatcctctagatttgccacagctgcagcacagagctgccgtcattccaccgatggttagttgcaccccatgcaacatccccattggaacaccagtaagcgggtacgctctgtatcagagacatatcaaagcaatgcacgagagcgcacttctggaagaacagcgccaacggcaggagcagatcgatctcgaatgtcgcagtagcacgagcccctgcgggactagcaaatctcccaaccgggagtgggaggtgctgcaaccagccccacaccaggtaattaccaatcttcccgaaggcgtgcgactaccaactacgcgccctacccggcctccaccccctctgattcccagcagcaagacgactgttgccagtgaaaaaccctctttcatcatgggaggctctataagccagggaactcccggaacatatcttactagccataaccaggcctcatacacacaggagacaccaaagccctctgtaggatccatctctcttggcctacctcgccagcaagagagtgctaagtctgcaacgctgccctatatcaagcaggaagagttctcaccacggagtcagaacagtcaacccgagggtctcctcgtgagggcgcagcatgagggtgtggttcgaggcacagctggtgcaattcaggagggatctattactcggggaacgcctacttctaaaataagtgtcgagagcatcccgagtctcagaggaagcatcacccagggaactccagctttacctcagacggggatacctacggaagctctagtaaagggatctatcagccgcatgcccatcgaagactcctccccagagaagggaagggaggaggccgcttcaaaggggcacgttatttacgagggtaagtcaggccatatcttgagttacgataatatcaaaaacgcccgagaagggacccggtcgcccaggaccgcccacgaaatttctctgaagcgaagctacgagagcgtcgagggcaacatcaaacaagggatgtcgatgcgcgaatcacccgtctcggcgccactggaaggtctgatctgcagagccctgcctcgcggttccccacactccgacctgaaggagcggaccgtgctctccggatctatcatgcaaggtactccacgtgccactactgagagcttcgaggacggactgaaataccccaaacagataaaaagggagtccccccctataagagcctttgaaggagcgatcactaaaggcaaaccttacgacggtattaccaccataaaggagatggggaggagcatccacgaaatccctcggcaggatattctgacgcaagagtcccggaagacccccgaggtagtccagagcacgagaccaattattgaaggcagtatcagccagggaacgcccatcaagtttgataacaattctggccagtccgcaattaaacacaatgtgaagtctcttataacaggaccatccaagttatcgcgagggatgccccctctggaaattgtgcccgagaacattaaggtggtcgaaagagggaaatacgaagacgtaaaggccggtgagactgtacgctctcgtcacaccagcgtggtttcatccggcccttctgtcctgcgctctacattgcatgaggctcctaaggcccagctttctcctggcatatatgatgacactagcgctcgacggactccagtgtcctatcagaataccatgagccgaggatcacctatgatgaacaggacaagcgacgtcaccattagctcaaacaaatctacgaatcatgaaaggaagtccacccttactcccacgcagagggagagtattcccgctaaatctccagtgcctggcgtggaccccgtcgtcagccactctccctttgacccccaccaccgcggttccaccgcaggagaagtatacagatcccatctgcctacacacttggatccggctatgccctttcaccgcgcactcgaccctgccgctgccgcttatctatttcagcggcagttgtcccccactcctggctacccaagccagtaccaactctacgccatggagaacacccggcagaccattttgaacgactatattacctcgcagcagatgcaggtcaacctgaggccagatgtggctcggggactgtcgccgagggagcagcccttaggcctgccttatcccgctaccagggggatcattgacttgactaatatgccccctacgatcctagtcccccatcccggtggtacttccactcccccaatggatcgcatcacctacattcctgggacacaaataactttcccaccccgaccctataatagtgcctcaatgagccctggccaccccacgcatctggcagccgcagctagcgctgaacgagagcgagagcgcgaacgcgagaaggagagggaaagagagagaatcgccgcagcctcttctgatctgtatcttagacctgggtcggagcagccaggacggccaggctctcatggctatgtcagaagtccatccccatctgttcgtacccaggagaccatgctacagcaacgacctagtgtatttcaggggaccaatggaactagcgtgatcacaccactcgaccccacagctcagcttagaatcatgcctttgccggctgggggtccaagtattagtcaaggactcccagcttctcgatacaatacggctgctgacgcactcgccgctcttgtcgacgccgcagcctccgctcctcagatggacgtgagtaagaccaaggaaagcaaacatgaggccgctcgcctcgaagagaacctgagaagcaggtcagccgcagtcagcgaacagcagcaactcgagcaaaaaacactggaagttgagaagcgctcagtgcagtgtttatacactagctctgctttcccgtcaggcaagccacaaccgcacagttccgtcgtttactccgaggctggaaaggataaggggccacctccgaagtctagatacgaagaagaactgcggacacggggaaagactacgatcaccgctgccaactttattgacgtcatcatcacgcggcagattgcgtccgataaggacgctagggagagaggttcgcagtccagtgattcttccagttccctttcgtcacacaggtacgagactcccagcgacgctatcgaagtgatcagcccagcatcttccccagccccaccacaggagaagcttcagacctatcagcccgaagtggtcaaggccaaccaggcagaaaacgacccgactagacagtacgagggtcccctccaccattatagacctcagcaggagtccccttccccgcagcagcagttacccccttccagccaggccgaaggcatggggcaggtgccccgtacacacaggttgatcacactcgccgatcatatctgccagatcattactcaagactttgcacgcaatcaggtgtcaagtcagacaccgcagcagcccccaacaagcacctttcaaaactccccttctgcattggtgtctactcctgtacgcaccaagacctctaatcggtattcccctgagtcacaagcgcaatccgttcaccaccagagacctgggtcgcgcgtttccccagaaaacctggttgacaaaagtagagggtctcggcctggcaaatcccctgagcgctctcatgtctccagcgaaccttatgaacccatttctcctcctcaggtgcccgttgtgcacgagaagcaagacagtctcctactgctttcccaacgtggggcagagcctgccgagcagaggaatgacgcacgctctccaggctcaatatcttatctgccatcatttttcacaaagttagagaacacctcccctatggtgaaatctaagaagcaggagatcttccgtaagttgaactcgagtggcggtggggatagcgatatggctgccgcacagcccggaaccgagatttttaacctcccagccgtgacaacttccggttcggtgagctccaggggtcatagctttgccgaccccgctagcaacttgggtctcgaggatattattagaaaagcactgatgggctcatttgacgataaagttgaagaccatggggttgtgatgagccaacccatgggcgttgttccaggaaccgcgaacacgagcgtggttacttctggagagacaagacgagaggagggggaccccagcccccactctgggggagtgtgcaaacccaaacttatctctaagtcaaattcccgcaaaagtaagtcaccaatacccggtcagggctacctcggcactgagcgacccagctctgtgtcctctgtgcattctgagggcgattaccaccgccagaccccaggttgggcttgggaggaccggcctagctcaactgggagcacacaattcccgtataaccctctcaccatgcgaatgctctcgtccacacctcccactcctatagcatgtgccccaagcgctgtgaaccaggcggcaccacatcaacagaatagaatctgggagcgggaacccgcacccctgctgtcagctcagtatgaaacccttagcgacagtgatgacta

SEQ ID NO: 163840 - DNA, 8473 bp, Artificial Sequence
  derived and/or modified sequence
ggagggagaggggttgagtcaagatggcggccaaggtggcgaagcagcagccgcggcggcggcggcggctggagtgagcgtccgactcgccgcgccgaacgaggtcccggtgtagggccgcgcgccgtggccgcgtcccactcctcaggccggggcgcacgtcggctcccacgcttagccagctcccggtggtttcctagaaacatgattgtttattggcattgatctcacagtctggtgaggacttctttactgataatgtcaagttcaggttatcctcccaaccaaggagcattcagcacagaacaaagtcgttatcctcctcactctgtccagtatacatttcccaacacccgccaccagcaggagttcgcagtccctgattatcgttcctctcatcttgaagtgagtcaggcatcacagcttttgcagcaacagcagcagcaacagcttcgaaggcgaccttccttgctttcagaatttcacccaggttctgacaggcctcaagaaaggagaactagttatgaaccgtttcatccaggcccatccccagtggatcatgattcactggaatcgaagcgaccacgtctggaacaggtttctgattctcattttcagcgtgtcagtgctgcggttttgcctttagtgcacccgctgccagaagggctgagggcttctgcagatgctaagaaggatccagcattcggaggcaaacatgaagctccatcctctccaatttcggggcaaccatgtggagatgatcaaaatgcttcaccttcaaaactctcaaaggaagagttaatacagagtatggatcgtgtagatcgagaaattgcaaaagtagaacagcagatccttaaactgaaaaagaaacaacaacagcttgaagaagaggcagctaaacctcctgagcctgagaagcccgtgtcccctcctcctgtggagcagaaacaccgcagtattgtccaaattatttatgatgagaatcggaaaaaagcagaagaagctcataaaatttttgaaggtcttggcccaaaagttgaactgccactgtataaccagccatcagataccaaggtgtaccatgagaacatcaagacaaaccaggtgatgaggaaaaaactcattttattttttaaaagaagaaatcatgcaagaaaacaaagggaacaaaaaatctgccagcgttatgatcagctcatggaggcatgggagaaaaaagtggacagaatagaaaataatcctcggaggaaagctaaagaaagcaaaacaagggaatactatgaaaagcagtttccagaaattcgaaaacaaagagaacagcaagaaagatttcagcgagttgggcagaggggagctggtctttcagccaccattgctaggagtgagcatgagatttctgaaattattgatgggctctctgagcaggagaataatgagaaacaaatgcggcagctctctgtgattccacctatgatgtttgatgcagaacaaagacgagtcaagttcattaacatgaatgggcttatggaggaccctatgaaagtgtataaagataggcagtttatgaatgtttggactgaccatgaaaaggagatctttaaggacaagtttatccagcatccaaaaaactttggactaattgcatcatacttggagaggaagagtgttcctgattgtgttttgtattactatttaaccaagaaaaatgagaattataaagccctcgtcagaaggaattatgggaaacgcagaggcagaaaccagcaaattgctcgaccctcgcaagaagaaaaagtagaagaaaaagaagaggataaagcagaaaaaacagaaaaaaaagaagaagaaaagaaagatgaagaggaaaaagatgaaaaagaagactccaaagaaaataccaaggaaaaggacaagatagatggtacagcagaagaaactgaggaaagagagcaagccacaccccgggggcgaaagactgccaacagtcagggccgccgtaagggccggatcaccaggtccatgacaaacgaagctgcagctgccagtgctgcagccgcagcggctactgaagagcccccaccacctctgccaccgccaccagaacccatttctacagagcctgtggagacctctcgatggacagaagaagaaatggaagttgctaaaaaaggtctagtagaacatggtcgtaactgggcagcaattgctaaaatggtgggaacgaaaagtgaagctcaatgtaaaaacttctattttaactataaaaggcgacacaatcttgacaacctcttacagcagcataaacagaaaacttcacgaaaacctcgtgaagagcgagatgtgtctcaatgtgaaagtgtcgcttccactgtttctgctcaggaggatgaagatattgaagcctccaatgaagaagaaaatccagaagacagcgaagttgaagctgtcaagcccagcgaggacagtcctgaaaatgctacttctcgaggaaacacagaacctgcggttgagcttgagcccaccacggaaactgcacccagtacatctccctccttagcagttccaagtacaaaaccagctgaagatgaaagtgtggagacccaggtgaatgacagcatcagtgctgagacagcagagcagatggatgtagatcagcaggagcacagtgctgaagagggttctgtttgtgatcccccacccgctaccaaagctgactctgtggacgttgaagtgagggtgccagaaaaccatgcatctaaagttgaaggtgataataccaaagaaagagacttggatagagccagtgagaaggtggaacctagagatgaagatttggtggtagctcagcaaataaatgcccaaaggcccgagccccagtcagacaatgattccagtgccacgtgcagcgctgatgaggatgtggatggagagccagagaggcagagaatgtttcctatggactcaaagccttcactgttaaaccccactggatctatactcgtctcatctccgttaaaaccaaatccactggatctgccacagcttcagcatcgagctgctgttatcccaccaatggtatcctgcaccccatgtaacataccaattggaaccccagtgagcggctatgctctctaccagcgacacattaaagcaatgcatgagtcagcactcctggaggagcagcggcagagacaagaacagatagatttggaatgtagaagttctacaagtccatgtggcacatccaagagtccaaacagagagtgggaagtccttcagcctgctccacatcaagtgataactaatctccctgaaggcgttcggcttccgacaactcgaccaaccaggccaccgccccctctcatcccgtcatccaaaaccacagtggcttcagaaaaaccatcttttataatgggaggctccatctcacagggaacaccaggcacttatttgacttctcataatcaggcttcctacactcaagaaacacccaagccgtcagtgggatctatctctcttggactgccacggcaacaggaatctgccaaatcagctactttgccctacatcaagcaggaagaattttctccccgaagccaaaactcacaacctgagggtctgttggtcagggcccaacatgaaggtgtagtcagaggtaccgcaggagccatacaagaaggaagtataactcggggaactccaaccagcaaaatttcagtggagagcattccatccctacggggctctatcactcagggcaccccggctctgccccagactggcataccaacagaggctttggtgaaggggtccatttcgagaatgcccattgaagacagcagtcctgagaaaggcagagaggaagctgcatccaaaggccatgttatttatgaaggcaaaagtggacatatcttgtcatatgataatattaagaatgcccgagaagggactaggagtccaagaacagctcatgaaatcagtttaaagagaagctatgaatcagtggaaggaaatataaagcaagggatgtcaatgagggagtctcctgtatcagcaccgttagaggggctgatatgccgagcattacccagggggagtcctcattctgacctcaaagaaaggactgtattgtctggctccataatgcaggggacaccaagagcaacaactgaaagctttgaagatggccttaaatatcccaaacaaattaaaagggaaagtcctcccatacgagcatttgaaggtgccattaccaaaggaaaaccatatgatggcatcaccaccatcaaagaaatggggcgttccattcatgagattccaaggcaagatattttaactcaggaaagtcggaaaactccagaagtggtccagagcacacggccgataattgagggttccatttcccagggcacaccaataaagtttgacaacaactcaggtcaatctgccatcaaacacaatgtcaaatccttaatcacggggcctagcaaactatcccgtggaatgcctccgctggaaattgtgccagagaacataaaagtggtagaacggggaaaatatgaggatgtgaaagcaggcgagaccgtgcgttcccggcacacgtcagtggtaagctctggcccctccgttcttaggtccacactgcatgaagctcccaaagcacaactgagccctgggatttatgatgacaccagtgcacggaggacccctgtgagttatcaaaacaccatgtccagaggctcacccatgatgaacagaacttctgatgttacaatttcttctaacaagtctaccaatcatgaaaggaaatcgacactgacccctacccagagggaaagtatcccagcgaagtctccagtgcctggggtggaccctgtcgtgagccacagtccgtttgatccccatcacagaggcagcactgcaggcgaggtttatcggagccacctgcccacgcacttggatccagccatgccttttcacagggctttggatcctgcagcggctgcttacctgtttcagagacagctttcaccaactccaggttacccaagtcagtatcagctttacgcaatggagaacacaagacagacaatcttaaatgattacattacctcacaacagatgcaagtgaacttgcgtccagatgtggccagaggactctccccaagagagcagccactgggtctcccatacccagcaacgagaggaatcattgacctgaccaatatgcctccaacaattttagtgcctcatccagggggaacaagcactcctcccatggacagaatcacttatattcctggtacacagattactttccctcccaggccgtacaactctgcttccatgtctccaggacacccaacacaccttgcagctgctgcaagtgctgagagggaacgggaacgggagcgggagaaggagcgggagcgggaacggattgctgcagcttcctccgacctctacctgcggccaggctcagaacagcctggccgacctggcagtcatggatatgttcgctccccttccccttcagtaagaactcaggagaccatgttgcaacagagacccagtgttttccaaggaaccaatggaaccagtgtaatcacacctttggatccaactgctcagctacgaatcatgccactgcctgctgggggcccttcaataagccaaggcctgccagcctcccgttacaacactgctgcggatgccctggctgctcttgtggatgctgcagcttctgcaccccagatggatgtgtccaaaacaaaagagagtaagcatgaagctgccaggttagaagaaaatttgagaagcaggtcagcagcagttagtgaacagcagcagctagagcagaaaaccctggaggtggagaagagatctgttcagtgtttatacacttcttcagcctttccaagtggcaagccccagcctcattcttcagtagtttattctgaggctgggaaagataaagggcctcctccaaaatccagatatgaggaagagctaaggaccagagggaagactaccattactgcagctaacttcatagacgtgatcatcacccggcaaattgcctcggacaaggatgcgagggaacgtggctctcaaagttcagactcttctagtagcttatcttctcacaggtatgaaacacctagcgatgctattgaggtgataagtcctgccagctcacctgcgccaccccaggagaaactgcagacctatcagccagaggttgttaaggcaaatcaagcggaaaatgatcctaccagacaatatgaaggaccattacatcactatcgaccacagcaggaatcaccatctccccaacaacagctgcccccttcttcacaggcagagggaatggggcaagtgcccaggacccatcggctgatcacacttgctgatcacatctgtcaaattatcacacaagattttgctagaaatcaagtttcctcgcagactccccagcagcctcctacttctacattccagaactcaccttctgctttggtatctacacctgtgaggactaaaacatcaaaccgttacagcccagaatcccaggctcagtctgtccatcatcaaagaccaggttcaagggtctctccagaaaatcttgtggacaaatccaggggaagtaggcctggaaaatccccagagaggagtcacgtctcttcggagccctacgagcccatctccccaccccaggttccggttgtgcatgagaaacaggacagcttgctgctcttgtctcagaggggcgcagagcctgcagagcagaggaatgatgcccgctcaccagggagtataagctacttgccttcattcttcaccaagcttgaaaatacatcacccatggttaaatcaaagaagcaggagatttttcgtaagttgaactcctctggtggaggtgactctgatatggcagctgctcagccaggaactgagatctttaatctgccagcagttactacgtcaggctcagttagctctagaggccattcttttgctgatcctgccagtaatcttgggctggaagacattatcaggaaggctctcatgggaagctttgatgacaaagttgaggatcatggagttgtcatgtcccagcctatgggagtagtgcctggtactgccaacacctcagttgtgaccagtggtgagacacgaagagaggaaggggacccatcacctcattcaggaggagtttgcaaaccaaagctgatcagcaagtcaaacagcaggaaatctaagtctcctatacctgggcaaggctacttaggaacggaacggccctcttcagtctcctctgtacattcagaaggggattaccataggcagacgccagggtgggcctgggaagacaggccctcttcaacaggctcaactcagtttccttataaccctctgactatgcggatgctcagcagtactccaccaacaccgattgcatgtgctccctctgcggtgaaccaagcagctcctcaccaacagaacaggatctgggagcgagagcctgccccactgctctcagcacagtacgagaccctgtcggatagtgatgactgaactgcacaaagtgaggggaacagggtgcaggagagggatctctagtttttgtggtttaatttttagtagcaggtcaaaaacctgccctcctgtgacttattccctgagacttttcaggagagccagcccacagatgatgaagaaatgatggaagttcatttggagagtcaaatgggaaaaaaacaaacaaaaaactgcctttgatacaggcaattcagtggactataataatagtggagggttgagatgtagagtttttaaaaagtgaacagttgctgttcttacatctgtaaagaaaaccataatgtctttaaatcactcttctgtaaatagatgacctttttgcagtgtatatccccttgctgtagtatctggtgtacttatgttcaaatcagcgcatcaactttgggggtgatttttaaaaatctttttgtctatctatctttttaaccctagccttctaaacaacctcatacagcccagttacataatgttggctgtcacgggcattgtacttttatctgatattgtttcctctaaattcagctttccagtgatgtttaaaatcttgtgaaaatgtttagatttttaacacagaccctgtcataaaatctgtacattagggtcaaaaggtaaaagtaacaaattctgccatattgtaaatttccagtgcaggctttaatttttttttttcattagtagcactgaaaaaatattactgcatgggtatgttctagttcagtttataaagttttaaaggcttatttgaggcatacctcactgttacgcacactggtaatttaaccatgcccctaagtattccttttctcctgcatttgatgcagcccaacaaagcttttgttttgaaataaatttgactaccctgtccata

SEQ ID NO: 163841 - DNA, 7323 bp, Artificial Sequence
  derived and/or modified sequence
atgagcagcagcggctacccccccaaccagggcgccttcagcaccgagcagagcagataccccccccacagcgtgcagtacaccttccccaacaccagacaccagcaggagttcgccgtgcccgactacagaagcagccacctggaggtgagccaggccagccagctgctgcagcagcagcagcagcagcagctgagaagaagacccagcctgctgagcgagttccaccccggcagcgacagaccccaggagagaagaaccagctacgagcccttccaccccggccccagccccgtggaccacgacagcctggagagcaagagacccagactggagcaggtgagcgacagccacttccagagagtgagcgccgccgtgctgcccctggtgcaccccctgcccgagggcctgagagccagcgccgacgccaagaaggaccccgccttcggcggcaagcacgaggcccccagcagccccatcagcggccagccctgcggcgacgaccagaacgccagccccagcaagctgagcaaggaggagctgatccagagcatggacagagtggacagagagatcgccaaggtggagcagcagatcctgaagctgaagaagaagcagcagcagctggaggaggaggccgccaagccccccgagcccgagaagcccgtgagccccccccccgtggagcagaagcacagaagcatcgtgcagatcatctacgacgagaacagaaagaaggccgaggaggcccacaagatcttcgagggcctgggccccaaggtggagctgcccctgtacaaccagcccagcgacaccaaggtgtaccacgagaacatcaagaccaaccaggtgatgagaaagaagctgatcctgttcttcaagagaagaaaccacgccagaaagcagagagagcagaagatctgccagagatacgaccagctgatggaggcctgggagaagaaggtggacagaatcgagaacaaccccagaagaaaggccaaggagagcaagaccagagagtactacgagaagcagttccccgagatcagaaagcagagagagcagcaggagagattccagagagtgggccagagaggcgccggcctgagcgccaccatcgccagaagcgagcacgagatcagcgagatcatcgacggcctgagcgagcaggagaacaacgagaagcagatgagacagctgagcgtgatcccccccatgatgttcgacgccgagcagagaagagtgaagttcatcaacatgaacggcctgatggaggaccccatgaaggtgtacaaggacagacagttcatgaacgtgtggaccgaccacgagaaggagatcttcaaggacaagttcatccagcaccccaagaacttcggcctgatcgccagctacctggagagaaagagcgtgcccgactgcgtgctgtactactacctgaccaagaagaacgagaactacaaggccctggtgagaagaaactacggcaagagaagaggcagaaaccagcagatcgccagacccagccaggaggagaaggtggaggagaaggaggaggacaaggccgagaagaccgagaagaaggaggaggagaagaaggacgaggaggagaaggacgagaaggaggacagcaaggagaacaccaaggagaaggacaagatcgacggcaccgccgaggagaccgaggagagagagcaggccacccccagaggcagaaagaccgccaacagccagggcagaagaaagggcagaatcaccagaagcatgaccaacgaggccgccgccgccagcgccgccgccgccgccgccaccgaggagccccccccccccctgccccccccccccgagcccatcagcaccgagcccgtggagaccagcagatggaccgaggaggagatggaggtggccaagaagggcctggtggagcacggcagaaactgggccgccatcgccaagatggtgggcaccaagagcgaggcccagtgcaagaacttctacttcaactacaagagaagacacaacctggacaacctgctgcagcagcacaagcagaagaccagcagaaagcccagagaggagagagacgtgagccagtgcgagagcgtggccagcaccgtgagcgcccaggaggacgaggacatcgaggccagcaacgaggaggagaaccccgaggacagcgaggtggaggccgtgaagcccagcgaggacagccccgagaacgccaccagcagaggcaacaccgagcccgccgtggagctggagcccaccaccgagaccgcccccagcaccagccccagcctggccgtgcccagcaccaagcccgccgaggacgagagcgtggagacccaggtgaacgacagcatcagcgccgagaccgccgagcagatggacgtggaccagcaggagcacagcgccgaggagggcagcgtgtgcgaccccccccccgccaccaaggccgacagcgtggacgtggaggtgagagtgcccgagaaccacgccagcaaggtggagggcgacaacaccaaggagagagacctggacagagccagcgagaaggtggagcccagagacgaggacctggtggtggcccagcagatcaacgcccagagacccgagccccagagcgacaacgacagcagcgccacctgcagcgccgacgaggacgtggacggcgagcccgagagacagagaatgttccccatggacagcaagcccagcctgctgaaccccaccggcagcatcctggtgagcagccccctgaagcccaaccccctggacctgccccagctgcagcacagagccgccgtgatcccccccatggtgagctgcaccccctgcaacatccccatcggcacccccgtgagcggctacgccctgtaccagagacacatcaaggccatgcacgagagcgccctgctggaggagcagagacagagacaggagcagatcgacctggagtgcagaagcagcaccagcccctgcggcaccagcaagagccccaacagagagtgggaggtgctgcagcccgccccccaccaggtgatcaccaacctgcccgagggcgtgagactgcccaccaccagacccaccagaccccccccccccctgatccccagcagcaagaccaccgtggccagcgagaagcccagcttcatcatgggcggcagcatcagccagggcacccccggcacctacctgaccagccacaaccaggccagctacacccaggagacccccaagcccagcgtgggcagcatcagcctgggcctgcccagacagcaggagagcgccaagagcgccaccctgccctacatcaagcaggaggagttcagccccagaagccagaacagccagcccgagggcctgctggtgagagcccagcacgagggcgtggtgagaggcaccgccggcgccatccaggagggcagcatcaccagaggcacccccaccagcaagatcagcgtggagagcatccccagcctgagaggcagcatcacccagggcacccccgccctgccccagaccggcatccccaccgaggccctggtgaagggcagcatcagcagaatgcccatcgaggacagcagccccgagaagggcagagaggaggccgccagcaagggccacgtgatctacgagggcaagagcggccacatcctgagctacgacaacatcaagaacgccagagagggcaccagaagccccagaaccgcccacgagatcagcctgaagagaagctacgagagcgtggagggcaacatcaagcagggcatgagcatgagagagagccccgtgagcgcccccctggagggcctgatctgcagagccctgcccagaggcagcccccacagcgacctgaaggagagaaccgtgctgagcggcagcatcatgcagggcacccccagagccaccaccgagagcttcgaggacggcctgaagtaccccaagcagatcaagagagagagcccccccatcagagccttcgagggcgccatcaccaagggcaagccctacgacggcatcaccaccatcaaggagatgggcagaagcatccacgagatccccagacaggacatcctgacccaggagagcagaaagacccccgaggtggtgcagagcaccagacccatcatcgagggcagcatcagccagggcacccccatcaagttcgacaacaacagcggccagagcgccatcaagcacaacgtgaagagcctgatcaccggccccagcaagctgagcagaggcatgccccccctggagatcgtgcccgagaacatcaaggtggtggagagaggcaagtacgaggacgtgaaggccggcgagaccgtgagaagcagacacaccagcgtggtgagcagcggccccagcgtgctgagaagcaccctgcacgaggcccccaaggcccagctgagccccggcatctacgacgacaccagcgccagaagaacccccgtgagctaccagaacaccatgagcagaggcagccccatgatgaacagaaccagcgacgtgaccatcagcagcaacaagagcaccaaccacgagagaaagagcaccctgacccccacccagagagagagcatccccgccaagagccccgtgcccggcgtggaccccgtggtgagccacagccccttcgacccccaccacagaggcagcaccgccggcgaggtgtacagaagccacctgcccacccacctggaccccgccatgcccttccacagagccctggaccccgccgccgccgcctacctgttccagagacagctgagccccacccccggctaccccagccagtaccagctgtacgccatggagaacaccagacagaccatcctgaacgactacatcaccagccagcagatgcaggtgaacctgagacccgacgtggccagaggcctgagccccagagagcagcccctgggcctgccctaccccgccaccagaggcatcatcgacctgaccaacatgccccccaccatcctggtgccccaccccggcggcaccagcaccccccccatggacagaatcacctacatccccggcacccagatcaccttcccccccagaccctacaacagcgccagcatgagccccggccaccccacccacctggccgccgccgccagcgccgagagagagagagagagagagagagagaaggagagagagagagagagaatcgccgccgccagcagcgacctgtacctgagacccggcagcgagcagcccggcagacccggcagccacggctacgtgagaagccccagccccagcgtgagaacccaggagaccatgctgcagcagagacccagcgtgttccagggcaccaacggcaccagcgtgatcacccccctggaccccaccgcccagctgagaatcatgcccctgcccgccggcggccccagcatcagccagggcctgcccgccagcagatacaacaccgccgccgacgccctggccgccctggtggacgccgccgccagcgccccccagatggacgtgagcaagaccaaggagagcaagcacgaggccgccagactggaggagaacctgagaagcagaagcgccgccgtgagcgagcagcagcagctggagcagaagaccctggaggtggagaagagaagcgtgcagtgcctgtacaccagcagcgccttccccagcggcaagccccagccccacagcagcgtggtgtacagcgaggccggcaaggacaagggccccccccccaagagcagatacgaggaggagctgagaaccagaggcaagaccaccatcaccgccgccaacttcatcgacgtgatcatcaccagacagatcgccagcgacaaggacgccagagagagaggcagccagagcagcgacagcagcagcagcctgagcagccacagatacgagacccccagcgacgccatcgaggtgatcagccccgccagcagccccgcccccccccaggagaagctgcagacctaccagcccgaggtggtgaaggccaaccaggccgagaacgaccccaccagacagtacgagggccccctgcaccactacagaccccagcaggagagccccagcccccagcagcagctgccccccagcagccaggccgagggcatgggccaggtgcccagaacccacagactgatcaccctggccgaccacatctgccagatcatcacccaggacttcgccagaaaccaggtgagcagccagaccccccagcagccccccaccagcaccttccagaacagccccagcgccctggtgagcacccccgtgagaaccaagaccagcaacagatacagccccgagagccaggcccagagcgtgcaccaccagagacccggcagcagagtgagccccgagaacctggtggacaagagcagaggcagcagacccggcaagagccccgagagaagccacgtgagcagcgagccctacgagcccatcagccccccccaggtgcccgtggtgcacgagaagcaggacagcctgctgctgctgagccagagaggcgccgagcccgccgagcagagaaacgacgccagaagccccggcagcatcagctacctgcccagcttcttcaccaagctggagaacaccagccccatggtgaagagcaagaagcaggagatcttcagaaagctgaacagcagcggcggcggcgacagcgacatggccgccgcccagcccggcaccgagatcttcaacctgcccgccgtgaccaccagcggcagcgtgagcagcagaggccacagcttcgccgaccccgccagcaacctgggcctggaggacatcatcagaaaggccctgatgggcagcttcgacgacaaggtggaggaccacggcgtggtgatgagccagcccatgggcgtggtgcccggcaccgccaacaccagcgtggtgaccagcggcgagaccagaagagaggagggcgaccccagcccccacagcggcggcgtgtgcaagcccaagctgatcagcaagagcaacagcagaaagagcaagagccccatccccggccagggctacctgggcaccgagagacccagcagcgtgagcagcgtgcacagcgagggcgactaccacagacagacccccggctgggcctgggaggacagacccagcagcaccggcagcacccagttcccctacaaccccctgaccatgagaatgctgagcagcaccccccccacccccatcgcctgcgcccccagcgccgtgaaccaggccgccccccaccagcagaacagaatctgggagagagagcccgcccccctgctgagcgcccagtacgagaccctgagcgacagcgacgactag

SEQ ID NO: 163842 - protein, 2521 aa, Artificial Sequence
  derived and/or modified sequence
MSGSTQPVAQTWRATEPRYPPHSLSYPVQIARTHTDVGLLEYQHHSRDYASHLSPGSIIQPQRRRPSLLSEFQPGNERSQELHLRPESHSYLPELGKSEMEFIESKRPRLELLPDPLLRPSPLLATGQPAGSEDLTKDRSLTGKLEPVSPPSPPHTDPELELVPPRLSKEELIQNMDRVDREITMVEQQISKLKKKQQQLEEEAAKPPEPEKPVSPPPIESKHRSLVQIIYDENRKKAEAAHRILEGLGPQVELPLYNQPSDTRQYHENIKINQAMRKKLILYFKRRNHARKQWEQKFCQRYDQLMEAWEKKVERIENNPRRRAKESKVREYYEKQFPEIRKQRELQERMQSRVGQRGSGLSMSAARSEHEVSEIIDGLSEQENLEKQMRQLAVIPPMLYDADQQRIKFINMNGLMADPMKVYKDRQVMNMWSEQEKETFREKFMQHPKNFGLIASFLERKTVAECVLYYYLTKKNENYKSLVRRSYRRRGKSQQQQQQQQQQQQQQQQQPMPRSSQEEKDEKEKEKEAEKEEEKPEVENDKEDLLKEKTDDTSGEDNDEKEAVASKGRKTANSQGRRKGRITRSMANEANSEEAITPQQSAELASMELNESSRWTEEEMETAKKGLLEHGRNWSAIARMVGSKTVSQCKNFYFNYKKRQNLDEILQQHKLKMEKERNARRKKKKAPAAASEEAAFPPVVEDEEMEASGVSGNEEEMVEEAEALHASGNEVPRGECSGPATVNNSSDTESIPSPHTEAAKDTGQNGPKPPATLGADGPPPGPPTPPPEDIPAPTEPTPASEATGAPTPPPAPPSPSAPPPVVPKEEKEEETAAAPPVEEGEEQKPPAAEELAVDTGKAEEPVKSECTEEAEEGPAKGKDAEAAEATAEGALKAEKKEGGSGRATTAKSSGAPQDSDSSATCSADEVDEAEGGDKNRLLSPRPSLLTPTGDPRANASPQKPLDLKQLKQRAAAIPPIVTKVHEPPREDAAPTKPAPPAPPPPQNLQPESDAPQQPGSSPRGKSRSPAPPADKEAEKPVFFPAFAAEAQKLPGDPPCWTSGLPFPVPPREVIKASPHAPDPSAFSYAPPGHPLPLGLHDTARPVLPRPPTISNPPPLISSAKHPSVLERQIGAISQGMSVQLHVPYSEHAKAPVGPVTMGLPLPMDPKKLAPFSGVKQEQLSPRGQAGPPESLGVPTAQEASVLRGTALGSVPGGSITKGIPSTRVPSDSAITYRGSITHGTPADVLYKGTITRIIGEDSPSRLDRGREDSLPKGHVIYEGKKGHVLSYEGGMSVTQCSKEDGRSSSGPPHETAAPKRTYDMMEGRVGRAISSASIEGLMGRAIPPERHSPHHLKEQHHIRGSITQGIPRSYVEAQEDYLRREAKLLKREGTPPPPPPSRDLTEAYKTQALGPLKLKPAHEGLVATVKEAGRSIHEIPREELRHTPELPLAPRPLKEGSITQGTPLKYDTGASTTGSKKHDVRSLIGSPGRTFPPVHPLDVMADARALERACYEESLKSRPGTASSSGGSIARGAPVIVPELGKPRQSPLTYEDHGAPFAGHLPRGSPVTTREPTPRLQEGSLSSSKASQDRKLTSTPREIAKSPHSTVPEHHPHPISPYEHLLRGVSGVDLYRSHIPLAFDPTSIPRGIPLDAAAAYYLPRHLAPNPTYPHLYPPYLIRGYPDTAALENRQTIINDYITSQQMHHNAATAMAQRADMLRGLSPRESSLALNYAAGPRGIIDLSQVPHLPVLVPPTPGTPATAMDRLAYLPTAPQPFSSRHSSSPLSPGGPTHLTKPTTTSSSERERDRDRERDRDREREKSILTSTTTVEHAPIWRPGTEQSSGSSGGGGGSSSRPASHSHAHQHSPISPRTQDALQQRPSVLHNTGMKGIITAVEPSTPTVLRSTSTSSPVRPAATFPPATHCPLGGTLDGVYPTLMEPVLLPKEAPRVARPERPRADTGHAFLAKPPARSGLEPASSPSKGSEPRPLVPPVSGHATIARTPAKNLAPHHASPDPPAPPASASDPHREKTQSKPFSIQELELRSLGYHGSSYSPEGVEPVSPVSSPSLTHDKGLPKHLEELDKSHLEGELRPKQPGPVKLGGEAAHLPHLRPLPESQPSSSPLLQTAPGVKGHQRVVTLAQHISEVITQDYTRHHPQQLSAPLPAPLYSFPGASCPVLDLRRPPSDLYLPPPDHGAPARGSPHSEGGKRSPEPNKTSVLGGGEDGIEPVSPPEGMTEPGHSRSAVYPLLYRDGEQTEPSRMGSKSPGNTSQPPAFFSKLTESNSAMVKSKKQEINKKLNTHNRNEPEYNISQPGTEIFNMPAITGTGLMTYRSQAVQEHASTNMGLEAIIRKALMGKYDQWEESPPLSANAFNPLNASASLPAAMPITAADGRSDHTLTSPGGGGKAKVSGRPSSRKAKSPAPGLASGDRPPSVSSVHSEGDCNRRTPLTNRVWEDRPSSAGSTPFPYNPLIMRLQAGVMASPPPPGLPAGSGPLAGPHHAWDEEPKPLLCSQYETLSDSE

SEQ ID NO: 163843 - protein, 2514 aa, Artificial Sequence
  derived and/or modified sequence
MSGSTQPVAQTWRATEPRYPPHSLSYPVQIARTHTDVGLLEYQHHSRDYASHLSPGSIIQPQRRRPSLLSEFQPGNERSQELHLRPESHSYLPELGKSEMEFIESKRPRLELLPDPLLRPSPLLATGQPAGSEDLTKDRSLTGKLEPVSPPSPPHTDPELELVPPRLSKEELIQNMDRVDREITMVEQQISKLKKKQQQLEEEAAKPPEPEKPVSPPPIESKHRSLVQIIYDENRKKAEAAHRILEGLGPQVELPLYNQPSDTRQYHENIKINQAMRKKLILYFKRRNHARKQWEQKFCQRYDQLMEAWEKKVERIENNPRRRAKESKVREYYEKQFPEIRKQRELQERMQSRVGQRGSGLSMSAARSEHEVSEIIDGLSEQENLEKQMRQLAVIPPMLYDADQQRIKFINMNGLMADPMKVYKDRQVMNMWSEQEKETFREKFMQHPKNFGLIASFLERKTVAECVLYYYLTKKNENYKSLVRRSYRRRGKSQQQQQQQQQQQQQQQQQPMPRSSQEEKDEKEKEKEAEKEEEKPEVENDKEDLLKEKTDDTSGEDNDEKEAVASKGRKTANSQGRRKGRITRSMANEANSEEAITPQQSAELASMELNESSRWTEEEMETAKKGLLEHGRNWSAIARMVGSKTVSQCKNFYFNYKKRQNLDEILQQHKLKMEKERNARRKKKKAPAAASEEAAFPPVVEDEEMEASGVSGNEEEMVEEAEALHASGNEVPRGECSGPATVNNSSDTESIPSPHTEAAKDTGQNGPKPPATLGADGPPPGPPTPPPEDIPAPTEPTPASEATGAPTPPPAPPSPSAPPPVVPKEEKEEETAAAPPVEEGEEQKPPAAEELAVDTGKAEEPVKSECTEEAEEGPAKGKDAEAAEATAEGALKAEKKEGGSGRATTAKSSGAPQDSDSSATCSADEVDEAEGGDKNRLLSPRPSLLTPTGDPRANASPQKPLDLKQLKQRAAAIPPIQVTKVHEPPREDAAPTKPAPPAPPPPQNLQPESDAPQQPGSSPRGKSRSPAPPADKEAFAAEAQKLPGDPPCWTSGLPFPVPPREVIKASPHAPDPSAFSYAPPGHPLPLGLHDTARPVLPRPPTISNPPPLISSAKHPSVLERQIGAISQGMSVQLHVPYSEHAKAPVGPVTMGLPLPMDPKKLAPFSGVKQEQLSPRGQAGPPESLGVPTAQEASVLRGTALGSVPGGSITKGIPSTRVPSDSAITYRGSITHGTPADVLYKGTITRIIGEDSPSRLDRGREDSLPKGHVIYEGKKGHVLSYEGGMSVTQCSKEDGRSSSGPPHETAAPKRTYDMMEGRVGRAISSASIEGLMGRAIPPERHSPHHLKEQHHIRGSITQGIPRSYVEAQEDYLRREAKLLKREGTPPPPPPSRDLTEAYKTQALGPLKLKPAHEGLVATVKEAGRSIHEIPREELRHTPELPLAPRPLKEGSITQGTPLKYDTGASTTGSKKHDVRSLIGSPGRTFPPVHPLDVMADARALERACYEESLKSRPGTASSSGGSIARGAPVIVPELGKPRQSPLTYEDHGAPFAGHLPRGSPVTTREPTPRLQEGSLSSSKASQDRKLTSTPREIAKSPHSTVPEHHPHPISPYEHLLRGVSGVDLYRSHIPLAFDPTSIPRGIPLDAAAAYYLPRHLAPNPTYPHLYPPYLIRGYPDTAALENRQTIINDYITSQQMHHNAATAMAQRADMLRGLSPRESSLALNYAAGPRGIIDLSQVPHLPVLVPPTPGTPATAMDRLAYLPTAPQPFSSRHSSSPLSPGGPTHLTKPTTTSSSERERDRDRERDRDREREKSILTSTTTVEHAPIWRPGTEQSSGSSGGGGGSSSRPASHSHAHQHSPISPRTQDALQQRPSVLHNTGMKGIITAVEPSTPTVLRSTSTSSPVRPAATFPPATHCPLGGTLDGVYPTLMEPVLLPKEAPRVARPERPRADTGHAFLAKPPARSGLEPASSPSKGSEPRPLVPPVSGHATIARTPAKNLAPHHASPDPPAPPASASDPHREKTQSKPFSIQELELRSLGYHGSSYSPEGVEPVSPVSSPSLTHDKGLPKHLEELDKSHLEGELRPKQPGPVKLGGEAAHLPHLRPLPESQPSSSPLLQTAPGVKGHQRVVTLAQHISEVITQDYTRHHPQQLSAPLPAPLYSFPGASCPVLDLRRPPSDLYLPPPDHGAPARGSPHSEGGKRSPEPNKTSVLGGGEDGIEPVSPPEGMTEPGHSRSAVYPLLYRDGEQTEPSRMGSKSPGNTSQPPAFFSKLTESNSAMVKSKKQEINKKLNTHNRNEPEYNISQPGTEIFNMPAITGTGLMTYRSQAVQEHASTNMGLEAIIRKALMGKYDQWEESPPLSANAFNPLNASASLPAAMPITAADGRSDHTLTSPGGGGKAKVSGRPSSRKAKSPAPGLASGDRPPSVSSVHSEGDCNRRTPLTNRVWEDRPSSAGSTPFPYNPLIMRLQAGVMASPPPPGLPAGSGPLAGPHHAWDEEPKPLLCSQYETLSDSE

SEQ ID NO: 163844 - protein, 2513 aa, Artificial Sequence
  derived and/or modified sequence
MSGSTQPVAQTWRATEPRYPPHSLSYPVQIARTHTDVGLLEYQHHSRDYASHLSPGSIIQPQRRRPSLLSEFQPGNERSQELHLRPESHSYLPELGKSEMEFIESKRPRLELLPDPLLRPSPLLATGQPAGSEDLTKDRSLTGKLEPVSPPSPPHTDPELELVPPRLSKEELIQNMDRVDREITMVEQQISKLKKKQQQLEEEAAKPPEPEKPVSPPPIESKHRSLVQIIYDENRKKAEAAHRILEGLGPQVELPLYNQPSDTRQYHENIKINQAMRKKLILYFKRRNHARKQWEQKFCQRYDQLMEAWEKKVERIENNPRRRAKESKVREYYEKQFPEIRKQRELQERMQSRVGQRGSGLSMSAARSEHEVSEIIDGLSEQENLEKQMRQLAVIPPMLYDADQQRIKFINMNGLMADPMKVYKDRQVMNMWSEQEKETFREKFMQHPKNFGLIASFLERKTVAECVLYYYLTKKNENYKSLVRRSYRRRGKSQQQQQQQQQQQQQQQQQPMPRSSQEEKDEKEKEKEAEKEEEKPEVENDKEDLLKEKTDDTSGEDNDEKEAVASKGRKTANSQGRRKGRITRSMANEANSEEAITPQQSAELASMELNESSRWTEEEMETAKKGLLEHGRNWSAIARMVGSKTVSQCKNFYFNYKKRQNLDEILQQHKLKMEKERNARRKKKKAPAAASEEAAFPPVVEDEEMEASGVSGNEEEMVEEAEALHASGNEVPRGECSGPATVNNSSDTESIPSPHTEAAKDTGQNGPKPPATLGADGPPPGPPTPPRRTSRPTEPTPASEATGAPTPPPAPPSPSAPPPVVPKEEKEEETAAAPPVEEGEEQKPPAAEELAVDTGKAEEPVKSECTEEAEEGPAKGKDAEAAEATAEGALKAEKKEGGSGRATTAKSSGAPQDSDSSATCSADEVDEAEGGDKNRLLSPRPSLLTPTGDPRANASPQKPLDLKQLKQRAAAIPPIQVTKVHEPPREDAAPTKPAPPAPPPPQNLQPESDAPQQPGSSPRGKSRSPAPPADKEAFAAEAQKLPGDPPCWTSGLPFPVPPREVIKASPHAPDPSAFSYAPPGHPLPLGLHDTARPVLPRPPTISNPPPLISSAKHPSVLERQIGAISQGMSVQLHVPYSEHAKAPVGPVTMGLPLPMDPKKLAPFSGVKQEQLSPRGQAGPPESLGVPTAQEASVLRGTALGSVPGGSITKGIPSTRVPSDSAITYRGSITHGTPADVLYKGTITRIIGEDSPSRLDRGREDSLPKGHVIYEGKKGHVLSYEGGMSVTQCSKEDGRSSSGPPHETAAPKRTYDMMEGRVGRAISSASIEGLMGRAIPPERHSPHHLKEQHHIRGSITQGIPRSYVEAQEDYLRREAKLLKREGTPPPPPPSRDLTEAYKTQALGPLKLKPAHEGLVATVKEAGRSIHEIPREELRHTPELPLAPRPLKEGSITQGTPLKYDTGASTTGSKKHDVRSLIGSPGRTFPPVHPLDVMADARALERACYEESLKSRPGTASSSGGSIARGAPVIVPELGKPRQSPLTYEDHGAPFAGHLPRGSPVTTREPTPRLQEGSLSSSKASQDRKLTSTPREIAKSPHSTVPEHHPHPISPYEHLLRGVSGVDLYRSHIPLAFDPTSIPRGIPLDAAAAYYLPRHLAPNPTYPHLYPPYLIRGYPDTAALENRQTIINDYITSQQMHHNAATAMAQRADMLRGLSPRESSLALNYAAGPRGIIDLSQVPHLPVLVPPTPGTPATAMDRLAYLPTAPQPFSSRHSSSPLSPGGPTHLTKPTTTSSSERERDRDRERDRDREREKSILTSTTTVEHAPIWRPGTEQSSGSSGGGGGSSSRPASHSHAHQHSPISPRTQDALQQRPSVLHNTGMKGIITAVEPSTPTVLRSTSTSSPVRPAATFPPATHCPLGGTLDGVYPTLMEPVLLPKEAPRVARPERPRADTGHAFLAKPPARSGLEPASSPSKGSEPRPLVPPVSGHATIARTPAKNLAPHHASPDPPAPPASASDPHREKTQSKPFSIQELELRSLGYHGSSYSPEGVEPVSPVSSPSLTHDKGLPKHLEELDKSHLEGELRPKQPGPVKLGGEAAHLPHLRPLPESQPSSSPLLQTAPGVKGHQRVVTLAQHISEVITQDYTRHHPQQLSAPLPAPLYSFPGASCPVLDLRRPPSDLYLPPPDHGAPARGSPHSEGGKRSPEPNKTSVLGGGEDGIEPVSPPEGMTEPGHSRSAVYPLLYRDGEQTEPSRMGSKSPGNTSQPPAFFSKLTESNSAMVKSKKQEINKKLNTHNRNEPEYNISQPGTEIFNMPAITGTGLMTYRSQAVQEHASTNMGLEAIIRKALMGKYDQWEESPPLSANAFNPLNASASLPAAMPITAADGRSDHTLTSPGGGGKAKVSGRPSSRKAKSPAPGLASGDRPPSVSSVHSEGDCNRRTPLTNRVWEDRPSSAGSTPFPYNPLIMRLQAGVMASPPPPGLPAGSGPLAGPHHAWDEEPKPLLCSQYETLSDSE

SEQ ID NO: 163845 - DNA, 7545 bp, Artificial Sequence
  derived and/or modified sequence
atgtcgggtagcacacagcccgtggctcagacttggcgggcaacggaaccccggtaccctccacattctctgtcctatcccgtgcagattgcccgtacgcacactgacgtgggcctgcttgagtaccagcaccattcccgcgactacgcgtctcatctgtcaccaggatctataattcagccgcaaaggcgacggccttcactgctgagcgaattccaaccaggtaacgagagatcacaagagctgcacctgcggccagagtcgcactcctacctgcccgaattaggtaagagcgagatggaatttatagagtcgaaacgcccccgcttggagctgcttcccgacccactccttcggccctctcccctcttggccacgggacagccagctggctccgaggatctgacaaaggatcgttcactgacaggtaaactagagccagttagccctccatccccgccccacactgatccagagctagagttagtgcccccccggctgtccaaagaggagttgattcaaaacatggacagagtcgatcgcgaaattactatggtggagcaacaaatcagcaagttgaagaaaaagcaacagcagctcgaggaagaggccgcgaaaccaccagaaccagagaaaccggtcagcccccctcccattgaatcaaagcacagatcactggtgcagatcatctatgatgagaatcgcaagaaagccgaagccgctcacaggattctggaagggttgggcccacaggttgagctgcccctgtataaccagcccagtgacaccaggcaatatcatgaaaacattaagatcaaccaggccatgcgtaagaaacttatcctgtattttaagcgacgcaatcacgcccgcaagcagtgggagcagaaattttgccagaggtatgatcaactgatggaggcctgggagaagaaggtcgaacgaattgaaaataatcccaggcgcagagccaaggagtctaaggtgagagaatattacgagaagcaattcccagaaataaggaagcagcgcgagttgcaggaacgtatgcagtcacgagtgggtcagagaggttctggtctgtctatgtccgccgcaagatccgaacatgaagtcagtgagattattgacgggctgagcgagcaggaaaacttggaaaaacagatgaggcaactggcagtcattccaccgatgctgtatgatgccgaccagcagcgtatcaagtttattaatatgaacgggctgatggctgacccaatgaaggtctacaaggataggcaagttatgaatatgtggtcagagcaggaaaaggaaaccttcagggagaagttcatgcagcaccccaagaactttggcctgattgctagctttctggaacggaagacggttgccgaatgcgtattatactattatctgacgaaaaagaacgagaactacaagtcactcgtccgtcgctcataccgacgccgcggcaagtctcaacagcagcaacaacagcagcagcagcaacagcaacagcagcagcaacagcccatgccgcggagttcccaggaggaaaaggatgagaaggagaaagagaaagaggctgagaaagaagaggaaaaacccgaagtagagaatgacaaagaggatttactgaaagagaaaacagacgatactagcggggaggataatgatgagaaggaagcggtggcgtccaagggtcgcaaaaccgccaactcccagggcagaagaaaagggcggatcacccggtctatggcaaatgaggccaacagtgaagaggcaattactccccagcagagtgcagagctcgccagcatggagttgaatgaatcatctaggtggacagaagaagaaatggagacggctaagaaaggactactggagcacggtcgaaactggtcagccatcgcacggatggttggctcgaagacagttagccagtgcaagaacttttattttaactacaaaaaacggcagaatctggatgaaatcctgcagcagcacaagctgaaaatggagaaggagcggaatgctcgacgaaagaagaagaaggctcctgccgctgccagcgaggaggctgcgttcccccctgttgtcgaagacgaagagatggaggcctcaggagtaagtggaaacgaagaggagatggtggaggaggcagaagcactgcacgccagcggcaacgaggtccccagaggcgagtgctcaggccccgcaacagtcaacaatagcagcgacacagagagcatacccagcccccacaccgaggcggccaaagataccggtcaaaacggaccgaagcctccagccactctgggcgccgacggccctcctcccggtccacccactcccccgcctgaagacatacctgcccccactgaaccaaccccagcatccgaagccacgggagcccccacacctccgccagctccaccgagcccgagcgcacctcccccagtcgttccgaaagaagagaaggaagaggaaactgcagcagctcctcctgtcgaagagggcgaagagcagaagcctcccgctgctgaagagctggccgtggacacaggaaaggctgaagagcctgtcaaaagcgagtgcacagaggaagcagaggagggccctgcgaaaggtaaagacgccgaggctgccgaagccactgccgagggagccctgaaagcagagaaaaaagaaggaggctctgggagagctactaccgcaaagtcgtcaggggccccccaagactcagacagctcagcgacttgctctgccgacgaggtggacgaggccgagggaggggacaaaaataggcttctgtccccacgcccatcccttttaaccccaactggcgacccaagggcaaacgcaagcccccaaaaacctttggaccttaagcaactgaaacagcgcgcagccgctattccccccattcaggtgacaaaggtgcatgaacctccgcgcgaggatgctgcaccaactaaaccagccccacccgcgccacctcccccccagaacctccaaccagagagcgatgcaccacagcagcccggctcttctcctcgggggaagtcaagaagtccagcgcctccagccgacaaggaagcgtttgccgctgaggcgcagaaactgccaggggaccctccttgttggacctcaggtttgccctttcctgttcctccacgggaggtgatcaaagcgtccccgcacgcacccgacccctccgcgttttcctacgcacccccaggacatcctctgcccctgggccttcacgacacagccaggcccgtgctcccccgccccccaaccattagcaacccgcctcccctgatctcatctgctaaacatccttcagtccttgaacggcagattggggccatctcccaagggatgtctgtccagttgcatgtgccatacagtgagcacgccaaggctccggtgggccctgtgacaatgggcctgccactgcccatggatccaaaaaagttagcgccctttagtggagttaaacaggagcaactgtcaccccgcggccaggcaggaccaccggagtctttgggagtccccactgctcaggaggcaagcgtcctccggggaactgctcttgggagcgtaccgggtgggagcattacaaagggcatccctagcaccagggttccaagcgacagcgccattacctatcgggggagcatcacacatgggacacctgcggatgtgctgtacaaaggaaccattacacggattatcggcgaagacagtccttcaagattggaccgtgggcgagaagatagcctccctaaaggccatgtgatctatgaaggcaagaagggccatgtgctctcatacgaaggaggaatgtccgtgacgcagtgctccaaggaagatggcagaagctcgtctggccctccccatgaaaccgctgctcctaagaggacttatgacatgatggagggtcgggtgggaagagcgatcagttctgctagtattgaggggttaatgggtcgcgcaattccccctgaaagacattctcctcaccatctgaaggaacagcaccatatcagaggatcaattacacagggcatccccaggagctacgtggaagcacaggaggactatctgcggagggaagccaagctgctgaagagagaagggaccccaccccctccccctcctagtagggatctgactgaggcatataaaactcaggcactgggccccttgaagctgaagcccgcccacgagggactggtggccacagtgaaggaggcagggcgctccattcacgagatcccccgcgaggaattacgccacactcctgagctgcctctggcccccagacccttaaaggaggggtctataacacaggggacccctctgaaatacgatactggggcctctaccaccggatccaagaagcacgatgttcggtctctcattggtagtcctggcaggaccttccccccagttcaccctctggatgtcatggctgacgctcgcgctctcgagcgggcctgttatgaggagtcactcaaatcccggcccggcaccgctagctcatctggtggaagcattgcccgaggcgcacctgttattgtgccagagctcggaaaaccaagacagtcgcctctgacgtacgaagaccacggcgctccttttgccggtcatctgcccagaggtagccccgtgacgactcgggaacccacaccgcggcttcaagagggctccctcagctccagcaaggcaagccaggacagaaagctcacgtccactcctagggaaatcgcaaagtctccccacagcacagtccccgagcatcacccacaccctatctccccatacgaacacctcctgaggggagttagcggggtggatctgtatagaagtcacatacccctggctttcgatccaaccagcatacctcgcggaattcctctggatgcggctgcagcgtattacttacccaggcatttagcacctaatcccacctacccgcacctgtacccgccctacctcatccgggggtatccagacactgccgccctggagaaccgtcagactatcatcaatgactacatcacaagccagcagatgcaccataatgccgctacagcgatggcacaaagggccgacatgctccgtgggcttagcccccgcgagtccagtctagccctgaattacgcagctggtccacggggaatcatcgacctgtcacaggtccctcacctccctgtcttggttcccccgacccctgggacaccagcgacggccatggatcgtcttgcttatctgcctacagcaccgcagccctttagttcacggcactcttcctctcccctatctcccggggggcctacacatctgacaaagcccacaaccacaagtagttcggaacgcgagcgcgaccgggatcgggagcgcgatagagacagggaacgcgaaaagagcattctcacctccactacaaccgtggaacatgcccccatatggaggccagggactgaacagagttctgggagctccggaggcggcgggggctcatccagcaggcccgcctcccactcgcatgcccatcagcactcccctatttccccacgcacccaagatgctctccaacagcggccttccgtactccataacacagggatgaaaggcatcataaccgcggtggagccttcaacacccactgtcttacggagcacatcgacatcttcccctgtccgccccgctgcgaccttcccaccagcgacacattgtcctcttggggggacactggacggcgtgtaccctaccctcatggagcccgtgctcttgcctaaagaagcaccccgcgtcgctaggcccgagcggcctcgggcagatactggccatgcctttctagccaagccccctgccagatccgggctggaaccggcaagtagcccttcaaaaggatcagagcccagaccgctggtgccacctgtatcagggcacgcaacaatcgcacggaccccggccaaaaatcttgcaccgcatcatgctagtcctgaccctcctgcgcccccagccagcgcaagtgaccctcacagagagaaaacgcaatctaaacccttcagcattcaggagctagagcttaggtcactcgggtaccacggcagctcttattctcccgaaggcgtcgagcccgtgagccctgtgagctctcctagcctcacacacgacaaaggcttacccaaacacctcgaggaattagacaaaagtcacctggagggagagctgagacctaaacagccgggccccgtgaaactgggcggtgaggcagcccacctaccccacctacgccccttacctgagagtcagccgtcctctagtccactgttacaaactgctcccggggtcaagggtcatcagcgagtggtgactttggcccaacatatttccgaggttatcacccaagactacaccaggcatcacccccagcagttatctgcccctctacctgcaccactttacagttttccaggagcttcttgtcccgttcttgacctgcggagaccaccctctgacttgtacttaccgcctccagaccacggagcccctgcaagagggagcccacatagtgagggtgggaaaaggtcccctgagcctaataagacgtctgttctgggcggtggggaagatgggattgagcccgtctcgcctcctgaaggcatgacagagcccggccattctcgatcagctgtatatcccctactgtatcgggacggagagcagacagaaccatccaggatgggatctaaatcaccgggcaatacaagccagcctccagcctttttcagcaaactgactgagtccaactcagctatggtgaaatccaaaaagcaggaaattaacaagaagttaaacactcataaccggaacgagcccgaatataatatcagccagccaggcactgaaattttcaatatgccagccataactggcaccggcctaatgacctaccgaagtcaggccgtacaggagcatgccagcacaaacatggggcttgaagccattatacgaaaagccctgatgggcaagtacgatcaatgggaggagagtccaccactaagcgcaaacgccttcaacccccttaatgcatccgcgtcattacccgctgccatgcctatcactgctgccgacggccgttcagaccacaccttaacaagcccaggcgggggcggcaaagcaaaagtttccggccgcccctcctcacgtaaggctaaaagtccggcccccggcttggccagcggagatagaccgccgagtgtgtctagcgtgcattcagagggagactgtaataggcgaacccctcttaccaatagggtatgggaagatcggccgtcatctgccgggtctacaccctttccatacaatccattgatcatgaggttgcaggctggcgtgatggcatccccgcccccacctggccttcctgcggggtccggtcccctggccggtccccaccatgcttgggatgaagagcctaagccccttctgtgctcccagtatgagaccctttctgactcagagtag

SEQ ID NO: 163846 - DNA, 7542 bp, Artificial Sequence
  derived and/or modified sequence
atgagcggctctacccagcctgtggcccagacttggagggccactgagccccggtaccctccccacagcctcagttaccccgtccagatcgcacgtactcacactgacgtgggccttcttgagtaccagcaccactcaagagactacgccagtcatctgagcccggggagtattatacagccgcaacgcaggcgaccatctttgttaagtgaatttcagccaggaaatgagcgtagccaggagttacatctcagaccggaatcacattcgtatctccctgagctaggcaaatccgaaatggagttcatagaatctaagaggcccaggctggagctattgcctgacccacttttgaggccgagcccattactagccaccgggcagccagctgggagtgaggatcttacaaaagacaggtccctcaccggcaaattggagcccgtctcaccacccagcccaccccatactgacccagagctagagcttgtgccgcccagattgagcaaggaagagctcatccagaatatggatagggtggatagagagattacaatggtggaacaacagatctcaaaactgaaaaagaaacaacagcagcttgaggaagaggcagccaaacctcccgaaccggagaaacctgtgagccctcctcctatcgaaagcaaacaccgatctctggtacagattatctacgacgaaaatcgcaagaaggcagaggctgcacatcgaatattagaggggctggggccccaggtagagttgcctctgtacaatcagccctctgacaccagacagtaccatgagaacattaaaatcaatcaagccatgcgaaagaaactgattctctactttaaacgacgaaatcacgcccggaagcagtgggaacagaaattctgccagagatacgatcaactcatggaggcctgggagaagaaggtggagagaatcgaaaacaacccgaggcggcgggcaaaggaatctaaagttcgcgagtattacgagaagcagtttcccgagattaggaaacagcgcgagctccaggagagaatgcagagccgagtgggccagagaggcagcggcctcagtatgtctgctgcaaggtccgagcatgaggtaagcgagatcatcgatgggctgtctgagcaggagaatctggaaaagcagatgaggcagctggctgtaatccctccaatgctctacgatgctgaccaacaacgcatcaaattcattaacatgaatggcctgatggcagacccaatgaaggtgtacaaggacagacaggtgatgaatatgtggtcagaacaggaaaaagagactttcagggagaaattcatgcagcatccgaaaaattttgggttgatcgcaagctttctcgaacggaagacagtagccgaatgcgtgctctattattacctcaccaaaaaaaacgagaattacaaatctctggttcggagaagctataggcgtcgaggaaaatcacagcagcaacaacaacagcagcagcagcagcagcagcagcaacagcagcaacccatgccacgaagctcccaagaagagaaagatgagaaggaaaaggaaaaggaagccgagaaggaggaggaaaagcctgaagtcgaaaatgacaaagaggatttattgaaggaaaaaacagacgacacctctggcgaagacaacgatgagaaagaggccgtcgcttctaaaggccgcaagacggccaattcacagggacgtaggaagggacgcatcaccaggtcaatggccaatgaggctaactccgaggaagccatcacccctcagcagtccgcggaactggcatctatggaactcaacgaatcgtcaaggtggaccgaggaggagatggagaccgccaaaaaaggcctgttggaacacgggaggaactggagtgctattgcaaggatggtgggatcgaaaactgtgagtcaatgtaagaatttttacttcaactacaaaaagcggcagaatctagacgagatattgcagcagcacaagcttaaaatggagaaagagcgaaatgcgagaagaaagaagaaaaaagctccggctgcagctagtgaagaagctgcgttccctccggtggtcgaagacgaggaaatggaggccagcggagtgtcagggaacgaggaagaaatggtggaagaagccgaggctctgcacgccagtggtaacgaagtccctagaggggagtgctctggccctgccacggttaacaattcctccgatacagaatctattccctccccccataccgaagcagccaaagatacaggccagaatgggcccaaaccacccgcaaccttgggagccgacggccctcctcccgggccacccacccccccaaggaggacctctcggccaaccgagccgacccccgcttcagaggctaccggcgcccctactccacctccagcccctccctcccccagtgctcccccacccgtcgtccccaaagaagaaaaggaagaggaaaccgcggccgccccacccgtcgaggaaggagaggagcagaagccaccggcagcggaagagctggctgtcgacacgggtaaggcagaagagcctgtgaagtcagaatgtactgaagaagcagaagagggccctgccaaaggaaaagacgccgaagcagcagaggccaccgcagagggggccctcaaggccgagaaaaaggaaggaggttcgggcagagcaactacggctaaaagttcaggcgctcctcaggattcggattcctcggcaacatgtagcgctgacgaggttgacgaggccgaaggcggagacaaaaacagactcctctctccccgccccagtctgctcacaccaactggggaccctcgcgccaacgctagccctcagaagcccctggacctgaagcaactgaaacagagagctgctgcaattcctcctatccaggttactaaggtccacgaacccccacgagaagatgcagcccccaccaagccagccccgcccgcgccacctccccctcaaaatctgcagccagaatcggacgccccgcagcagcccggctccagtccccgagggaaaagccgctcaccagctccacctgccgacaaggaggcatttgcagccgaggcccaaaagctgccaggtgacccgccatgctggaccagcggcctaccgtttccagttccgcctcgagaagtcattaaagctagtcctcatgccccagatcccagcgctttctcctatgccccacccggacaccctctccccttggggctccatgataccgcccggcccgtgctacctcgcccccccaccattagtaatcccccacccctcatctcttccgcgaagcatccttctgtcttggagcgtcaaataggcgccatctcacaggggatgagcgtgcagctgcatgttccttactcggaacacgctaaggcgcctgtgggcccggtgacaatgggactgcccttgcctatggatcctaaaaaactagctcctttttccggcgtaaaacaggagcaactttctccgcgcggacaggccgggcctcccgaaagcttgggggtccccacagcccaggaggcgagcgtcctgcgcgggactgccctgggcagcgtgccgggcggctcaatcaccaaggggatcccttccactcgtgtgccctctgacagcgccatcacttaccgcggctcgattacacacgggactcccgccgacgtgctttataagggcaccattacaagaattatcggtgaagacagtccctctaggttggaccgcggacgggaggatagcctgccaaaaggccacgtcatctatgaaggcaaaaaaggccatgtgttgagctatgaaggaggcatgagcgtgactcaatgctccaaagaggatggccgctcatcctcaggcccaccccacgaaaccgctgctccaaagaggacatacgacatgatggaaggtcgggtgggccgcgccatcagctctgcctctatagagggattgatgggcagggccataccaccggagcgtcatagtcctcatcatctgaaagaacagcaccatatccgcggctcaattacccagggcataccgcggtcatatgtcgaggcacaagaagactacctgaggcgagaggccaagctgctgaaaagggagggtaccccgcccccgcccccacccagtcgggatctgactgaggcctataagacgcaggccctgggcccactgaaactaaaacctgcccacgagggcttggtggccactgtgaaagaggccggaagatctatccatgagattcctcgggaagagctccgtcacacccccgagttgccactcgcccccaggcctctgaaggaggggtccatcacccagggcacccctctcaagtacgacacaggagcgtccactaccgggtctaaaaagcacgacgtacgtagccttatcgggtcccctggacggacctttccaccggtgcatcctctggacgtcatggcagacgcgcgcgcattagagagagcctgctatgaggaaagcctgaagagtagaccaggaactgctagctcttccggcggctctattgcccgcggagcccccgtgatagtccccgagcttggcaaaccccgccaatccccactgacatatgaagatcacggggcgccctttgccgggcatctccccagaggctccccggtgaccactcgcgagccaactcccagactgcaagaagggtcactcagcagctccaaggcgtctcaagatcgcaaactcacctctactccccgcgaaatcgctaaatcaccgcactccaccgtcccggagcaccacccacatccgatctccccctacgaacacctactgcgtggggtttccggagtcgatctgtatcgctcgcatattccacttgccttcgacccaactagtatcccacggggcataccactggacgcggctgcagcatactaccttccccgacacttagctcccaaccccacttatccccacttgtaccctccatacctcatacgtggttatccggacaccgccgctctcgaaaacaggcagactataatcaacgactatattactagtcagcagatgcatcacaacgcagcaacagctatggcgcaacgtgctgatatgctgagaggactatccccacgcgagtctagtctagccctcaattacgcagccgggccaagggggataattgatttatcccaggtgccacatctgcctgtcctggtgccacctactcccggtacccctgctactgccatggatagacttgcttatctaccgactgccccccagcctttctctagcagacatagttcgagtcctctgagtcctggtggtcccacccacctgacaaaacccactaccacctcttccagtgagagggaacgcgaccgggatcgggaaagagacagggatcgggaacgggaaaagtccatattaactagcacaactacggtagagcacgcgcccatctggcgacccggaacagagcagtcaagtgggtcctccggcggaggcgggggttccagcagccgtccagcaagccactctcatgcacatcaacactcaccaatttccccaagaactcaggacgcgttgcagcagcgaccaagcgtattgcacaataccggcatgaaaggcattatcaccgctgtcgagccttccacccccactgttctacgctccacctcaacatcatcacctgttcgccccgccgctaccttccccccagctacccactgtcccctgggaggtaccttagatggcgtctatcctactctcatggaacccgtcctcctccctaaggaggctcctcgggtcgctaggcctgagagacctagagccgacacaggccatgcctttctcgccaagcctcccgcgagatcaggcctcgagccagcttcatcaccatcaaaggggagcgaacctagacctcttgtgccgcctgtctctggccatgccaccattgcaagaacccctgccaaaaatttggcgccacaccatgcctccccggacccaccggccccgccagcttccgctagcgacccacaccgggaaaagacccaaagtaagcccttcagcatccaggagctggaacttcgcagcctcggttaccacggcagctcttacagccctgagggtgtagaacccgtcagcccagtttccagtccttccctaacacacgacaaaggcctgccaaaacatctggaagaactcgacaagtcccatctggaaggggagttacggcctaaacagcctgggccggttaaactcggcggtgaggccgctcacttacctcaccttagaccactccctgaatcacagcctagtagtagccccctcctccagacagcccccggagtgaagggccaccagcgcgtggtgactctggctcaacacatttctgaagtgattactcaggattacacacggcatcatcctcagcagctgtccgctcccctccccgcccctctttatagctttcctggagcttcctgccctgtcctggatctccggcgacccccatctgatctgtatctgccccccccggaccacggtgctccagccaggggctcaccacattcagagggcggaaagagaagccccgagcccaacaaaacatcggttttggggggaggcgaggatggaatcgaacctgttagtccccctgaaggtatgaccgaaccaggccacagccgatctgccgtctatccgctcctatacagagacggagagcagactgaaccctcacgtatgggctccaaatcccccggtaacacctctcagccaccagctttcttctctaagctcacggaatccaatagcgctatggtcaaaagtaaaaaacaagagataaacaagaagctgaatacacataaccgcaatgaacccgagtacaatatctcccagccgggcactgaaatcttcaacatgccagctattaccggtacggggctgatgacatacaggagccaagcagtccaagagcacgcctcgacaaacatgggcctggaggccattatccgcaaggctctgatgggcaaatatgatcagtgggaggaaagcccccccttaagtgccaacgctttcaaccctcttaatgcttctgcatctcttccggccgccatgcctataacagctgccgacgggcggagtgaccacaccctcacatctcctggaggcggaggaaaagcaaaagtgtctgggagaccctcgagcagaaaagccaaaagtcccgcacccggccttgcctccggggatcggccaccttctgtgtcatctgtgcactcggagggcgattgtaaccgtagaacccctctgaccaatagggtctgggaagacaggccatccagcgcggggtcaacacctttcccttataatccactgatcatgcgtctccaagcgggggttatggcgagtcccccaccacctggccttcctgcaggctctggaccactggcaggaccccatcacgcctgggacgaggagcctaagccgctgctctgttctcagtatgaaaccctctcagactcggagtag

SEQ ID NO: 163847 - DNA, 7545 bp, Artificial Sequence
  derived and/or modified sequence
atgagcggcagcacccagcctgtggcccagacctggagggccacagagccccgctacccaccccacagcctgagctaccctgtgcagatcgcccggacccacacagatgtgggcctgctggagtaccagcaccacagccgggactatgccagccacctgagccctggcagcatcatccagccccagaggcggcggcccagcctgctgtctgagttccagcctggaaatgaaagaagccaggagctgcacctgcggcctgagagccacagctacctgcctgagctgggcaagtctgagatggagttcatcgagagcaagaggccccggctggagctgctgcctgaccccctgctgcggcccagccccctgctggccaccggccagcctgctggcagcgaggacctgaccaaggacaggagcctgaccgggaagctggagcctgtgagcccccccagccccccccacacagatcctgagctggagctggtgcccccccggctgagcaaggaggagctgatccagaacatggacagagtggaccgggagatcaccatggtggagcagcagatcagcaagctgaagaagaagcagcagcagctggaggaggaggccgccaagcccccagagcctgagaagcctgtgagccccccacccatcgagagcaagcacaggagcctggtgcagatcatctatgatgaaaataggaagaaggccgaggccgcccaccgcatcctggagggcctgggcccccaggtggagctgcccctgtacaaccagcccagcgacacccggcagtaccacgagaacatcaagatcaaccaggccatgaggaagaagctgatcctgtacttcaagagaagaaatcatgccaggaagcagtgggagcagaagttctgccagagatatgaccagctgatggaggcctgggagaagaaggtggagagaattgagaacaacccccggcggcgggccaaggagagcaaggtgcgggagtactatgagaagcagtttcctgagatcaggaagcagcgggagctgcaggagaggatgcagagccgggtgggccagaggggcagcggcctgtccatgtctgctgcccggtctgagcacgaggtgtctgagatcattgatggcctgtctgagcaggagaacctggagaagcagatgaggcagctggccgtcatcccccccatgctgtatgatgctgaccagcagaggatcaagttcatcaacatgaatggcctgatggctgaccccatgaaggtgtacaaggaccggcaggtgatgaacatgtggagcgagcaggagaaggagaccttccgggagaagttcatgcagcaccccaagaactttggcctcatcgccagcttcctggagaggaagacagtggctgaatgtgtgctgtactactacctgaccaagaagaatgaaaactacaagagcctggtgcggcgcagctacagaagaagaggcaagagccagcagcagcagcagcagcagcagcagcagcagcagcagcagcagcagcagcccatgcccaggagcagccaggaggagaaggatgagaaggagaaggagaaggaggccgagaaggaggaggagaagccagaggtggagaatgacaaggaggacctgctgaaggagaagacagatgacaccagcggggaggacaatgatgagaaggaggccgtggccagcaaaggaaggaagacagccaacagccagggccgcaggaagggccgcatcaccaggtccatggccaatgaggccaacagcgaggaggccatcaccccccagcagagcgctgagctggcctccatggagctgaatgaaagcagccgctggacagaggaggagatggagacagccaagaagggcctgctggagcacggcaggaactggagcgccatcgccaggatggtgggcagcaagacagtgtcccagtgcaagaacttctacttcaactacaagaagaggcagaacctggatgagatcctgcagcagcacaagctgaagatggagaaggagagaaatgcccggaggaagaagaagaaggccccagctgctgccagcgaggaggccgccttcccccctgtggtggaggatgaggagatggaggccagcggcgtgtctggaaatgaggaggagatggtggaggaggccgaggccctgcacgccagcggaaatgaggtgcccagaggagaatgttctggccctgccaccgtgaacaacagcagtgacacagagagcatccccagcccccacacagaggccgccaaggacaccggccagaatggccccaagcccccagccaccctgggcgcagatggccccccacctggcccccccaccccacctcctgaggacatcccagcccccacagagcccaccccagccagcgaggccactggagcccccaccccacctccagccccacccagccccagcgcccctcctcctgtggtgcccaaggaggagaaggaggaggagacagctgctgcccctcctgtggaggagggggaggagcagaagcccccagctgctgaggagctggccgtggacaccgggaaggccgaggagcctgtgaagtcagaatgtacagaggaggccgaggagggccctgccaagggcaaggatgctgaggccgctgaggccacagctgagggcgccctgaaggccgagaagaaggagggcggcagcggccgggccaccacagccaagagcagcggggccccccaggacagcgacagcagcgccacctgcagcgcagatgaggtggatgaagctgagggcggggacaagaaccggctgctgagcccccggcccagcctgctgacccccaccggggacccccgggccaatgccagcccccagaagcccctggacctgaagcagctgaagcagagagctgctgccatcccccccatccaggtgaccaaggtgcatgagcccccaagagaagatgctgcccccaccaagccagcccccccagcccctcctccaccccagaacctgcagcctgagagtgatgccccccagcagcccggcagcagcccccggggcaagagccgcagccctgcccccccagctgacaaggaggcctttgctgctgaggcccagaagctgcccggggaccccccctgctggaccagcggcctgcccttccctgtgcccccccgggaggtgatcaaggccagcccccacgccccagaccccagcgccttctcctatgcccctcctggccaccccctgcccctgggcctgcatgacacagcccggcctgtgctgcccaggcctcccaccatcagcaaccccccacccctcatcagcagcgccaagcaccccagcgtgctggagcggcagatcggggccatcagccagggcatgtctgtgcagctgcacgtgccctacagcgagcacgccaaggcccctgtgggccctgtgaccatgggcctgcccctgcccatggaccccaagaagctggcccccttctctggagtgaagcaggagcagctgagcccccggggccaggccggccccccagagagcctgggcgtgcccacagcccaggaggcctctgtgctgcggggcacagccctgggctctgtgcctgggggcagcatcaccaagggcatccccagcaccagggtgcccagcgacagcgccatcacctaccggggcagcatcacccacggcaccccagcagatgtgctgtacaagggcaccatcacccgcatcattggagaggacagccccagccggctggaccggggccgggaggacagcctgcccaagggccacgtgatctatgagggcaagaagggccacgtgctgtcctatgagggcggcatgtctgtgacccagtgcagcaaggaggatggccgcagcagcagcggcccccctcatgaaacagctgcccccaagaggacctatgacatgatggagggccgggtgggccgggccatcagcagcgccagcattgagggcctgatgggccgggccatccccccagagcggcacagcccccaccacctgaaggagcagcaccacatccggggcagcatcacccagggcatccccaggagctatgtggaggcccaggaggactacctgcggcgggaggccaagctgctgaagcgggagggcaccccacctcctcctccacccagccgggacctgacagaggcctacaagacccaggccctgggccccctgaagctgaagccagcccacgagggcctggtggccaccgtgaaggaggccggccgcagcatccacgagatcccccgggaggagctgcggcacaccccagagctgcccctggccccccggcccctgaaggagggcagcatcacccagggcacccccctgaagtatgacacaggagccagcaccaccggcagcaagaagcatgatgtgcgcagcctgattggcagccctggccgcaccttcccccctgtgcaccccctggatgtgatggctgatgcccgggccctggagcgggcctgctatgaggagagcctgaagagccggcccggcacagccagcagcagcggcggcagcatcgcccggggggcccctgtgattgtgcctgagctgggcaagccccggcagagccccctgacctatgaggaccacggggccccctttgctggccacctgccccggggcagccctgtgaccacccgggagcccaccccccggctgcaggagggcagcctgagcagcagcaaggccagccaggacaggaagctgaccagcaccccccgggagatcgccaagagcccccacagcacagtgcctgagcaccacccccaccccatcagcccctatgagcacctgctgcggggcgtgtctggagtggacctgtaccgcagccacatccccctggcctttgaccccaccagcatcccccggggcatccccctggatgctgctgctgcctactacctgcccaggcacctggcccccaaccccacctacccccacctgtacccaccctacctgatccggggctacccagacacagctgccctggagaaccggcagaccatcatcaatgactacatcaccagccagcagatgcaccacaatgctgccacagccatggcccagagagctgacatgctgcggggcctgagcccccgggagagcagcctggccctgaactatgctgctggcccccggggcatcatcgacctgagccaggtgccccacctgcctgtgctggtgccccccaccccaggcaccccagccacagccatggaccggctggcctacctgcccacagccccccagcccttcagcagccgccacagcagcagccccctgagccctgggggccccacccacctgaccaagcccaccaccaccagcagcagcgagcgggagcgggaccgggaccgggagcgggaccgggaccgggagcgggagaagagcatcctgaccagcaccaccaccgtggagcacgcccccatctggaggcctggaacagagcagagcagcggcagcagcggcggcggcggcggcagcagcagcaggcctgccagccacagccacgcccaccagcacagccccatcagccccaggacccaggatgccctgcagcagaggccttctgtgctgcacaacacaggcatgaagggcatcatcacagctgtggagcccagcacccccaccgtgctgcggagcaccagcaccagcagccctgtgcggcctgctgccaccttccccccagccacccactgccccctgggcggcaccctggatggagtgtaccccaccctgatggagcctgtgctgctgcccaaggaggccccccgggtggcccggcctgagcggcccagggctgacaccggccacgccttcctggccaagcccccagcccggagcggcctggagcccgccagcagccccagcaagggcagcgagccccggcccctggtgccccctgtgtctggccacgccaccatcgcccggaccccagccaagaacctggccccccaccacgccagcccagaccccccagcccccccagccagcgccagtgacccccaccgggagaagacccagagcaagcccttcagcatccaggagctggagctgcggagcctgggctaccacggcagcagctacagccctgagggcgtggagcctgtgtcccctgtgagcagccccagcctgacccatgacaagggcctgcccaagcacctggaggagctggacaagagccacctggagggggagctgcggcccaagcagcccggccctgtgaagctgggcggggaggccgcccacctgccccacctgcggcccctgcctgagagccagcccagcagcagccccctgctgcagacagcccctggggtgaagggccaccagagggtggtgaccctggcccagcacatcagcgaggtgatcacccaggactacaccaggcaccacccccagcagctgagcgcccccctgcctgcccccctgtacagcttccctggggccagctgccctgtgctggacctgcggcggccccccagcgacctgtacctgcccccaccagaccatggagccccagcccggggcagcccccacagcgagggcggcaagaggagccctgagcccaacaagacctctgtgctgggcggcggggaggatggcatcgagcctgtgagccccccagagggcatgacagagcccggccacagccgctctgctgtgtaccccctgctgtacagagatggagagcagacagagcccagcaggatgggcagcaagagccctggcaacaccagccagcccccagccttcttcagcaagctgacagagagcaacagcgccatggtgaagagcaagaagcaggagatcaacaagaagctgaacacccacaacagaaatgaacctgagtacaacatcagccagcccggcacagagatcttcaacatgcctgccatcactggaacaggcctgatgacctaccgcagccaggccgtgcaggagcacgccagcaccaacatgggcctggaggccatcatcaggaaggccctgatgggcaagtatgaccagtgggaggagagcccccccctgagcgccaatgccttcaaccccctgaatgccagcgccagcctgcctgctgccatgcccatcacagctgctgatggccgcagtgaccacaccctgaccagccctgggggcggcggcaaggccaaggtgtctggccggcccagcagcaggaaggccaagagccctgcccctggcctggccagcggggaccggccccccagcgtgtcctctgtgcacagcgagggggactgcaacagaaggacccccctgaccaacagagtgtgggaggaccggcccagcagcgctggcagcacccccttcccctacaaccccctcatcatgaggctgcaggccggcgtgatggccagccccccacctcctggcctgcctgctggcagcggccccctggccggcccccaccacgcctgggatgaggagcccaagcccctgctgtgcagccagtatgagaccctgagtgacagcgagtag

SEQ ID NO: 163848 - DNA, 7542 bp, Artificial Sequence
  derived and/or modified sequence
atgagcggcagcacccagcctgtggcccagacctggagggccacagagccccgctacccaccccacagcctgagctaccctgtgcagatcgcccggacccacacagatgtgggcctgctggagtaccagcaccacagccgggactatgccagccacctgagccctggcagcatcatccagccccagaggcggcggcccagcctgctgtctgagttccagcctggaaatgaaagaagccaggagctgcacctgcggcctgagagccacagctacctgcctgagctgggcaagtctgagatggagttcatcgagagcaagaggccccggctggagctgctgcctgaccccctgctgcggcccagccccctgctggccaccggccagcctgctggcagcgaggacctgaccaaggacaggagcctgaccgggaagctggagcctgtgagcccccccagccccccccacacagatcctgagctggagctggtgcccccccggctgagcaaggaggagctgatccagaacatggacagagtggaccgggagatcaccatggtggagcagcagatcagcaagctgaagaagaagcagcagcagctggaggaggaggccgccaagcccccagagcctgagaagcctgtgagccccccacccatcgagagcaagcacaggagcctggtgcagatcatctatgatgaaaataggaagaaggccgaggccgcccaccgcatcctggagggcctgggcccccaggtggagctgcccctgtacaaccagcccagcgacacccggcagtaccacgagaacatcaagatcaaccaggccatgaggaagaagctgatcctgtacttcaagagaagaaatcatgccaggaagcagtgggagcagaagttctgccagagatatgaccagctgatggaggcctgggagaagaaggtggagagaattgagaacaacccccggcggcgggccaaggagagcaaggtgcgggagtactatgagaagcagtttcctgagatcaggaagcagcgggagctgcaggagaggatgcagagccgggtgggccagaggggcagcggcctgtccatgtctgctgcccggtctgagcacgaggtgtctgagatcattgatggcctgtctgagcaggagaacctggagaagcagatgaggcagctggccgtcatcccccccatgctgtatgatgctgaccagcagaggatcaagttcatcaacatgaatggcctgatggctgaccccatgaaggtgtacaaggaccggcaggtgatgaacatgtggagcgagcaggagaaggagaccttccgggagaagttcatgcagcaccccaagaactttggcctcatcgccagcttcctggagaggaagacagtggctgaatgtgtgctgtactactacctgaccaagaagaatgaaaactacaagagcctggtgcggcgcagctacagaagaagaggcaagagccagcagcagcagcagcagcagcagcagcagcagcagcagcagcagcagcagcccatgcccaggagcagccaggaggagaaggatgagaaggagaaggagaaggaggccgagaaggaggaggagaagccagaggtggagaatgacaaggaggacctgctgaaggagaagacagatgacaccagcggggaggacaatgatgagaaggaggccgtggccagcaaaggaaggaagacagccaacagccagggccgcaggaagggccgcatcaccaggtccatggccaatgaggccaacagcgaggaggccatcaccccccagcagagcgctgagctggcctccatggagctgaatgaaagcagccgctggacagaggaggagatggagacagccaagaagggcctgctggagcacggcaggaactggagcgccatcgccaggatggtgggcagcaagacagtgtcccagtgcaagaacttctacttcaactacaagaagaggcagaacctggatgagatcctgcagcagcacaagctgaagatggagaaggagagaaatgcccggaggaagaagaagaaggccccagctgctgccagcgaggaggccgccttcccccctgtggtggaggatgaggagatggaggccagcggcgtgtctggaaatgaggaggagatggtggaggaggccgaggccctgcacgccagcggaaatgaggtgcccagaggagaatgttctggccctgccaccgtgaacaacagcagtgacacagagagcatccccagcccccacacagaggccgccaaggacaccggccagaatggccccaagcccccagccaccctgggcgcagatggccccccacctggcccccccaccccacccaggaggaccagccggcccacagagcccaccccagccagcgaggccaccggggcccccaccccacctccagccccacccagccccagcgcccctcctcctgtggtgcccaaggaggagaaggaggaggagacagctgctgcccctcctgtggaggagggggaggagcagaagcccccagctgctgaggagctggccgtggacaccgggaaggccgaggagcctgtgaagtctgagtgcacagaggaggccgaggagggccctgccaagggcaaggatgctgaggccgctgaggccacagctgagggcgccctgaaggccgagaagaaggagggcggcagcggccgggccaccacagccaagagcagcggggccccccaggacagcgacagcagcgccacctgcagcgcagatgaggtggatgaggccgagggcggggacaagaaccggctgctgagcccccggcccagcctgctgacccccactggagacccccgggccaatgccagcccccagaagcccctggacctgaagcagctgaagcagagagctgctgccatcccccccatccaggtgaccaaggtgcatgagcccccccgggaggatgctgcccccaccaagccagcccccccagcccctcctccaccccagaacctgcagcctgagagtgatgccccccagcagcccggcagcagcccccggggcaagagccgcagccctgcccctcctgctgacaaggaggcctttgctgctgaggcccagaagctgcccggggaccccccctgctggaccagcggcctgcccttccctgtgcccccccgggaggtgatcaaggccagcccccacgccccagaccccagcgccttctcctatgcccctcctggccaccccctgcccctgggcctgcatgacacagcccggcctgtgctgccccggccccccaccatcagcaaccccccacccctcatcagcagcgccaagcaccccagcgtgctggagcggcagattggagccatcagccagggcatgtctgtgcagctgcacgtgccctacagcgagcacgccaaggcccctgtgggccctgtgaccatgggcctgcccctgcccatggaccccaagaagctggcccccttcagcggcgtgaagcaggagcagctgagcccccggggccaggccggccccccagagagcctgggcgtgcccacagcccaggaggcctctgtgctgcggggcacagccctgggctctgtgcctgggggcagcatcaccaagggcatccccagcaccagggtgcccagcgacagcgccatcacctaccggggcagcatcacccacggcaccccagcagatgtgctgtacaagggcaccatcacccgcatcatcggggaggacagccccagccggctggaccggggccgggaggacagcctgcccaagggccacgtgatctatgagggcaagaagggccacgtgctgtcctatgaaggaggcatgtctgtgacccagtgcagcaaagaagatggccgcagcagcagcggcccccctcatgaaacagctgcccccaagaggacctatgacatgatggagggccgggtgggccgggccatcagcagcgccagcattgagggcctgatgggccgggccatccccccagagcggcacagcccccaccacctgaaggagcagcaccacatccggggcagcatcacccagggcatccccaggagctatgtggaggcccaggaggactacctgcggcgggaggccaagctgctgaagcgggagggcaccccacctcctcctccacccagccgggacctgacagaggcctacaagacccaggccctgggccccctgaagctgaagccagcccacgagggcctggtggccaccgtgaaggaggccggccgcagcatccacgagatcccccgggaggagctgcggcacaccccagagctgcccctggccccccggcccctgaaggagggcagcatcacccagggcacccccctgaagtatgacaccggggccagcaccaccggcagcaagaagcatgatgtgcgcagcctcatcggcagccctggccgcaccttcccccctgtgcaccccctggatgtgatggctgatgcccgggccctggagcgggcctgctatgaggagagcctgaagagcaggcctggaacagccagcagcagcggcggcagcatcgcccggggggcccctgtgattgtgcctgagctgggcaagccccggcagagccccctgacctatgaagatcatggagccccctttgctggccacctgccccggggcagccctgtgaccacccgggagcccaccccccggctgcaggagggcagcctgagcagcagcaaggccagccaggacaggaagctgaccagcaccccccgggagatcgccaagagcccccacagcacagtgcctgagcaccacccccaccccatcagcccctatgagcacctgctgcggggcgtgtctggagtggacctgtaccgcagccacatccccctggcctttgaccccaccagcatcccccggggcatccccctggatgctgctgctgcctactacctgcccaggcacctggcccccaaccccacctacccccacctgtacccaccctacctgatccggggctacccagacacagctgccctggagaaccggcagaccatcatcaatgactacatcaccagccagcagatgcaccacaatgctgccacagccatggcccagagagctgacatgctgcggggcctgagcccccgggagagcagcctggccctgaactatgctgctggcccccggggcatcatcgacctgagccaggtgccccacctgcctgtgctggtgccccccaccccaggcaccccagccacagccatggaccggctggcctacctgcccacagccccccagcccttcagcagccgccacagcagcagccccctgagccctgggggccccacccacctgaccaagcccaccaccaccagcagcagcgagcgggagcgggaccgggaccgggagcgggaccgggaccgggagcgggagaagagcatcctgaccagcaccaccaccgtggagcacgcccccatctggaggcctggaacagagcagagcagcggcagcagcggcggcggcggcggcagcagcagcaggcctgccagccacagccacgcccaccagcacagccccatcagccccaggacccaggatgccctgcagcagaggcccagcgtgctgcacaacacaggcatgaagggcatcatcacagctgtggagcccagcacccccaccgtgctgcggagcaccagcaccagcagccctgtgcggcctgctgccaccttccccccagccacccactgccccctgggcggcaccctggatggagtgtaccccaccctgatggagcctgtgctgctgcccaaggaggccccccgggtggcccggcctgagcggcccagggctgacaccggccacgccttcctggccaagcccccagcccggagcggcctggagcccgccagcagccccagcaaaggaagtgagccccggcccctggtgccccctgtgtctggccacgccaccatcgcccggaccccagccaagaacctggccccccaccacgccagcccagaccccccagcccccccagccagcgccagtgacccccaccgggagaagacccagagcaagcccttcagcatccaggagctggagctgcggagcctgggctaccacggcagcagctacagccctgagggcgtggagcctgtgtcccctgtgagcagccccagcctgacccatgacaagggcctgcccaagcacctggaggagctggacaagagccacctggagggggagctgcggcccaagcagcccggccctgtgaagctgggcggggaggccgcccacctgccccacctgcggcccctgcctgagagccagcccagcagcagccccctgctgcagacagcccctggggtgaagggccaccagagggtggtgaccctggcccagcacatcagcgaggtgatcacccaggactacaccaggcaccacccccagcagctgagcgcccccctgcctgcccccctgtacagcttccctggggccagctgccctgtgctggacctgcggcggcccccaagtgacctgtacctgcccccaccagaccacggggccccagcccggggcagcccccacagcgagggcggcaagaggagccctgagcccaacaagacctctgtgctgggcggcggagaagatggcatcgagcctgtgtccccacctgagggcatgacagagcccggccacagccgctctgctgtgtaccccctgctgtacagagatggagagcagacagagcccagcaggatgggcagcaagagccctggcaacaccagccagcccccagccttcttcagcaagctgacagagagcaacagcgccatggtgaagagcaagaagcaggagatcaacaagaagctgaacacccacaacagaaatgaacctgagtacaacatcagccagcctggaacagagatcttcaacatgcctgccatcaccggcaccggcctgatgacctaccgcagccaggccgtgcaggagcacgccagcaccaacatgggcctggaggccatcatcaggaaggccctgatgggcaagtatgaccagtgggaggagagcccccccctgagcgccaatgccttcaaccccctgaatgccagcgccagcctgcctgctgccatgcccatcacagctgctgatggccgcagtgaccacaccctgaccagccctgggggcggcggcaaggccaaggtgtctggccggcccagcagcaggaaggccaagagccctgcccctggcctggccagcggggacaggcctccttctgtgtcctctgtgcacagcgagggggactgcaacagaaggacccccctgaccaacagagtgtgggaggaccggcccagcagcgctggcagcacccccttcccctacaaccccctcatcatgaggctgcaggccggcgtgatggccagccccccacctcctggcctgcctgctggcagcggccccctggccggcccccaccacgcctgggatgaggagcccaagcccctgctgtgcagccagtatgagaccctgagtgacagcgagtag

SEQ ID NO: 163849 - DNA, 7545 bp, Artificial Sequence
  derived and/or modified sequence
atgagcggcagcacccagcccgtggcccagacctggcgggccaccgaacccagatatccccctcacagcctgtcttaccccgtgcagatagccaggacacacactgacgtgggtttgttagagtatcaacatcacagtcgcgactatgcttcgcacctgtcacctggctccattatccagccacagagacggcgcccttccctgctttccgaattccagcccggtaatgagaggagccaagaactccacctgaggccagagagtcactcctacctgcccgagctaggcaagagtgaaatggaatttatcgagtcgaaacggccacggttggaactgctccccgatccactgctccgcccttcaccactccttgcgacgggtcaaccggccgggtccgaggatctcacaaaggacagatccttgactggcaagttggaacctgtgtcacccccatccccaccgcataccgaccctgaactggagctggttccaccgcggctctctaaggaagagcttatccagaatatggacagagtggatagggaaatcacaatggtggagcagcaaatcagcaaactgaaaaaaaaacagcagcagctagaagaggaagcagctaagccgcccgagccggagaagcctgtatcccctcctccgattgagtcaaaacaccgttctctcgtccagattatctacgatgaaaatcgtaaaaaagctgaagccgcacatcggatcctggagggcttgggcccccaggttgagctgccattatacaaccagccatcagatacaaggcagtaccacgagaatatcaagatcaatcaggccatgagaaagaagctaattctgtacttcaagcggcgaaatcacgcacggaagcagtgggagcagaagttctgtcagcggtatgaccagttgatggaggcttgggaaaagaaggttgagagaatcgagaacaatccaagacggcgcgcaaaggaaagtaaagtgcgcgaatattacgagaaacaatttccggagattagaaaacagcgcgaactccaggaaaggatgcagtctagagtcggtcagagaggatctggcttgtctatgagcgctgccaggagtgagcacgaggttagcgaaatcatcgacggactcagtgagcaggagaacctggaaaaacagatgaggcagcttgcggtgatccctcctatgttatacgatgcggaccagcagcgcattaaatttattaatatgaatgggctcatggctgatcctatgaaggtatacaaagacaggcaggtcatgaatatgtggagtgagcaggaaaaggaaacctttagagagaagtttatgcagcaccccaagaacttcggtctcatcgcttccttcctggaacgaaagactgtggccgaatgtgtgctatattactatctgacaaaaaagaatgagaattacaagagcctggtgcggcgtagttatagacgccgaggcaaatcacagcagcagcagcagcagcagcagcagcagcagcagcagcagcagcaacagcccatgccaagatcttcgcaagaggaaaaggatgaaaaggagaaggagaaagaggccgagaaggaggaagagaagcccgaggtggaaaacgacaaggaggatcttctgaaggaaaagaccgatgacaccagtggagaggataatgatgagaaggaggctgtcgccagtaaaggtcggaaaacagctaattcccagggtcgcagaaaagggcgtatcacccgtagcatggccaatgaggctaacagcgaggaagcaatcactccccagcagagtgctgagttggccagcatggagttaaacgagtcaagtcgctggacggaagaggagatggaaactgccaagaagggtctactcgaacatggcagaaactggtctgccattgctagaatggtcgggagcaaaacagtgtcacaatgcaaaaacttttactttaattacaaaaagcgacagaatcttgatgaaatcttgcagcagcacaaacttaagatggaaaaagagaggaacgccagacggaaaaaaaagaaagcacccgctgctgctagtgaggaagcagcctttcctccggtcgtcgaggacgaggagatggaggcttccggagtgagtggcaacgaagaagagatggttgaggaggctgaggccctccacgcaagcggaaacgaggtaccgaggggcgagtgctccggccccgcaacagttaacaattcctccgatactgagagcatcccatcaccacataccgaggccgcaaaagatactggccagaatggccctaagcccccagctaccttgggtgccgacggcccaccaccggggcccccaacccctcccccagaggacatacccgcaccaacagagccaactccagcctcggaagctacaggagctcccacacccccaccagcccccccctctccctccgcacccccgcctgtcgtgccgaaggaagaaaaggaggaagaaacagctgcggccccaccagtcgaagaaggcgaagagcaaaagccccctgccgcagaagagctagccgttgacaccgggaaggctgaggaacctgtgaaaagtgagtgcaccgaggaagcagaggagggccctgcaaagggcaaagatgcagaagccgcagaggctactgccgagggggcactgaaggctgagaagaaagagggagggtctggccgcgccactaccgctaagtcgtctggggctccgcaggacagtgatagctcagccacttgctcagcagacgaagtcgacgaggctgaagggggagacaaaaatagactgctttccccacgcccatccctgctcacccccacgggtgatcctcgagccaatgcctccccacaaaagcctttagatctgaaacaattgaagcagcgagctgcagccatcccgcctattcaagtgactaaggtccatgaacccccccgcgaggacgcagctcctaccaagccagccccccccgcccccccacctccacagaacctgcaacctgagtcagatgctcctcaacagcccggctcaagcccccgtggaaaatcccggagtccggctcccccagccgacaaagaagcgtttgctgcagaagcacagaaactgcccggggaccctccttgctggacttcaggcctgcccttcccagttccccctcgcgaggttattaaagccagcccacacgcccccgatcccagcgcgtttagctacgcccctcctgggcaccccctccctctcggactgcatgacacagctagaccggtgctgccaaggccaccaacaatttcaaatccccccccactgatcagctcagcaaagcacccgtccgttctggagaggcagattggtgcaatttcccagggcatgtctgtacagctacatgtgccctactccgagcatgccaaagctcctgtcggaccagttaccatgggtctgccactccctatggacccaaaaaaacttgctccattcagcggggtgaagcaggaacagctcagcccccgtggccaggcaggcccccctgaaagtctgggtgtcccaactgctcaagaggcttccgtgctgcgcggaacagctttgggctctgttcctggaggcagcatcactaagggaattccatccacacgcgtcccaagcgattccgctatcacataccgtggttcaatcactcacggtacaccagccgacgttctatataagggaacaattactcgcattatcggagaggattccccctccaggctcgacaggggtcgcgaagattctttgcctaaaggacatgtgatatatgagggtaagaaaggccacgtgctgagctacgaagggggcatgtcagtcacgcagtgtagcaaagaagatggccgaagttccagcggcccacctcatgagacagcagccccaaaacgcacgtacgatatgatggaggggagggtcggtcgggcaattagcagcgccagtatcgaggggctgatgggcagagcgatccccccagaacgccactctccccatcacctgaaagagcagcatcatatcaggggatctataactcagggaattccgcgctcttatgtggaggcacaagaggactacctcaggagagaggccaaactcctgaagcgggaaggaacaccgcccccaccacccccctctcgggatcttacggaggcttacaagactcaggctttgggccccctgaagctaaaaccagcgcacgaggggctggtggccacagtgaaggaggcgggtcggtctatacacgaaatccctcgcgaggagctgagacacacaccagaactgccattagctcctcgccctcttaaggaagggagcataacacagggcactccactgaaatacgacaccggggcctccaccactggctccaaaaaacacgacgtgcggagcctgatcggttctcctggcagaacatttccccccgttcacccgctcgacgtcatggcagacgcaagggccttggagagagcctgctatgaagaaagtctcaaatcgcgtcccgggacagcaagttcttcagggggatcaatcgccagaggggcgcccgtcatagtgccagagcttgggaagcctaggcagtccccgctcacatacgaagaccacggcgccccgttcgcgggccacctgccgagaggttcacccgtcaccacacgggaaccaacaccgaggctacaggaggggtccctatctagctccaaggcctcccaggatcggaaactcactagcaccccgcgagagattgctaaatcccctcattctacagtgccagaacatcatcctcaccccatctctccttatgaacacctactcagaggggtcagtggtgtggatctctaccggtcccacataccgttggctttcgatccgacctcaatccctagaggcattcctctggacgctgccgccgcatattacctccctcggcacctcgctccgaaccccacctatccacacctttatcctccctacctgatcagggggtatcccgacaccgccgctttggagaatcgtcaaacgatcataaacgactatattacttcccagcaaatgcaccacaatgccgcgaccgccatggcccagagggccgacatgctacgcgggttgtcgccaagagagtcgtccctagcactgaactacgctgctggacctagaggtatcattgacctctcacaggtgccgcatttgccggtgctcgtgcccccaaccccggggacccccgccaccgccatggaccgactcgcctatctccccaccgccccacagccattctcatctcgacatagctcgagtcccctgtccccaggtggcccaacacaccttaccaagcccacgaccacctcttcctccgaaagagaacgtgatagggaccgtgagcgggatcgagacagggagagagaaaaaagcatcttgaccagcaccacaactgtcgagcacgctccgatttggagaccgggtacagagcagtcctctggttcgagcggcggtggagggggtagtagtagtaggccagccagccactcccacgcacaccagcactcccctatcagccctaggactcaggacgccctgcagcaaaggccaagtgttctgcacaacacgggtatgaaaggtatcataaccgctgtggaaccatccactccaactgtgttgaggtccactagtacaagtagccccgtcaggcccgctgcaacctttcctcctgcaactcactgtccactcggcgggacactggatggggtgtatcccactctcatggaacccgtgctgcttcctaaagaggcgccaagagtggctcgtccggagaggcccagagctgatacggggcatgcgtttctcgctaagcctcccgctcgtagtggacttgaaccagcctccagcccttcaaaaggaagcgagcctcgtcctctggtaccaccagtgtcagggcatgctacgatcgctcgcacaccggccaaaaacttagctccacaccacgcttcacccgatccccctgccccgcctgcgtccgctagcgaccctcacagagagaaaactcagtccaagcctttcagcatacaggagctagaactcagaagtttaggatatcacgggagcagctactccccagagggggtggaacccgtgtccccagttagtagtccttccctgacccacgataaaggactgcccaaacacctggaagaactcgataagtcacacctcgagggggaactgaggcccaaacagccaggacccgtgaagctaggaggcgaagccgctcatctccctcacctgcgacccctgcctgaatcccagccctccagtagccccctgctgcaaacggccccaggggtgaagggacatcaaagagttgtaacactcgctcagcacattagtgaggtgattacacaggattacacaagacaccatcctcaacagttatctgcccctctccccgcccccttatactccttcccaggggcatcttgtccagtgctcgatctgcggcgcccccctagcgatctgtatctgcccccgcctgaccatggagctccagctaggggctccccccattccgaaggaggaaaacgttcgcctgagccaaataagacctcggttttaggcgggggcgaggacggcatcgagccagtgtcccctcccgaggggatgacggaacccggtcatagccggtcagctgtatatcctctgttgtatcgtgacggggagcagaccgaaccctctagaatgggtagtaagagcccagggaatacttcccagcctcctgctttcttttccaagctcaccgagagtaatagtgcaatggtgaagtctaaaaaacaagaaatcaacaaaaaactgaatacccacaacaggaatgagcccgagtataacatctcacagcctggaactgagatctttaacatgccagccattactggcaccggcttgatgacctatcgttcacaggccgtgcaggagcacgctagcaccaacatggggctggaagccataattagaaaagccctaatggggaaatatgatcagtgggaagagtcgcctcctctcagcgctaatgcatttaatcccttgaacgcctcggcctccttgcccgctgccatgcctatcaccgccgcagacggcagaagtgaccatacacttactagccctggaggcggaggcaaagccaaggtttccggacgaccttcttcccgcaaagcaaaaagtccagcccccggacttgcaagcggagatcggcccccatcagtgagtagtgtccattctgaaggcgactgtaatcggaggaccccgctgactaaccgcgtgtgggaagaccgccctagctcggcaggctctactccatttccctacaacccattaatcatgcgattgcaagccggcgtgatggcctcgccacctccccccggactccccgcggggtctggcccacttgccgggccacaccacgcatgggatgaagagcctaaaccccttctctgctcccagtacgagactctgagtgacagcgagtag

SEQ ID NO: 163850 - DNA, 7542 bp, Artificial Sequence
  derived and/or modified sequence
atgagcggcagcacccagcccgtggcccagacctggcgggccaccgaaccccgatatcccccccatagcttgtcctacccagtgcagattgccaggacccataccgacgtaggactgctagagtatcagcatcactcccgcgactacgcctcccatttgtcaccaggttctatcatacagccacaaaggagacgccctagcctgctgtcggaatttcaacctggcaacgaaaggtcccaggagctacatttgaggcctgaaagccatagttacctccctgaactggggaagtctgaaatggaattcatcgagagcaaacgccccagacttgagctgcttcctgaccctctgctgcgaccttccccactcttagctactggtcagcccgcagggtctgaggacctaaccaaagaccgaagcttgacaggtaagctggaacccgtctcacctccaagtcccccccacacggatcctgagctggagctggtgccccccaggttatcaaaggaggagctcatacagaatatggacagagttgatcgggaaatcaccatggtagaacagcagatcagtaaacttaagaaaaaacagcagcagctggaggaagaagctgctaagcctccagagccagagaagcccgtgtcccctccccccatcgagagtaaacaccgcagcctggtccagatcatttacgatgaaaaccggaagaaggctgaggccgctcatcgcattttggagggattgggcccacaagtcgagctgcctctttataaccagccctctgacacccggcagtatcacgaaaacattaagataaatcaggcaatgagaaaaaaactgattctgtacttcaagcggcgcaaccacgctcgaaagcaatgggagcagaagttctgtcaaaggtacgatcagttgatggaggcgtgggaaaagaaggtggagcgcattgaaaacaacccaaggaggcgagccaaggagagtaaagtaagggagtattacgaaaagcaatttccagagatccgcaagcagagggaactccaggagagaatgcagagcagggtaggccagcggggaagcggactgtctatgagtgcagcccggtcagagcacgaggtttccgagattatcgatggactttcggagcaggagaatctggagaaacagatgagacagctggccgtgattcctcctatgttgtatgatgcagatcagcaaagaatcaaatttattaacatgaacggactaatggctgacccaatgaaggtgtataaagatcggcaagtaatgaacatgtggtcagagcaggaaaaggagacttttcgagaaaaattcatgcagcacccgaagaacttcggtctcatcgccagcttccttgagcgtaagacagtggccgagtgcgtgctctactactatttaactaagaagaacgagaactataagtccctggtgagacggtcttaccgcaggagaggcaaatcccagcagcagcagcagcaacaacagcagcaacagcagcagcagcagcagcaacccatgcctaggagctctcaggaagagaaggatgagaaggagaaagagaaggaggcagaaaaagaggaagaaaagcccgaagtcgagaacgacaaagaagacctcctgaaagaaaagaccgacgatacatccggtgaggataacgatgagaaggaagccgtggcttctaagggaagaaaaactgccaatagccaaggcaggcgcaaaggcaggattaccagaagtatggcaaatgaggctaactccgaagaggctatcacaccgcagcaatccgccgaactggcctctatggagctaaacgagtcaagcaggtggactgaggaggaaatggagactgccaagaaggggctcctggagcatgggcggaactggtctgctatagctaggatggtcggcagcaaaactgtgtcccagtgcaagaatttctattttaactataaaaaacgtcaaaatcttgacgaaatcttgcaacagcataaactgaagatggagaaagagagaaatgctcggagaaaaaaaaagaaagcccctgctgccgctagcgaggaagctgcttttccgccagttgttgaagacgaagagatggaagcgtcaggggtcagtgggaacgaagaggaaatggtagaggaggccgaagcgcttcacgccagtgggaatgaagtacccagaggcgaatgtagtgggcccgccaccgtcaataatagttctgacaccgagagtatcccttctcctcacactgaagccgcgaaggataccggccaaaatggtcccaagccccctgctacactgggggctgacggacccccaccaggcccccccacacctccacgtcgcactagtagacctacagagcccactcctgcctcggaggcaactggcgcccctacacccccccctgctcctccctctccttctgccccaccccccgttgttcctaaggaggagaaagaggaagagactgccgccgccccgcccgtcgaggaaggggaagaacagaagcctcccgctgctgaagaactcgccgtcgataccggaaaagctgaggagccagtgaaatccgagtgcacagaagaggctgaggaggggcccgcaaagggcaaagatgccgaagcagctgaggccactgcagagggtgccttgaaagcagaaaaaaaggaagggggctcaggacgcgcgaccactgctaagtctagcggtgcgccacaggactcggactcttctgctacgtgttcagccgacgaagtggatgaagccgagggaggggataagaatcgtctgctgagccctcgtccttccctgctgacgccgacaggcgatccgcgggctaatgcctccccacagaagccattggacctcaagcagctgaagcagcgggccgcagcgatcccacccatccaagtaacaaaggtacatgaaccgccgcgcgaggacgcagccccaactaaacccgctccgccagctcctcctccgccacagaacttgcaaccagagtctgacgcaccgcaacaaccaggtagttctccccggggaaagtcccggtctcctgcccctcccgcagacaaggaagcttttgcggccgaagcccagaagctccccggtgacccaccttgttggaccagcggcctgcccttccccgtccctcctagggaggtgataaaagcgagccctcatgcccctgatcccagcgctttcagctacgcgccaccagggcaccctctaccactgggactccacgatacagcccggccggtactgccccgaccccccacaatctcaaatccacctccgctcatctctagcgccaagcatccatccgtgttagagcgacaaattggcgcaatttcgcagggaatgtcagtgcagttgcacgtgccctactccgagcacgccaaagcgcctgtgggaccagtcaccatgggcctgcccctaccaatggatccgaagaaactggcccctttctccggggtgaaacaggagcaactatctcctagagggcaggccgggcctccagagtccttaggcgtacccaccgcgcaagaggcctctgttctgcgtggcacagccctggggagcgttcccgggggttccattaccaaaggaatcccatccactagggtcccttcagattccgcaataacttatcgtggatctatcacccacgggacacctgccgatgtcctgtataagggcactattacgcgaattatcggcgaagattctcctagccggctagatagaggaagagaggacagcctgccgaagggacacgtgatttacgagggaaagaaaggccatgtactgagctacgaagggggaatgtctgtaacacagtgttcaaaggaggacggaaggtctagctccgggccccctcatgagacagctgcccctaaacggacgtacgacatgatggaaggacgtgtgggacgggctatttctagcgcgtcaattgaaggattgatggggcgcgccatccctcccgagagacacagcccccaccatctaaaagaacagcaccacattagaggcagcattactcagggcatccccagatcctacgtggaggcacaagaggattacctacggcgtgaggcaaaactgcttaagagagaggggacgccaccacctcctcctccatctagggatctgacagaggcatataaaacgcaagcactcggaccgctgaagctgaagcctgcacatgagggtctggtagcgaccgttaaggaggcgggccgcagcatacacgaaatcccgcgggaagaactgcggcacactcccgaactgcctcttgctccccgccctctgaaggaaggaagcattacccaggggacacctctaaaatacgataccggcgcctccaccactggctccaaaaaacatgacgttcggagtttaattggcagtcctgggcggacttttccacccgtccatccccttgatgtgatggccgacgcccgggccctcgaaagagcttgctacgaggagtctctgaagtcccggcccggaaccgcaagctcctccggggggtccatagcgagaggagcacccgtcattgttcctgagctaggtaagcctcgtcagtcgcccctgacctacgaagatcatggtgccccctttgcaggacatctgcctcgggggagtccagtcaccactagggagccaacaccaagactgcaggaaggatctctttccagtagtaaggctagtcaggatcgcaagttgacctctacacccagagaaattgctaaatccccccattcaacggttcccgagcaccacccccatcccatctccccctacgagcacctcctgcggggcgtctctggggtcgatctatacagatctcatattcctctggctttcgatccaacgagtatcccccggggcattcctctagacgctgcagccgcctactacctacctcggcatttggctcctaaccccacctatccacatctctacccaccttacctgattcgaggttatcccgacacagcagctctggagaacaggcagacaataatcaacgactatatcacctctcagcagatgcaccacaatgcggcaacagctatggcgcagcgggccgatatgttgagagggctgtcaccacgggaatcatcactcgctttgaattacgctgctggtccacgggggatcatcgacctctcacaggtcccccacctccctgtccttgtcccccccaccccagggacgcctgcaactgctatggatcgcctggcctatctgccaactgctcctcagcccttttcctcaaggcactccagctctcctttatcgcccggaggccctacacatttgacaaagccaaccactactagttcctctgagcgggagagggatagagacagggaacgcgacagggatcgtgagcgggaaaagagcattctcacaagcaccactacagtggagcacgcccctatctggagacccgggaccgagcagtcctctggctctagcggaggcggcggcggaagctcctcgagaccggccagccacagccatgcccatcagcattcacccattagccctcgtacacaggatgctctccagcagcggcccagcgttctgcacaacacaggcatgaaggggatcatcactgccgtggagccgtcgacaccaacagttctgcggtccaccagcacttcttcccccgtccgacctgccgccacttttcccccggccactcattgtccccttggagggaccctcgacggggtgtatcccacgctgatggaaccagtcctgttgccaaaagaggccccgagagtggcccgccccgaaaggccccgcgccgacactggtcacgcattcttagcaaagccccccgctaggagtggtctggagccggcaagctccccttctaaagggagtgagccacgcccccttgtcccgcctgtttctggtcacgctacaattgcacgcaccccagctaaaaaccttgccccacatcacgcctctcccgacccacctgcccctcccgcaagtgcgtcagacccccaccgagaaaagacacagagtaaaccttttagtattcaggagcttgagctccggtcattgggttaccatggctcttcatactcccccgagggggtggagcccgtttcccctgtgtctagtccaagcctgactcacgacaaaggtctacctaaacaccttgaagagctggacaaatcccatcttgaaggggagctgcgccccaagcagccgggacccgtgaagctgggtggcgaggcagctcacctgccacacctcaggcccctacccgaaagccaaccgtcctctagtcctctgcttcagaccgcaccaggcgtgaagggccaccagagagtagtgacactcgctcagcacatctccgaagtgataacacaggactacacacgacaccatccacaacaactgtccgctcccctccccgcgcccctgtacagcttcccaggcgcatcctgcccagttctggacttgaggcggcctccttcagatttatacctcccacctcctgaccacggggctcccgctcgaggctccccccacagcgagggcggaaagcgctcccccgaacctaacaaaacatcggtcttagggggaggcgaggatggcattgaacccgtcagtccacccgagggaatgactgagcccggtcattcacggagcgcagtttatccacttctgtatagggacggcgaacaaactgagccatcgaggatgggctccaagtctcccggcaacactagtcaacccccggcttttttttctaaactgaccgaaagcaactccgccatggtgaagtccaagaaacaggagatcaacaaaaaactcaacacacataatcgcaatgagcctgagtataacatttcacagcccggaaccgaaattttcaatatgcccgcaattaccggcacgggtctgatgacttaccgttcacaggctgtgcaagagcacgcatccactaacatgggactggaagccatcattaggaaagctttaatgggtaagtatgaccagtgggaagagtccccccccctaagcgctaatgcgtttaacccactcaatgccagcgcctctctgcctgcggccatgcccatcaccgcagccgacggccgctcagaccacacactcaccagtccgggaggaggagggaaagccaaagtgtccgggaggccaagctctcgtaaagctaagtctccggcaccggggctagcctccggtgaccggccaccaagcgttagttccgtccatagtgaaggcgactgcaacaggcgcacacctttgacaaaccgagtctgggaggatcgaccaagttccgccggctctacccctttcccttacaacccactgatcatgcgtctgcaggccggcgtcatggcatcacctccccctccaggcctcccggcaggcagcggccccctcgcgggtccccaccacgcctgggacgaagagcctaaaccgctgctttgttcacagtatgagaccctgagcgacagtgagtag

SEQ ID NO: 163851 - DNA, 8533 bp, Artificial Sequence
  derived and/or modified sequence
catgtcgggatccacacagcctgtggcacagacgtggagggccactgagccccgctacccgccccacagcctttcctacccagtgcagatcgcccggacgcacacggacgtcgggctcctggagtaccagcaccactcccgcgactatgcctcccacctgtcgcccggctccatcatccagccccagcggcggaggccctccctgctgtctgagttccagcccgggaatgaacggtcccaggagctccacctgcggccagagtcccactcatacctgcccgagctggggaagtcagagatggagttcattgaaagcaagcgccctcggctagagctgctgcctgaccccctgctgcgaccgtcacccctgctggccacgggccagcctgcgggatctgaagacctcaccaaggaccgtagcctgacgggcaagctggaaccggtgtctccccccagccccccgcacactgaccctgagctggagctggtgccgccacggctgtccaaggaggagctgatccagaacatggaccgcgtggaccgagagatcaccatggtagagcagcagatctctaagctgaagaagaagcagcaacagctggaggaggaggctgccaagccgcccgagcctgagaagcccgtgtcaccgccgcccatcgagtcgaagcaccgcagcctggtgcagatcatctacgacgagaaccggaagaaggctgaagctgcacatcggattctggaaggcctggggccccaggtggagctgccgctgtacaaccagccctccgacacccggcagtatcatgagaacatcaaaataaaccaggcgatgcggaagaagctaatcttgtacttcaagaggaggaatcacgctcggaaacaatgggagcagaagttctgccagcgctatgaccagctcatggaggcctgggagaagaaggtggagcgcatcgagaacaacccccggcggcgggccaaggagagcaaggtgcgcgagtactacgagaagcagttccctgagatccgcaagcagcgcgagctgcaggagcgcatgcagagcagggtgggccagcggggcagtgggctgtccatgtcggccgcccgcagcgagcacgaggtgtcagagatcatcgatggcctctcagagcaggagaacctggagaagcagatgcgccagctggccgtgatcccgcccatgctgtacgacgctgaccagcagcgcatcaagttcatcaacatgaacgggcttatggccgaccccatgaaggtgtacaaagaccgccaggtcatgaacatgtggagtgagcaggagaaggagaccttccgggagaagttcatgcagcatcccaagaactttggcctgatcgcatcattcctggagaggaagacagtggctgagtgcgtcctctattactacctgactaagaagaatgagaactataagagcctggtgagacggagctatcggcgccgcggcaagagccagcagcagcaacaacagcagcagcagcagcagcagcagcagcagcagcagcccatgccccgcagcagccaggaggagaaagatgagaaggagaaggaaaaggaggcggagaaggaggaggagaagccggaggtggagaacgacaaggaagacctcctcaaggagaagacagacgacacctcaggggaggacaacgacgagaaggaggctgtggcctccaaaggccgcaaaactgccaacagccagggaagacgcaaaggccgcatcacccgctcaatggctaatgaggccaacagcgaggaggccatcaccccccagcagagcgccgagctggcctccatggagctgaatgagagttctcgctggacagaagaagaaatggaaacagccaagaaaggtctcctggaacacggccgcaactggtcggccatcgcccggatggtgggctccaagactgtgtcgcagtgtaagaacttctacttcaactacaagaagaggcagaacctcgatgagatcttgcagcagcacaagctgaagatggagaaggagaggaacgcgcggaggaagaagaagaaagcgccggcggcggccagcgaggaggctgcattcccgcccgtggtggaggatgaggagatggaggcgtcgggcgtgagcggaaatgaggaggagatggtggaggaggctgaagccttacatgcctctgggaatgaggtgcccagaggggaatgcagtggcccagccactgtcaacaacagctcagacaccgagagcatcccctctcctcacactgaggccgccaaggacacagggcagaatgggcccaagcccccagccaccctgggcgccgacgggccacccccagggccacccaccccaccaccggaggacatcccggcccccactgagcccaccccggcctctgaagccaccggagcccctacgcccccaccagcacccccatcgccctctgcacctcctcctgtggtccccaaggaggagaaggaggaggagaccgcagcagcgcccccagtggaggagggggaggagcagaagccccccgcggctgaggagctggcagtggacacagggaaggccgaggagcccgtcaagagcgagtgcacggaggaagccgaggaggggccggccaagggcaaggacgcggaggccgctgaggccacggccgagggggcgctcaaggcagagaagaaggagggcgggagcggcagggccaccacagccaagagctcgggcgccccccaggacagcgactccagtgctacctgcagtgcagacgaggtggatgaggccgagggcggcgacaagaaccggctgctgtccccaaggcccagcctcctcaccccgactggcgacccccgggccaatgcctcaccccagaagccactggacctgaagcagctgaagcagcgagcggctgccatcccccccatccaggtcaccaaagtccatgagcccccccgggaggacgcagctcccaccaagccagctcccccagccccaccgccaccgcaaaacctgcagccggagagcgacgcccctcagcagcctggcagcagcccccggggcaagagcaggagcccggcaccccccgccgacaaggaggccttcgcagccgaggcccagaagctgcctggggaccccccttgctggacttccggcctgcccttccccgtgcccccccgtgaggtgatcaaggcctccccgcatgccccggacccctcagccttctcctacgctccacctggtcacccactgcccctgggcctccatgacactgcccggcccgtcctgccgcgcccacccaccatctccaacccgcctcccctcatctcctctgccaagcaccccagcgtcctcgagaggcaaataggtgccatctcccaaggaatgtcggtccagctccacgtcccgtactcagagcatgccaaggccccggtgggccctgtcaccatggggctgcccctgcccatggaccccaaaaagctggcacccttcagcggagtgaagcaggagcagctgtccccacggggccaggctgggccaccggagagcctgggggtgcccacagcccaggaggcgtccgtgctgagagggacagctctgggctcagttccgggcggaagcatcaccaaaggcattcccagcacacgggtgccctcggacagcgccatcacataccgcggctccatcacccacggcacgccagctgacgtcctgtacaagggcaccatcaccaggatcatcggcgaggacagcccgagtcgcttggaccgcggccgggaggacagcctgcccaagggccacgtcatctacgaaggcaagaagggccacgtcttgtcctatgagggtggcatgtctgtgacccagtgctccaaggaggacggcagaagcagctcaggacccccccatgagacggccgcccccaagcgcacctatgacatgatggagggccgcgtgggcagagccatctcctcagccagcatcgaaggtctcatgggccgtgccatcccgccggagcgacacagcccccaccacctcaaagagcagcaccacatccgcgggtccatcacacaagggatccctcggtcctacgtggaggcacaggaggactacctgcgtcgggaggccaagctcctaaagcgggagggcacgcctccgcccccaccgccctcacgggacctgaccgaggcctacaagacgcaggccctgggccccctgaagctgaagccggcccatgagggcctggtggccacggtgaaggaggcgggccgctccatccatgagatcccgcgcgaggagctgcggcacacgcccgagctgcccctggccccgcggccgctcaaggagggctccatcacgcagggcaccccgctcaagtacgacaccggcgcgtccaccactggctccaaaaagcacgacgtacgctccctcatcggcagccccggccggacgttcccacccgtgcacccgctggatgtgatggccgacgcccgggcactggaacgtgcctgctacgaggagagcctgaagagccggccagggaccgccagcagctcggggggctccattgcgcgcggcgccccggtcattgtgcctgagctgggtaagccgcggcagagccccctgacctatgaggaccacggggcaccctttgccggccacctcccacgaggttcgcccgtgaccacgcgggagcccacgccgcgcctgcaggagggcagcctttcgtccagcaaggcatcccaggaccgaaagctgacgtcgacgcctcgtgagatcgccaagtccccgcacagcaccgtgcccgagcaccacccacaccccatctcgccctatgagcacctgcttcggggcgtgagtggcgtggacctgtatcgcagccacatccccctggccttcgaccccacctccataccccgcggcatccctctggacgcagccgctgcctactacctgccccgacacctggcccccaaccccacctacccgcacctgtacccaccctacctcatccgcggctaccccgacacggcggcgctggagaaccggcagaccatcatcaatgactacatcacctcgcagcagatgcaccacaacgcggccaccgccatggcccagcgagctgatatgctgaggggcctctcgccccgcgagtcctcgctggcactcaactacgctgcgggtccccgaggcatcatcgacctgtcccaagtgccacacctgcctgtgctcgtgcccccgacaccaggcaccccagccaccgccatggaccgccttgcctacctccccaccgcgccccagcccttcagcagccgccacagcagctccccactctccccaggaggtccaacacacttgacaaaaccaaccaccacgtcctcgtccgagcgggagcgagaccgggatcgagagcgggaccgggatcgggagcgggaaaagtccatcctcacgtccaccacgacggtggagcacgcacccatctggagacctggtacagagcagagcagcggcagcagcggcgggggtgggggcagcagcagccgccccgcctcccactcccatgcccaccagcactcgcccatctcccctcggacccaggatgccctccagcagagacccagtgtgcttcacaacacaggcatgaagggtatcatcaccgctgtggagcccagcacgcccacggtcctgaggtccacctccacctcctcacccgttcgcccggctgccacattcccacctgccacccactgcccactgggcggcaccctcgatggggtctaccctaccctcatggagcccgtcttgctgcccaaggaggccccccgggtcgcccggccagagcggccccgagcagacaccggccatgccttcctcgccaagcccccagcccgctccgggctggagcccgcctcctcccccagcaagggctcggagccccggcccctagtgcctcctgtctctggccacgccaccatcgcccgcacccctgcgaagaacctcgcacctcaccacgccagcccggacccgccggcgccacctgcctcggcctcggacccgcaccgggaaaagactcaaagtaaacccttttccatccaggaactggaactccgttctctgggttaccacggcagcagctacagccccgaaggggtggagcccgtcagccctgtgagctcacccagtctgacccacgacaaggggctccccaagcacctggaagagctcgacaagagccacctggagggggagctgcggcccaagcagccaggccccgtgaagcttggcggggaggccgcccacctcccacacctgcggccgctgcctgagagccagccctcgtccagcccgctgctccagaccgccccaggggtcaaaggtcaccagcgggtggtcaccctggcccagcacatcagtgaggtcatcacacaggactacacccggcaccacccacagcagctcagcgcacccctgcccgcccccctctactccttccctggggccagctgccccgtcctggacctccgccgcccacccagtgacctctacctcccgcccccggaccatggtgccccggcccgtggctccccccacagcgaagggggcaagaggtctccagagccaaacaagacgtcggtcttgggtggtggtgaggacggtattgaacctgtgtccccaccggagggcatgacggagccagggcactcccggagtgctgtgtacccgctgctgtaccgggatggggaacagacggagcccagcaggatgggctccaagtctccaggcaacaccagccagccgccagccttcttcagcaagctgaccgagagcaactccgccatggtcaagtccaagaagcaagagatcaacaagaagctgaacacccacaaccggaatgagcctgaatacaatatcagccagcctgggacggagatcttcaatatgcccgccatcaccggaacaggccttatgacctatagaagccaggcggtgcaggaacatgccagcaccaacatggggctggaggccataattagaaaggcactcatgggtaaatatgaccagtgggaagagtccccgccgctcagcgccaatgcttttaaccctctgaatgccagtgccagcctgcccgctgctatgcccataaccgctgctgacggacggagtgaccacacactcacctcgccaggtggcggcgggaaggccaaggtctctggcagacccagcagccgaaaagccaagtccccggccccgggcctggcatctggggaccggccaccctctgtctcctcagtgcactcggagggagactgcaaccgccggacgccgctcaccaaccgcgtgtgggaggacaggccctcgtccgcaggttccacgccattcccctacaaccccctgatcatgcggctgcaggcgggtgtcatggcttccccacccccaccgggcctccccgcgggcagcgggcccctcgctggcccccaccacgcctgggacgaggagcccaagccactgctctgctcgcagtacgagacactctccgacagcgagtgactcagaacagggcgggggggggggcggtgtcaggtcccagcgagccacaggaacggccctgcaggagcagggcggctgccgactcccccaaccaaggaaggagcccctgagtccgcctgcgcctccatccatctgtccgtccagagccggcatccttgcctgtctaaagccttaactaagactcccgccccgggctggccctgtgcagaccttactcaggggatgtttacctggtgctcgggaagggaggggaaggggccggggagggggcacggcaggcgtgtggcagccacacgcaggcggccagggcggccagggacccaaagcaggatgaccacgcacctccacgccactgcctcccccgaatgcatttggaaccaaagtctaaactgagctcgcagcccccgcgccctccctccgcctcccatcccgcttagcgctctggacagatggacgcaggccctgtccagcccccagtgcgctcgttccggtccccacagactgccccagccaacgagattgctggaaaccaagtcaggccaggtgggcggacaaaagggccaggtgcggcctggggggaacggatgctccgaggactggactgtttttttcacacatcgttgccgcagcggtgggaaggaaaggcagatgtaaatgatgtgttggtttacagggtatatttttgataccttcaatgaattaattcagatgttttacgcaaggaaggacttacccagtattactgctgctgtgcttttgatctctgcttaccgttcaagaggcgtgtgcaggccgacagtcggtgaccccatcactcgcaggaccaagggggcggggactgctggctcacgccccgctgtgtcctccctccctcccttccttgggcagaatgaattcgatgcgtattctgtggccgccatctgcgcagggtggtggtattctgtcatttacacacgtcgttctaattaaaaagcgaattatactcca

SEQ ID NO: 163852 - DNA, 8529 bp, Artificial Sequence
  derived and/or modified sequence
catgtcgggatccacacagcctgtggcacagacgtggagggccactgagccccgctacccgccccacagcctttcctacccagtgcagatcgcccggacgcacacggacgtcgggctcctggagtaccagcaccactcccgcgactatgcctcccacctgtcgcccggctccatcatccagccccagcggcggaggccctccctgctgtctgagttccagcccgggaatgaacggtcccaggagctccacctgcggccagagtcccactcatacctgcccgagctggggaagtcagagatggagttcattgaaagcaagcgccctcggctagagctgctgcctgaccccctgctgcgaccgtcacccctgctggccacgggccagcctgcgggatctgaagacctcaccaaggaccgtagcctgacgggcaagctggaaccggtgtctccccccagccccccgcacactgaccctgagctggagctggtgccgccacggctgtccaaggaggagctgatccagaacatggaccgcgtggaccgagagatcaccatggtagagcagcagatctctaagctgaagaagaagcagcaacagctggaggaggaggctgccaagccgcccgagcctgagaagcccgtgtcaccgccgcccatcgagtcgaagcaccgcagcctggtgcagatcatctacgacgagaaccggaagaaggctgaagctgcacatcggattctggaaggcctggggccccaggtggagctgccgctgtacaaccagccctccgacacccggcagtatcatgagaacatcaaaataaaccaggcgatgcggaagaagctaatcttgtacttcaagaggaggaatcacgctcggaaacaatgggagcagaagttctgccagcgctatgaccagctcatggaggcctgggagaagaaggtggagcgcatcgagaacaacccccggcggcgggccaaggagagcaaggtgcgcgagtactacgagaagcagttccctgagatccgcaagcagcgcgagctgcaggagcgcatgcagagcagggtgggccagcggggcagtgggctgtccatgtcggccgcccgcagcgagcacgaggtgtcagagatcatcgatggcctctcagagcaggagaacctggagaagcagatgcgccagctggccgtgatcccgcccatgctgtacgacgctgaccagcagcgcatcaagttcatcaacatgaacgggcttatggccgaccccatgaaggtgtacaaagaccgccaggtcatgaacatgtggagtgagcaggagaaggagaccttccgggagaagttcatgcagcatcccaagaactttggcctgatcgcatcattcctggagaggaagacagtggctgagtgcgtcctctattactacctgactaagaagaatgagaactataagagcctggtgagacggagctatcggcgccgcggcaagagccagcagcagcaacaacagcagcagcagcagcagcagcagcagcagcagcagcccatgccccgcagcagccaggaggagaaagatgagaaggagaaggaaaaggaggcggagaaggaggaggagaagccggaggtggagaacgacaaggaagacctcctcaaggagaagacagacgacacctcaggggaggacaacgacgagaaggaggctgtggcctccaaaggccgcaaaactgccaacagccagggaagacgcaaaggccgcatcacccgctcaatggctaatgaggccaacagcgaggaggccatcaccccccagcagagcgccgagctggcctccatggagctgaatgagagttctcgctggacagaagaagaaatggaaacagccaagaaaggtctcctggaacacggccgcaactggtcggccatcgcccggatggtgggctccaagactgtgtcgcagtgtaagaacttctacttcaactacaagaagaggcagaacctcgatgagatcttgcagcagcacaagctgaagatggagaaggagaggaacgcgcggaggaagaagaagaaagcgccggcggcggccagcgaggaggctgcattcccgcccgtggtggaggatgaggagatggaggcgtcgggcgtgagcggaaatgaggaggagatggtggaggaggctgaagccttacatgcctctgggaatgaggtgcccagaggggaatgcagtggcccagccactgtcaacaacagctcagacaccgagagcatcccctctcctcacactgaggccgccaaggacacagggcagaatgggcccaagcccccagccaccctgggcgccgacgggccacccccagggccacccaccccaccacggaggacatcccggcccactgagcccaccccggcctctgaagccaccggagcccctacgcccccaccagcacccccatcgccctctgcacctcctcctgtggtccccaaggaggagaaggaggaggagaccgcagcagcgcccccagtggaggagggggaggagcagaagccccccgcggctgaggagctggcagtggacacagggaaggccgaggagcccgtcaagagcgagtgcacggaggaagccgaggaggggccggccaagggcaaggacgcggaggccgctgaggccacggccgagggggcgctcaaggcagagaagaaggagggcgggagcggcagggccaccacagccaagagctcgggcgccccccaggacagcgactccagtgctacctgcagtgcagacgaggtggatgaggccgagggcggcgacaagaaccggctgctgtccccaaggcccagcctcctcaccccgactggcgacccccgggccaatgcctcaccccagaagccactggacctgaagcagctgaagcagcgagcggctgccatcccccccatccaggtcaccaaagtccatgagcccccccgggaggacgcagctcccaccaagccagctcccccagccccaccgccaccgcaaaacctgcagccggagagcgacgcccctcagcagcctggcagcagcccccggggcaagagcaggagcccggcaccccccgccgacaaggaggccttcgcagccgaggcccagaagctgcctggggaccccccttgctggacttccggcctgcccttccccgtgcccccccgtgaggtgatcaaggcctccccgcatgccccggacccctcagccttctcctacgctccacctggtcacccactgcccctgggcctccatgacactgcccggcccgtcctgccgcgcccacccaccatctccaacccgcctcccctcatctcctctgccaagcaccccagcgtcctcgagaggcaaataggtgccatctcccaaggaatgtcggtccagctccacgtcccgtactcagagcatgccaaggccccggtgggccctgtcaccatggggctgcccctgcccatggaccccaaaaagctggcacccttcagcggagtgaagcaggagcagctgtccccacggggccaggctgggccaccggagagcctgggggtgcccacagcccaggaggcgtccgtgctgagagggacagctctgggctcagttccgggcggaagcatcaccaaaggcattcccagcacacgggtgccctcggacagcgccatcacataccgcggctccatcacccacggcacgccagctgacgtcctgtacaagggcaccatcaccaggatcatcggcgaggacagcccgagtcgcttggaccgcggccgggaggacagcctgcccaagggccacgtcatctacgaaggcaagaagggccacgtcttgtcctatgagggtggcatgtctgtgacccagtgctccaaggaggacggcagaagcagctcaggacccccccatgagacggccgcccccaagcgcacctatgacatgatggagggccgcgtgggcagagccatctcctcagccagcatcgaaggtctcatgggccgtgccatcccgccggagcgacacagcccccaccacctcaaagagcagcaccacatccgcgggtccatcacacaagggatccctcggtcctacgtggaggcacaggaggactacctgcgtcgggaggccaagctcctaaagcgggagggcacgcctccgcccccaccgccctcacgggacctgaccgaggcctacaagacgcaggccctgggccccctgaagctgaagccggcccatgagggcctggtggccacggtgaaggaggcgggccgctccatccatgagatcccgcgcgaggagctgcggcacacgcccgagctgcccctggccccgcggccgctcaaggagggctccatcacgcagggcaccccgctcaagtacgacaccggcgcgtccaccactggctccaaaaagcacgacgtacgctccctcatcggcagccccggccggacgttcccacccgtgcacccgctggatgtgatggccgacgcccgggcactggaacgtgcctgctacgaggagagcctgaagagccggccagggaccgccagcagctcggggggctccattgcgcgcggcgccccggtcattgtgcctgagctgggtaagccgcggcagagccccctgacctatgaggaccacggggcaccctttgccggccacctcccacgaggttcgcccgtgaccacgcgggagcccacgccgcgcctgcaggagggcagcctttcgtccagcaaggcatcccaggaccgaaagctgacgtcgacgcctcgtgagatcgccaagtccccgcacagcaccgtgcccgagcaccacccacaccccatctcgccctatgagcacctgcttcggggcgtgagtggcgtggacctgtatcgcagccacatccccctggccttcgaccccacctccataccccgcggcatccctctggacgcagccgctgcctactacctgccccgacacctggcccccaaccccacctacccgcacctgtacccaccctacctcatccgcggctaccccgacacggcggcgctggagaaccggcagaccatcatcaatgactacatcacctcgcagcagatgcaccacaacgcggccaccgccatggcccagcgagctgatatgctgaggggcctctcgccccgcgagtcctcgctggcactcaactacgctgcgggtccccgaggcatcatcgacctgtcccaagtgccacacctgcctgtgctcgtgcccccgacaccaggcaccccagccaccgccatggaccgccttgcctacctccccaccgcgccccagcccttcagcagccgccacagcagctccccactctccccaggaggtccaacacacttgacaaaaccaaccaccacgtcctcgtccgagcgggagcgagaccgggatcgagagcgggaccgggatcgggagcgggaaaagtccatcctcacgtccaccacgacggtggagcacgcacccatctggagacctggtacagagcagagcagcggcagcagcggcgggggtgggggcagcagcagccgccccgcctcccactcccatgcccaccagcactcgcccatctcccctcggacccaggatgccctccagcagagacccagtgtgcttcacaacacaggcatgaagggtatcatcaccgctgtggagcccagcacgcccacggtcctgaggtccacctccacctcctcacccgttcgcccggctgccacattcccacctgccacccactgcccactgggcggcaccctcgatggggtctaccctaccctcatggagcccgtcttgctgcccaaggaggccccccgggtcgcccggccagagcggccccgagcagacaccggccatgccttcctcgccaagcccccagcccgctccgggctggagcccgcctcctcccccagcaagggctcggagccccggcccctagtgcctcctgtctctggccacgccaccatcgcccgcacccctgcgaagaacctcgcacctcaccacgccagcccggacccgccggcgccacctgcctcggcctcggacccgcaccgggaaaagactcaaagtaaacccttttccatccaggaactggaactccgttctctgggttaccacggcagcagctacagccccgaaggggtggagcccgtcagccctgtgagctcacccagtctgacccacgacaaggggctccccaagcacctggaagagctcgacaagagccacctggagggggagctgcggcccaagcagccaggccccgtgaagcttggcggggaggccgcccacctcccacacctgcggccgctgcctgagagccagccctcgtccagcccgctgctccagaccgccccaggggtcaaaggtcaccagcgggtggtcaccctggcccagcacatcagtgaggtcatcacacaggactacacccggcaccacccacagcagctcagcgcacccctgcccgcccccctctactccttccctggggccagctgccccgtcctggacctccgccgcccacccagtgacctctacctcccgcccccggaccatggtgccccggcccgtggctccccccacagcgaagggggcaagaggtctccagagccaaacaagacgtcggtcttgggtggtggtgaggacggtattgaacctgtgtccccaccggagggcatgacggagccagggcactcccggagtgctgtgtacccgctgctgtaccgggatggggaacagacggagcccagcaggatgggctccaagtctccaggcaacaccagccagccgccagccttcttcagcaagctgaccgagagcaactccgccatggtcaagtccaagaagcaagagatcaacaagaagctgaacacccacaaccggaatgagcctgaatacaatatcagccagcctgggacggagatcttcaatatgcccgccatcaccggaacaggccttatgacctatagaagccaggcggtgcaggaacatgccagcaccaacatggggctggaggccataattagaaaggcactcatgggtaaatatgaccagtgggaagagtccccgccgctcagcgccaatgcttttaaccctctgaatgccagtgccagcctgcccgctgctatgcccataaccgctgctgacggacggagtgaccacacactcacctcgccaggtggcggcgggaaggccaaggtctctggcagacccagcagccgaaaagccaagtccccggccccgggcctggcatctggggaccggccaccctctgtctcctcagtgcactcggagggagactgcaaccgccggacgccgctcaccaaccgcgtgtgggaggacaggccctcgtccgcaggttccacgccattcccctacaaccccctgatcatgcggctgcaggcgggtgtcatggcttccccacccccaccgggcctccccgcgggcagcgggcccctcgctggcccccaccacgcctgggacgaggagcccaagccactgctctgctcgcagtacgagacactctccgacagcgagtgactcagaacagggcgggggggggggcggtgtcaggtcccagcgagccacaggaacggccctgcaggagcagggcggctgccgactcccccaaccaaggaaggagcccctgagtccgcctgcgcctccatccatctgtccgtccagagccggcatccttgcctgtctaaagccttaactaagactcccgccccgggctggccctgtgcagaccttactcaggggatgtttacctggtgctcgggaagggaggggaaggggccggggagggggcacggcaggcgtgtggcagccacacgcaggcggccagggcggccagggacccaaagcaggatgaccacgcacctccacgccactgcctcccccgaatgcatttggaaccaaagtctaaactgagctcgcagcccccgcgccctccctccgcctcccatcccgcttagcgctctggacagatggacgcaggccctgtccagcccccagtgcgctcgttccggtccccacagactgccccagccaacgagattgctggaaaccaagtcaggccaggtgggcggacaaaagggccaggtgcggcctggggggaacggatgctccgaggactggactgtttttttcacacatcgttgccgcagcggtgggaaggaaaggcagatgtaaatgatgtgttggtttacagggtatatttttgataccttcaatgaattaattcagatgttttacgcaaggaaggacttacccagtattactgctgctgtgcttttgatctctgcttaccgttcaagaggcgtgtgcaggccgacagtcggtgaccccatcactcgcaggaccaagggggcggggactgctggctcacgccccgctgtgtcctccctccctcccttccttgggcagaatgaattcgatgcgtattctgtggccgccatctgcgcagggtggtggtattctgtcatttacacacgtcgttctaattaaaaagcgaattatactcc

SEQ ID NO: 163853 - DNA, 7544 bp, Artificial Sequence
  derived and/or modified sequence
atgtccggcagtacgcagcccgtggctcagacttggagagcaaccgagcctcgttaccctccccactccctgtcttatccggtacagatcgctcggactcacactgatgtcggactcctagaatatcaacaccacagtagggactatgcctctcatctgagccccggaagcattatccaaccccagcgtcgacgaccatccctcttgtccgagtttcagcccggaaacgaaagatctcaagagctacatctgaggccagaatctcatagttatctcccagagttaggaaaatccgaaatggaattcattgaatctaagcggcctcgcctggaattgcttcccgacccgctgttgcgtcctagcccacttctggccacagggcagccagcaggatcggaagaccttactaaggatcggtcactgacgggtaagctggaaccagtgagtcctcctagtcctccccacactgatccagagctcgagttggtcccgcctcgactgtcgaaggaagaactaatccagaatatggacagggtggaccgggagattaccatggtagaacagcagatttcaaagctgaagaagaaacaacagcagctggaggaggaagcagcaaagcctccggagccagagaagcccgtcagtcctcccccaatagaaagtaaacaccgtagcttggtgcagattatctatgacgagaatcggaaaaaggcagaggccgctcataggatcctagagggactgggaccacaagtggagctgccactgtataaccagccttcagatactcggcagtaccacgagaacattaaaatcaatcaggcaatgcggaagaagttaatactgtactttaagaggcggaatcacgctcgcaaacaatgggaacagaagttttgtcagagatacgatcagctgatggaagcttgggagaagaaggtagagagaattgagaataatccacgacgccgtgccaaggagtcaaaggtccgcgagtactacgagaagcagtttcccgaaattagaaagcagagggagctccaagaaagaatgcaatcccgcgtggggcagagaggatccgggctgtccatgtcagctgcaaggtccgaacacgaggtgtctgagatcattgatgggctgtctgagcaggagaatctcgagaaacaaatgcggcaattggccgtaatcccaccaatgctctacgacgccgatcagcagcggatcaaatttatcaacatgaacggactgatggcagacccaatgaaagtctataaggatagacaggttatgaatatgtggtctgagcaggagaaggaaacattcagagagaagtttatgcagcatcccaagaattttggcctgattgccagttttttggagcgcaagacagtagctgaatgtgtcttatattactacctgactaagaaaaacgagaattataagagcctagtccggaggtcctaccggcgaaggggaaagagccaacagcagcagcagcagcaacagcagcagcagcagcagcagcaacagcagcccatgccacgctccagccaagaggagaaagatgagaaggagaaagagaaggaggctgaaaaggaagaagagaagccagaggtggagaatgacaaagaagaccttttaaaggaaaagaccgatgacacttccggggaggataacgatgagaaagaggccgtggcttccaaaggcagaaaaaccgccaattcgcagggcagacgtaagggtaggattactcgctcaatggcaaacgaggccaacagtgaggaagctattacacctcagcaatccgccgaactggccagcatggagttaaatgaaagttcaaggtggactgaagaggaaatggagactgccaagaaggggctcctggagcacggcaggaactggtccgctatcgccaggatggtggggtccaaaactgtgagccagtgcaaaaacttctattttaattataaaaaacgacagaacctggacgagatcctgcagcagcacaaactaaaaatggaaaaagaacgaaacgcacgacgcaagaagaaaaaagcacccgctgccgctagcgaagaggccgcattcccccctgtggtggaagacgaagagatggaggccagtggtgtctctggtaacgaagaagaaatggttgaggaggcagaagcccttcacgcctcagggaatgaggttccccgaggggaatgcagcgggccagccaccgttaacaattcctcggatacggaatcaatccccagcccccatactgaggccgctaaggacacgggacagaatgggccaaaaccccctgcaacattaggtgcagacggcccacccccaggaccaccgactccccctcctgaggatattccagcccctacggagcctacaccagctagcgaagccaccggagcgcctacacctcccccagcacccccatcacccagtgccccacctcctgtggtaccaaaagaggaaaaggaggaggaaaccgcagcggctccaccggtggaagaaggtgaggagcagaaacctccggcagccgaggagctggccgttgatacgggcaaggccgaggagccggtgaaatcagagtgtaccgaagaagccgaagagggacccgcaaagggcaaggacgctgaagcggctgaggcaaccgctgaaggggcactgaaagcggagaaaaaagaaggcggttcggggagagccactacagcgaaaagcagcggtgcacctcaggacagtgattctagcgcaacttgcagtgccgatgaggtggacgaggccgagggtggagataagaaccggcttctgtcccccagacccagcctgctgactcccaccggcgatccacgcgctaacgcctccccgcagaagccactagacttgaagcaacttaaacagagagccgcagctatacctcccattcaggtgaccaaggtgcacgaacctcccagagaagatgctgcaccgacaaagccagccccaccagcacctccgcctcctcagaatctccagcctgaatcagacgcgccacagcaacccggatctagccctcgaggaaaatcccgcagtccagcccctccagccgataaagaagcattcgccgctgaggcccagaagcttccaggcgaccctccttgctggacgagcgggctgcccttccccgtcccgcctcgcgaagtcatcaaagcaagccctcacgcacctgatcccagcgccttttcatacgcccctccaggccatcccctgccactaggcttgcatgatactgcgagaccagtactgccccgacctcccaccattagcaacccaccacccctaattagttctgccaaacaccccagtgtcctagaaagacagataggggcaatatcccagggcatgagtgtgcagctgcacgtgccatacagcgaacacgcaaaggccccagtgggacccgtaacaatgggcctgcccttacccatggacccaaagaaacttgcgcctttctccggcgtgaaacaagaacaattgtcacccagggggcaggcgggacccccagaatccttaggcgtccccactgcccaggaagcttctgtgctgaggggtacagctttagggagcgtcccgggaggctccataacgaagggcattccctctacacgcgtcccttccgacagtgccatcacctataggggatctattactcacggtacaccagcagatgtgctttataagggaaccatcacaagaataattggcgaggattcgccttctcgcctggatcgcggtcgggaagatagtctgcctaaaggccatgttatctatgaggggaagaaaggccatgttctctcgtatgagggcggaatgagcgtcacacagtgtagtaaagaagatgggcgatcatcttctggcccacctcacgagacagctgccccaaaacgtacctatgatatgatggagggtcgggtggggagagccatcagcagtgcatccatcgagggcctgatggggagggcaatccccccagaacgacattcaccacaccacctgaaagaacagcatcatatccgcggttcaattacacagggtattccaaggtcatacgtggaggcccaggaggattacctgagacgcgaggcaaagctgctcaagagggaaggcactcctccacccccacctccttcacgcgatctcactgaggcctataaaacccaggcccttggtcctctgaaactgaagccggctcacgagggacttgttgccactgtgaaggaggccggaaggtccatacacgagatacctcgggaggaattaagacatacacccgagctgccactggctcccagacccttgaaagagggatctatcactcagggcacccccctgaaatatgacactggagcgtccaccaccgggtcgaaaaagcatgacgttcgatcactgatcggctctcctggcagaacgttcccaccagtgcatccgctggacgtgatggctgatgcccgtgcccttgagcgcgcatgttatgaggagtcactgaaatcccgccctggaaccgcatcctcttcaggtggttctatagctcggggtgcacctgtgattgttcccgaactgggtaaacctcgccagtctcccctcacatatgaagatcacggggcaccgttcgcagggcacctacccaggggatcacctgtgactacccgcgagcctactcccaggctgcaggagggctcattgtcctcttcaaaggcatctcaggaccgaaagctgacaagcaccccaagggagatagccaagtcaccacattccacagtccccgaacaccatcctcaccccatttccccatatgaacacctgcttagaggcgtttctggtgtggatttgtacaggtcgcatattccgcttgcctttgatccaacgtctatacctagggggatcccattggatgctgctgccgcatactatctgcctcggcatctggcccctaaccctacgtacccccacttataccccccatatctcatcagagggtacccagacacggcagctttggagaatcgacagacaatcatcaatgattacattacaagccagcagatgcaccacaatgcggctactgcaatggcacaacgcgcagacatgctcagagggctcagccctcgcgaatccagtttggcactgaactacgcagcaggtccccgaggcatcatagacctgtcccaagtgccacacttaccagtcttggtgcctccaacacccggaacccccgctactgccatggacagactggcatatctccccacagctccgcagccattttcgtctcggcactcttcctcgcctcttagccccggtggacctactcacctcaccaagccgactactacctcttcctctgaacgggagcgcgatagggatcgggaacgggaccgcgatcgggagcgagaaaaatctatcctgacctcaaccacaaccgtggagcacgccccaatctggcgcccaggcaccgaacagagctccggctcctcaggaggtggcggtggatcctcctccaggccagccagtcacagtcatgcccaccagcattctccaatctctccccgaactcaggacgcactgcagcagcgccctagtgttctccacaacacagggatgaaaggaattatcacagcggtggaacccagcacccccaccgtgctgagatccacttcgacgagcagcccagtgcgcccagccgcaacctttcctccagcaactcattgccctctaggcggaaccctggacggtgtttaccctactctcatggaacccgtcctgttgcccaaggaagctcctcgcgtcgccagaccagaacgcccacgcgcagatacagggcacgcattcctggcaaaaccccctgctcgctctggcttggaaccagcaagcagtccgagcaaggggtcggaaccacgcccattagtccctcccgtgtcaggtcatgccacaatagccagaacccccgcaaagaatctcgcccctcatcatgccagccctgatccgcctgcaccccctgcatcggcttcagacccacacagagagaagacacagtccaaaccttttagcattcaggaactggaactacgatccctcggctaccatggctccagttattcccccgagggcgtggagcctgtcagcccagtatcctccccttccttaactcacgacaaaggcctgcctaagcacctggaagagctcgacaagagccacttggaaggcgagcttcggcctaagcagccgggtccagtcaagctggggggagaggccgcacatctgccccatctgcgaccgctccctgagtcacagccaagttccagtcctctgctgcagacagctccaggcgtcaaggggcaccagagggtcgtaaccctggctcagcatatttctgaagttataacccaagactatacccgccaccatccgcagcagttgtccgctccactgccagcaccactgtactctttccccggtgccagttgcccggtcctggaccttagaaggcccccatcggacctgtaccttccccctccagatcacggagcccctgctaggggaagcccacactcggagggaggcaagcggagtccagagcccaacaagacttcggtattggggggtggtgaagacggtatcgaacccgtgtccccgccagagggcatgacagaacccggacatagtagaagtgcggtgtatcctctcctctaccgagacggcgaacagacagagccaagtcggatggggtcaaaaagcccagggaatacaagccagcctccggcattctttagtaaacttaccgaatcaaattctgctatggtaaagtccaaaaagcaagaaattaacaaaaagctcaacacccacaaccgcaatgagccagagtacaatattagtcagccaggcacagaaatattcaacatgcctgccatcacgggtacaggcttaatgacctatcgctctcaggcagtccaggagcatgcatcaacaaacatgggactggaggcaatcatccgcaaagctctgatggggaagtacgatcaatgggaagagtcacctcctttgagcgctaatgctttcaatcccctcaacgcctcagccagcctaccagccgctatgccgatcacagccgctgacgggcgttccgaccacacactcacttcccccggaggtgggggtaaagctaaggtctctgggaggccaagcagccgaaaggccaagtcccccgctcctggcctcgcctccggagatcggccaccctcagtgagttcggtgcactccgaaggcgactgcaatcggagaacacccctgacaaaccgggtgtgggaggaccggccttcttccgcgggatccacgcctttcccatataatccacttattatgaggttacaagcaggcgtcatggctagcccacctccgcctggtctgccagccggaagcggaccattggccggaccccaccacgcttgggatgaagaacctaagccattgctgtgtagccagtacgaaacgctaagcgatagcgagta

SEQ ID NO: 163854 - DNA, 7541 bp, Artificial Sequence
  derived and/or modified sequence
atgtctgggagtacccagccggtcgcacagacctggagagccaccgagcctcgctatcctcctcacagtctgtcctaccctgttcagattgctcgcacacacaccgacgtcggactgctagagtatcagcaccacagtagagattacgctagccacctttcccccggatcaattatccaaccgcagaggagacgtccctctttgctttcggagttccagccaggaaatgagaggtcgcaggaattacacctgcggcctgagagtcacagctatctaccagaactggggaagtccgagatggaatttattgagtccaagcggccacggctcgagctcctgcccgatcccctgttgcgaccgagccctcttctcgctaccggtcagcccgcaggtagcgaagatctgacaaaggatagatccctgaccggcaaactcgagcctgtaagcccccctagcccccctcataccgaccccgaactggaactggttccacccagactatctaaggaagaactgatccaaaatatggaccgtgtggaccgggaaatcactatggttgagcagcaaatatcaaaattgaaaaagaaacagcagcagctggaagaggaggcggctaagccacccgaacccgagaagcctgttagtccacccccaatagaatccaaacacaggtccctggtgcaaattatctacgatgaaaacaggaaaaaggccgaggcagcgcacagaatcctggaagggctgggcccacaggtggagctgcctctgtacaatcagccctcagatacccgacagtatcatgagaatataaagattaatcaggcgatgcggaagaaactcatcctctactttaaacgcagaaatcacgctcgtaagcagtgggagcaaaaattctgtcagaggtacgaccagctaatggaggcctgggagaagaaggtcgaacgaattgagaataatcctaggaggagggctaaagaaagcaaggtgcgagagtactatgagaagcaattccctgaaatcagaaaacaacgtgaactgcaggagcggatgcagtcgcgcgtcggacagagggggagtggactttcaatgtctgccgcacggtctgaacatgaggtgagcgagattattgatgggctgtcagagcaggaaaatctggaaaagcagatgaggcaactcgcagtcattccacccatgctctacgatgccgaccagcagagaataaaatttatcaatatgaatggccttatggccgatcctatgaaagtatataaagatagacaggtcatgaacatgtggtctgagcaggagaaagaaactttccgggaaaagtttatgcagcaccccaagaacttcggcttgatcgcaagctttctggagcggaagacggtggccgagtgcgtcttgtactattatttgactaaaaagaacgagaactataaaagtctcgtccgcaggtcctatcggaggcgcggaaaatctcaacagcagcagcagcagcagcagcagcaacagcagcagcaacaacagcagcctatgcccagatcctcgcaggaggagaaggatgagaaggagaaggagaaagaggcagaaaaagaggaagaaaagccggaggtagaaaatgataaagaggacttgctcaaggagaaaaccgatgacacttcgggtgaggataacgacgagaaagaagctgtggcctccaaaggacggaagaccgctaacagccaaggcaggaggaaaggtaggattactcgatccatggccaatgaggctaattccgaagaggcgatcacacctcagcagtccgccgagctcgcatccatggagctcaacgagtcatctcggtggacggaagaggagatggaaactgcgaagaagggcctccttgagcacgggaggaattggagtgccattgcacggatggtgggttctaagactgtgagccagtgtaagaatttctattttaattacaagaaaagacagaacctagatgaaatactgcagcagcataagcttaagatggaaaaagaacgcaatgcgcgacgcaaaaaaaagaaggcaccagctgccgcatctgaagaggcagcctttccccctgtcgttgaggatgaggagatggaggccagtggagtgagcggcaacgaagaagaaatggtcgaagaggctgaggccctgcacgccagtggaaacgaggtcccgagaggcgaatgcagcggaccagcaaccgtaaacaactcttctgatactgaaagtatcccatctcctcataccgaggccgcaaaggatactggacagaatggtcccaagcctccagctaccctcggagcagatggacctccacctggacctccaactcccccacgcagaaccagccgacctacagagcctacaccggcaagtgaggccactggcgcaccaacaccgccacccgcacctcccagcccatctgctccccctcctgtggtgcccaaggaagagaaagaagaagagacggctgccgctcccccagtggaggagggcgaggaacaaaaacccccagcagccgaggaattggccgtagatacggggaaagccgaggaacctgtaaagagcgaatgtaccgaagaggcagaagaaggacccgcaaaaggaaaggacgccgaagctgctgaggcgacagccgagggcgctctcaaagcggagaagaaggaagggggaagcgggagggcaaccacagctaagagtagcggagccccacaggatagcgattcctcggccacgtgtagtgccgatgaggtagatgaggccgaaggcggtgacaaaaacaggctcctttcaccaaggccctcattactcacaccaacgggggaccctcgagccaacgctagcccccagaagcctctcgacctcaagcagctcaaacagagggccgcagcaatcccacccatccaggttaccaaggttcatgagcctccaagggaggatgccgcacctaccaagcccgcacctccggcaccaccaccccctcagaacttgcagcccgagtccgatgcaccacagcagcccggaagcagccccagaggcaaatctcgttccccagccccacctgccgacaaagaggccttcgcggcagaagctcagaaactacctggagatcccccttgttggactagtgggctcccattcccggtgccacccagggaagtgattaaggcttcaccgcacgctcctgacccatccgccttctcatacgcacctcccggacatcccttacccctaggacttcatgatactgcacgtcctgtgttgcccagacctccaaccatttccaacccaccacccttgatcagtagcgcaaaacacccctctgttctggagcgccaaataggcgctatttctcagggaatgtcagtgcagttgcacgtaccctacagcgagcacgctaaagcccctgtgggcccagtcacgatgggactacctcttcccatggacccaaaaaaattggcccctttctccggtgtgaagcaggagcaactttctccaaggggccaggctggacccccagaatccctcggggtgccaacagcccaggaggcttcagttcttaggggaactgccctagggtctgtgccgggtggcagcattaccaaaggcattccatccactcgagtgccttcagacagcgccattacctatagaggttctatcacccatggtacaccagccgacgtgctctacaagggtaccattacaaggatcattggcgaggattcaccctctcggctcgaccgagggagggaggactctttacccaaggggcacgtcatttacgaggggaagaagggccacgtactgagttacgaagggggaatgagcgttacccagtgctccaaggaagacgggagaagttcctcaggccctccacacgaaacagctgccccaaaacggacctatgatatgatggaggggagagttgggagagccatcagttcagctagtatcgaaggcctcatgggtcgggctattccaccggagagacacagcccacaccacctaaaagagcagcatcacatacgcggaagcattacacagggtatccccagatcctacgtcgaggcccaggaagattatctccgtagagaagccaagctgctcaaaagagaaggaaccccccctccgccacctcccagccgcgatttgaccgaggcatacaaaactcaagcactgggacctcttaaactgaagcctgcacacgaaggcttagtggctacagtcaaagaggccggaagatctatccacgagattccacgagaggagttgagacacacaccagagctgccattagccccacggcctcttaaggagggctccattactcaggggactcctcttaagtatgataccggagcctcgaccacagggtccaagaagcatgacgtgcgctcactgatcggcagcccaggccgaacctttccccctgttcatccactggatgtcatggctgacgcacgcgcactggaaagagcttgttatgaggagagcctgaaatctaggccaggcaccgctagcagcagtggaggatcaatagcaagaggagctccagtcatcgtgcccgaactcggcaaaccgagacaaagtcccttgacctacgaggaccatggggctccctttgcgggacatcttcctcgaggatcacctgtgactaccagggagcccacacctcggctccaggagggatccctgtcaagtagcaaggcaagccaggaccggaaactcacctccactccccgtgaaattgctaaaagtcctcatagcactgtacccgaacaccacccacacccaatctctccctatgaacaccttctcagaggcgtatccggcgtagacctgtatcgcagtcacatcccattggcgttcgacccaacaagcatcccgaggggcatccctcttgatgccgctgccgcatactacttacccaggcaccttgcaccaaacccaacttacccccacctctatccaccttacctgattcgcggatatccagatacggctgcactggagaatagacagaccatcattaatgactatataacctcacaacagatgcaccacaatgccgctaccgctatggcccagcgcgcagacatgcttcgaggcctgtcaccacgggagagcagcctggctctcaactatgcggctggtcctagaggcattatcgacttatcccaagtgccacaccttccagtcttagtcccgcctacgcccggaacacccgctactgcaatggatcgtctggcatacctccccaccgcgcctcagcccttctcgtcccgccattctagctctccgttgtctccaggtggtccaactcacctaactaagcctactacaactagtagcagtgaaagggaacgcgaccgtgaccgagagcgagaccgtgaccgggagcgggagaagagtattcttacatcaactacaaccgtcgaacacgccccaatttggcgcccaggaactgagcagagctccggtagctccgggggaggcggtgggtcttccagtagaccagccagtcacagccacgctcaccaacattctcccatcagtcctagaacccaggacgctctgcagcagcggccttctgttctccacaatacaggcatgaaaggaatcatcaccgccgtcgagccaagcacacctactgtcctgaggagtacctcaacaagttctcccgtgagacctgcggcaacctttccgcctgccacacactgtcctttgggcggtaccttggacggtgtttatccaacattaatggagcccgtgttgcttcctaaagaggcccctcgtgtcgccaggcctgagaggcctagggcagatactggacacgcgtttctggccaaacccccagctagatctggattagagccggcatccagtccttcgaaaggtagcgagccgagacctctcgtcccgcctgtatccggccatgctactattgccagaacaccagctaagaatctggctcctcaccatgcttcaccagaccctccagcccctcccgcttccgcttctgacccccatagggaaaaaacacagagtaaacctttctctattcaggaactggaattgagaagcctgggataccatggtagcagttacagccctgagggcgttgagcctgtgagtccagtgtcgagtccctcgcttacacacgataagggactccccaaacacttggaagagctggacaagtctcaccttgaaggggagctgaggccaaaacaaccaggccctgtcaaactcggcggtgaggctgcacacctcccacacctgcgccctctgcccgaatcccagccctcctccagcccactcctccagactgccccaggagtgaaaggacatcagcgagtagtcactctggcccagcatatcagcgaagtgataacacaggactacactaggcaccatcctcagcagctgtccgcacctctgcccgcaccgctgtatagctttcccggtgcctcatgtccggtcctcgatctgcgcaggccaccttccgacctctatcttcctcctcctgaccacggggctcccgcaagaggatccccccatagtgaaggaggcaagaggtcacccgaacccaataagacatcagtgttgggcggaggtgaggatggtatcgaaccagtctcacctcctgagggcatgacagaaccaggtcatagccggagcgccgtatatccactgctatatcgcgatggggaacaaaccgagccctccaggatgggatccaaatcacccggaaacacttcccagccacccgcttttttttccaaactgaccgaatccaactcagccatggtaaaatctaagaagcaggagatcaacaagaagctaaatacgcacaatagaaatgagcccgaatacaacatcagtcagcccggaacagagatcttcaatatgcccgctatcacgggtacgggtctgatgacctatcggtcacaggccgtgcaggagcatgctagcaccaatatgggtttggaagccatcattcggaaggccttaatggggaagtacgatcagtgggaggagtctcctccactcagtgctaacgctttcaatccgcttaatgccagtgcctctctccccgcagccatgccgatcacagctgccgatggtcgatccgaccacaccctcacctcccctgggggtggcggaaaggcaaaggtgtcagggagaccgtcatctagaaaagcgaaatcaccagcacctggcctggctagtggggacaggcccccttcggtatctagcgtccattctgaaggagattgcaacaggagaacacctctaactaacagggtctgggaagatcgacctagctcagccggttccaccccattcccatacaatccactcattatgcgcttgcaggcaggcgttatggcttctccccctccgccaggtttgccagccggttcaggaccgctcgccggaccccaccacgcatgggatgaggaacctaaacctttactctgcagccagtatgagactctgtcggacagtgagta

SEQ ID NO: 163855 - DNA, 7545 bp, Artificial Sequence
  derived and/or modified sequence
atgagcggcagcacccagcccgtggcccagacctggagagccaccgagcccagataccccccccacagcctgagctaccccgtgcagatcgccagaacccacaccgacgtgggcctgctggagtaccagcaccacagcagagactacgccagccacctgagccccggcagcatcatccagccccagagaagaagacccagcctgctgagcgagttccagcccggcaacgagagaagccaggagctgcacctgagacccgagagccacagctacctgcccgagctgggcaagagcgagatggagttcatcgagagcaagagacccagactggagctgctgcccgaccccctgctgagacccagccccctgctggccaccggccagcccgccggcagcgaggacctgaccaaggacagaagcctgaccggcaagctggagcccgtgagcccccccagccccccccacaccgaccccgagctggagctggtgccccccagactgagcaaggaggagctgatccagaacatggacagagtggacagagagatcaccatggtggagcagcagatcagcaagctgaagaagaagcagcagcagctggaggaggaggccgccaagccccccgagcccgagaagcccgtgagccccccccccatcgagagcaagcacagaagcctggtgcagatcatctacgacgagaacagaaagaaggccgaggccgcccacagaatcctggagggcctgggcccccaggtggagctgcccctgtacaaccagcccagcgacaccagacagtaccacgagaacatcaagatcaaccaggccatgagaaagaagctgatcctgtacttcaagagaagaaaccacgccagaaagcagtgggagcagaagttctgccagagatacgaccagctgatggaggcctgggagaagaaggtggagagaatcgagaacaaccccagaagaagagccaaggagagcaaggtgagagagtactacgagaagcagttccccgagatcagaaagcagagagagctgcaggagagaatgcagagcagagtgggccagagaggcagcggcctgagcatgagcgccgccagaagcgagcacgaggtgagcgagatcatcgacggcctgagcgagcaggagaacctggagaagcagatgagacagctggccgtgatcccccccatgctgtacgacgccgaccagcagagaatcaagttcatcaacatgaacggcctgatggccgaccccatgaaggtgtacaaggacagacaggtgatgaacatgtggagcgagcaggagaaggagaccttcagagagaagttcatgcagcaccccaagaacttcggcctgatcgccagcttcctggagagaaagaccgtggccgagtgcgtgctgtactactacctgaccaagaagaacgagaactacaagagcctggtgagaagaagctacagaagaagaggcaagagccagcagcagcagcagcagcagcagcagcagcagcagcagcagcagcagcagcccatgcccagaagcagccaggaggagaaggacgagaaggagaaggagaaggaggccgagaaggaggaggagaagcccgaggtggagaacgacaaggaggacctgctgaaggagaagaccgacgacaccagcggcgaggacaacgacgagaaggaggccgtggccagcaagggcagaaagaccgccaacagccagggcagaagaaagggcagaatcaccagaagcatggccaacgaggccaacagcgaggaggccatcaccccccagcagagcgccgagctggccagcatggagctgaacgagagcagcagatggaccgaggaggagatggagaccgccaagaagggcctgctggagcacggcagaaactggagcgccatcgccagaatggtgggcagcaagaccgtgagccagtgcaagaacttctacttcaactacaagaagagacagaacctggacgagatcctgcagcagcacaagctgaagatggagaaggagagaaacgccagaagaaagaagaagaaggcccccgccgccgccagcgaggaggccgccttcccccccgtggtggaggacgaggagatggaggccagcggcgtgagcggcaacgaggaggagatggtggaggaggccgaggccctgcacgccagcggcaacgaggtgcccagaggcgagtgcagcggccccgccaccgtgaacaacagcagcgacaccgagagcatccccagcccccacaccgaggccgccaaggacaccggccagaacggccccaagccccccgccaccctgggcgccgacggccccccccccggcccccccacccccccccccgaggacatccccgcccccaccgagcccacccccgccagcgaggccaccggcgcccccacccccccccccgccccccccagccccagcgcccccccccccgtggtgcccaaggaggagaaggaggaggagaccgccgccgccccccccgtggaggagggcgaggagcagaagccccccgccgccgaggagctggccgtggacaccggcaaggccgaggagcccgtgaagagcgagtgcaccgaggaggccgaggagggccccgccaagggcaaggacgccgaggccgccgaggccaccgccgagggcgccctgaaggccgagaagaaggagggcggcagcggcagagccaccaccgccaagagcagcggcgccccccaggacagcgacagcagcgccacctgcagcgccgacgaggtggacgaggccgagggcggcgacaagaacagactgctgagccccagacccagcctgctgacccccaccggcgaccccagagccaacgccagcccccagaagcccctggacctgaagcagctgaagcagagagccgccgccatcccccccatccaggtgaccaaggtgcacgagccccccagagaggacgccgcccccaccaagcccgccccccccgcccccccccccccccagaacctgcagcccgagagcgacgccccccagcagcccggcagcagccccagaggcaagagcagaagccccgccccccccgccgacaaggaggccttcgccgccgaggcccagaagctgcccggcgaccccccctgctggaccagcggcctgcccttccccgtgccccccagagaggtgatcaaggccagcccccacgcccccgaccccagcgccttcagctacgccccccccggccaccccctgcccctgggcctgcacgacaccgccagacccgtgctgcccagaccccccaccatcagcaaccccccccccctgatcagcagcgccaagcaccccagcgtgctggagagacagatcggcgccatcagccagggcatgagcgtgcagctgcacgtgccctacagcgagcacgccaaggcccccgtgggccccgtgaccatgggcctgcccctgcccatggaccccaagaagctggcccccttcagcggcgtgaagcaggagcagctgagccccagaggccaggccggcccccccgagagcctgggcgtgcccaccgcccaggaggccagcgtgctgagaggcaccgccctgggcagcgtgcccggcggcagcatcaccaagggcatccccagcaccagagtgcccagcgacagcgccatcacctacagaggcagcatcacccacggcacccccgccgacgtgctgtacaagggcaccatcaccagaatcatcggcgaggacagccccagcagactggacagaggcagagaggacagcctgcccaagggccacgtgatctacgagggcaagaagggccacgtgctgagctacgagggcggcatgagcgtgacccagtgcagcaaggaggacggcagaagcagcagcggccccccccacgagaccgccgcccccaagagaacctacgacatgatggagggcagagtgggcagagccatcagcagcgccagcatcgagggcctgatgggcagagccatcccccccgagagacacagcccccaccacctgaaggagcagcaccacatcagaggcagcatcacccagggcatccccagaagctacgtggaggcccaggaggactacctgagaagagaggccaagctgctgaagagagagggcaccccccccccccccccccccagcagagacctgaccgaggcctacaagacccaggccctgggccccctgaagctgaagcccgcccacgagggcctggtggccaccgtgaaggaggccggcagaagcatccacgagatccccagagaggagctgagacacacccccgagctgcccctggcccccagacccctgaaggagggcagcatcacccagggcacccccctgaagtacgacaccggcgccagcaccaccggcagcaagaagcacgacgtgagaagcctgatcggcagccccggcagaaccttcccccccgtgcaccccctggacgtgatggccgacgccagagccctggagagagcctgctacgaggagagcctgaagagcagacccggcaccgccagcagcagcggcggcagcatcgccagaggcgcccccgtgatcgtgcccgagctgggcaagcccagacagagccccctgacctacgaggaccacggcgcccccttcgccggccacctgcccagaggcagccccgtgaccaccagagagcccacccccagactgcaggagggcagcctgagcagcagcaaggccagccaggacagaaagctgaccagcacccccagagagatcgccaagagcccccacagcaccgtgcccgagcaccacccccaccccatcagcccctacgagcacctgctgagaggcgtgagcggcgtggacctgtacagaagccacatccccctggccttcgaccccaccagcatccccagaggcatccccctggacgccgccgccgcctactacctgcccagacacctggcccccaaccccacctacccccacctgtaccccccctacctgatcagaggctaccccgacaccgccgccctggagaacagacagaccatcatcaacgactacatcaccagccagcagatgcaccacaacgccgccaccgccatggcccagagagccgacatgctgagaggcctgagccccagagagagcagcctggccctgaactacgccgccggccccagaggcatcatcgacctgagccaggtgccccacctgcccgtgctggtgccccccacccccggcacccccgccaccgccatggacagactggcctacctgcccaccgccccccagcccttcagcagcagacacagcagcagccccctgagccccggcggccccacccacctgaccaagcccaccaccaccagcagcagcgagagagagagagacagagacagagagagagacagagacagagagagagagaagagcatcctgaccagcaccaccaccgtggagcacgcccccatctggagacccggcaccgagcagagcagcggcagcagcggcggcggcggcggcagcagcagcagacccgccagccacagccacgcccaccagcacagccccatcagccccagaacccaggacgccctgcagcagagacccagcgtgctgcacaacaccggcatgaagggcatcatcaccgccgtggagcccagcacccccaccgtgctgagaagcaccagcaccagcagccccgtgagacccgccgccaccttcccccccgccacccactgccccctgggcggcaccctggacggcgtgtaccccaccctgatggagcccgtgctgctgcccaaggaggcccccagagtggccagacccgagagacccagagccgacaccggccacgccttcctggccaagccccccgccagaagcggcctggagcccgccagcagccccagcaagggcagcgagcccagacccctggtgccccccgtgagcggccacgccaccatcgccagaacccccgccaagaacctggccccccaccacgccagccccgacccccccgccccccccgccagcgccagcgacccccacagagagaagacccagagcaagcccttcagcatccaggagctggagctgagaagcctgggctaccacggcagcagctacagccccgagggcgtggagcccgtgagccccgtgagcagccccagcctgacccacgacaagggcctgcccaagcacctggaggagctggacaagagccacctggagggcgagctgagacccaagcagcccggccccgtgaagctgggcggcgaggccgcccacctgccccacctgagacccctgcccgagagccagcccagcagcagccccctgctgcagaccgcccccggcgtgaagggccaccagagagtggtgaccctggcccagcacatcagcgaggtgatcacccaggactacaccagacaccacccccagcagctgagcgcccccctgcccgcccccctgtacagcttccccggcgccagctgccccgtgctggacctgagaagaccccccagcgacctgtacctgcccccccccgaccacggcgcccccgccagaggcagcccccacagcgagggcggcaagagaagccccgagcccaacaagaccagcgtgctgggcggcggcgaggacggcatcgagcccgtgagcccccccgagggcatgaccgagcccggccacagcagaagcgccgtgtaccccctgctgtacagagacggcgagcagaccgagcccagcagaatgggcagcaagagccccggcaacaccagccagccccccgccttcttcagcaagctgaccgagagcaacagcgccatggtgaagagcaagaagcaggagatcaacaagaagctgaacacccacaacagaaacgagcccgagtacaacatcagccagcccggcaccgagatcttcaacatgcccgccatcaccggcaccggcctgatgacctacagaagccaggccgtgcaggagcacgccagcaccaacatgggcctggaggccatcatcagaaaggccctgatgggcaagtacgaccagtgggaggagagcccccccctgagcgccaacgccttcaaccccctgaacgccagcgccagcctgcccgccgccatgcccatcaccgccgccgacggcagaagcgaccacaccctgaccagccccggcggcggcggcaaggccaaggtgagcggcagacccagcagcagaaaggccaagagccccgcccccggcctggccagcggcgacagaccccccagcgtgagcagcgtgcacagcgagggcgactgcaacagaagaacccccctgaccaacagagtgtgggaggacagacccagcagcgccggcagcacccccttcccctacaaccccctgatcatgagactgcaggccggcgtgatggccagcccccccccccccggcctgcccgccggcagcggccccctggccggcccccaccacgcctgggacgaggagcccaagcccctgctgtgcagccagtacgagaccctgagcgacagcgagtag

SEQ ID NO: 163856 - DNA, 7542 bp, Artificial Sequence
  derived and/or modified sequence
atgagcggcagcacccagcccgtggcccagacctggagagccaccgagcccagataccccccccacagcctgagctaccccgtgcagatcgccagaacccacaccgacgtgggcctgctggagtaccagcaccacagcagagactacgccagccacctgagccccggcagcatcatccagccccagagaagaagacccagcctgctgagcgagttccagcccggcaacgagagaagccaggagctgcacctgagacccgagagccacagctacctgcccgagctgggcaagagcgagatggagttcatcgagagcaagagacccagactggagctgctgcccgaccccctgctgagacccagccccctgctggccaccggccagcccgccggcagcgaggacctgaccaaggacagaagcctgaccggcaagctggagcccgtgagcccccccagccccccccacaccgaccccgagctggagctggtgccccccagactgagcaaggaggagctgatccagaacatggacagagtggacagagagatcaccatggtggagcagcagatcagcaagctgaagaagaagcagcagcagctggaggaggaggccgccaagccccccgagcccgagaagcccgtgagccccccccccatcgagagcaagcacagaagcctggtgcagatcatctacgacgagaacagaaagaaggccgaggccgcccacagaatcctggagggcctgggcccccaggtggagctgcccctgtacaaccagcccagcgacaccagacagtaccacgagaacatcaagatcaaccaggccatgagaaagaagctgatcctgtacttcaagagaagaaaccacgccagaaagcagtgggagcagaagttctgccagagatacgaccagctgatggaggcctgggagaagaaggtggagagaatcgagaacaaccccagaagaagagccaaggagagcaaggtgagagagtactacgagaagcagttccccgagatcagaaagcagagagagctgcaggagagaatgcagagcagagtgggccagagaggcagcggcctgagcatgagcgccgccagaagcgagcacgaggtgagcgagatcatcgacggcctgagcgagcaggagaacctggagaagcagatgagacagctggccgtgatcccccccatgctgtacgacgccgaccagcagagaatcaagttcatcaacatgaacggcctgatggccgaccccatgaaggtgtacaaggacagacaggtgatgaacatgtggagcgagcaggagaaggagaccttcagagagaagttcatgcagcaccccaagaacttcggcctgatcgccagcttcctggagagaaagaccgtggccgagtgcgtgctgtactactacctgaccaagaagaacgagaactacaagagcctggtgagaagaagctacagaagaagaggcaagagccagcagcagcagcagcagcagcagcagcagcagcagcagcagcagcagcagcccatgcccagaagcagccaggaggagaaggacgagaaggagaaggagaaggaggccgagaaggaggaggagaagcccgaggtggagaacgacaaggaggacctgctgaaggagaagaccgacgacaccagcggcgaggacaacgacgagaaggaggccgtggccagcaagggcagaaagaccgccaacagccagggcagaagaaagggcagaatcaccagaagcatggccaacgaggccaacagcgaggaggccatcaccccccagcagagcgccgagctggccagcatggagctgaacgagagcagcagatggaccgaggaggagatggagaccgccaagaagggcctgctggagcacggcagaaactggagcgccatcgccagaatggtgggcagcaagaccgtgagccagtgcaagaacttctacttcaactacaagaagagacagaacctggacgagatcctgcagcagcacaagctgaagatggagaaggagagaaacgccagaagaaagaagaagaaggcccccgccgccgccagcgaggaggccgccttcccccccgtggtggaggacgaggagatggaggccagcggcgtgagcggcaacgaggaggagatggtggaggaggccgaggccctgcacgccagcggcaacgaggtgcccagaggcgagtgcagcggccccgccaccgtgaacaacagcagcgacaccgagagcatccccagcccccacaccgaggccgccaaggacaccggccagaacggccccaagccccccgccaccctgggcgccgacggccccccccccggcccccccaccccccccagaagaaccagcagacccaccgagcccacccccgccagcgaggccaccggcgcccccacccccccccccgccccccccagccccagcgcccccccccccgtggtgcccaaggaggagaaggaggaggagaccgccgccgccccccccgtggaggagggcgaggagcagaagccccccgccgccgaggagctggccgtggacaccggcaaggccgaggagcccgtgaagagcgagtgcaccgaggaggccgaggagggccccgccaagggcaaggacgccgaggccgccgaggccaccgccgagggcgccctgaaggccgagaagaaggagggcggcagcggcagagccaccaccgccaagagcagcggcgccccccaggacagcgacagcagcgccacctgcagcgccgacgaggtggacgaggccgagggcggcgacaagaacagactgctgagccccagacccagcctgctgacccccaccggcgaccccagagccaacgccagcccccagaagcccctggacctgaagcagctgaagcagagagccgccgccatcccccccatccaggtgaccaaggtgcacgagccccccagagaggacgccgcccccaccaagcccgccccccccgcccccccccccccccagaacctgcagcccgagagcgacgccccccagcagcccggcagcagccccagaggcaagagcagaagccccgccccccccgccgacaaggaggccttcgccgccgaggcccagaagctgcccggcgaccccccctgctggaccagcggcctgcccttccccgtgccccccagagaggtgatcaaggccagcccccacgcccccgaccccagcgccttcagctacgccccccccggccaccccctgcccctgggcctgcacgacaccgccagacccgtgctgcccagaccccccaccatcagcaaccccccccccctgatcagcagcgccaagcaccccagcgtgctggagagacagatcggcgccatcagccagggcatgagcgtgcagctgcacgtgccctacagcgagcacgccaaggcccccgtgggccccgtgaccatgggcctgcccctgcccatggaccccaagaagctggcccccttcagcggcgtgaagcaggagcagctgagccccagaggccaggccggcccccccgagagcctgggcgtgcccaccgcccaggaggccagcgtgctgagaggcaccgccctgggcagcgtgcccggcggcagcatcaccaagggcatccccagcaccagagtgcccagcgacagcgccatcacctacagaggcagcatcacccacggcacccccgccgacgtgctgtacaagggcaccatcaccagaatcatcggcgaggacagccccagcagactggacagaggcagagaggacagcctgcccaagggccacgtgatctacgagggcaagaagggccacgtgctgagctacgagggcggcatgagcgtgacccagtgcagcaaggaggacggcagaagcagcagcggccccccccacgagaccgccgcccccaagagaacctacgacatgatggagggcagagtgggcagagccatcagcagcgccagcatcgagggcctgatgggcagagccatcccccccgagagacacagcccccaccacctgaaggagcagcaccacatcagaggcagcatcacccagggcatccccagaagctacgtggaggcccaggaggactacctgagaagagaggccaagctgctgaagagagagggcaccccccccccccccccccccagcagagacctgaccgaggcctacaagacccaggccctgggccccctgaagctgaagcccgcccacgagggcctggtggccaccgtgaaggaggccggcagaagcatccacgagatccccagagaggagctgagacacacccccgagctgcccctggcccccagacccctgaaggagggcagcatcacccagggcacccccctgaagtacgacaccggcgccagcaccaccggcagcaagaagcacgacgtgagaagcctgatcggcagccccggcagaaccttcccccccgtgcaccccctggacgtgatggccgacgccagagccctggagagagcctgctacgaggagagcctgaagagcagacccggcaccgccagcagcagcggcggcagcatcgccagaggcgcccccgtgatcgtgcccgagctgggcaagcccagacagagccccctgacctacgaggaccacggcgcccccttcgccggccacctgcccagaggcagccccgtgaccaccagagagcccacccccagactgcaggagggcagcctgagcagcagcaaggccagccaggacagaaagctgaccagcacccccagagagatcgccaagagcccccacagcaccgtgcccgagcaccacccccaccccatcagcccctacgagcacctgctgagaggcgtgagcggcgtggacctgtacagaagccacatccccctggccttcgaccccaccagcatccccagaggcatccccctggacgccgccgccgcctactacctgcccagacacctggcccccaaccccacctacccccacctgtaccccccctacctgatcagaggctaccccgacaccgccgccctggagaacagacagaccatcatcaacgactacatcaccagccagcagatgcaccacaacgccgccaccgccatggcccagagagccgacatgctgagaggcctgagccccagagagagcagcctggccctgaactacgccgccggccccagaggcatcatcgacctgagccaggtgccccacctgcccgtgctggtgccccccacccccggcacccccgccaccgccatggacagactggcctacctgcccaccgccccccagcccttcagcagcagacacagcagcagccccctgagccccggcggccccacccacctgaccaagcccaccaccaccagcagcagcgagagagagagagacagagacagagagagagacagagacagagagagagagaagagcatcctgaccagcaccaccaccgtggagcacgcccccatctggagacccggcaccgagcagagcagcggcagcagcggcggcggcggcggcagcagcagcagacccgccagccacagccacgcccaccagcacagccccatcagccccagaacccaggacgccctgcagcagagacccagcgtgctgcacaacaccggcatgaagggcatcatcaccgccgtggagcccagcacccccaccgtgctgagaagcaccagcaccagcagccccgtgagacccgccgccaccttcccccccgccacccactgccccctgggcggcaccctggacggcgtgtaccccaccctgatggagcccgtgctgctgcccaaggaggcccccagagtggccagacccgagagacccagagccgacaccggccacgccttcctggccaagccccccgccagaagcggcctggagcccgccagcagccccagcaagggcagcgagcccagacccctggtgccccccgtgagcggccacgccaccatcgccagaacccccgccaagaacctggccccccaccacgccagccccgacccccccgccccccccgccagcgccagcgacccccacagagagaagacccagagcaagcccttcagcatccaggagctggagctgagaagcctgggctaccacggcagcagctacagccccgagggcgtggagcccgtgagccccgtgagcagccccagcctgacccacgacaagggcctgcccaagcacctggaggagctggacaagagccacctggagggcgagctgagacccaagcagcccggccccgtgaagctgggcggcgaggccgcccacctgccccacctgagacccctgcccgagagccagcccagcagcagccccctgctgcagaccgcccccggcgtgaagggccaccagagagtggtgaccctggcccagcacatcagcgaggtgatcacccaggactacaccagacaccacccccagcagctgagcgcccccctgcccgcccccctgtacagcttccccggcgccagctgccccgtgctggacctgagaagaccccccagcgacctgtacctgcccccccccgaccacggcgcccccgccagaggcagcccccacagcgagggcggcaagagaagccccgagcccaacaagaccagcgtgctgggcggcggcgaggacggcatcgagcccgtgagcccccccgagggcatgaccgagcccggccacagcagaagcgccgtgtaccccctgctgtacagagacggcgagcagaccgagcccagcagaatgggcagcaagagccccggcaacaccagccagccccccgccttcttcagcaagctgaccgagagcaacagcgccatggtgaagagcaagaagcaggagatcaacaagaagctgaacacccacaacagaaacgagcccgagtacaacatcagccagcccggcaccgagatcttcaacatgcccgccatcaccggcaccggcctgatgacctacagaagccaggccgtgcaggagcacgccagcaccaacatgggcctggaggccatcatcagaaaggccctgatgggcaagtacgaccagtgggaggagagcccccccctgagcgccaacgccttcaaccccctgaacgccagcgccagcctgcccgccgccatgcccatcaccgccgccgacggcagaagcgaccacaccctgaccagccccggcggcggcggcaaggccaaggtgagcggcagacccagcagcagaaaggccaagagccccgcccccggcctggccagcggcgacagaccccccagcgtgagcagcgtgcacagcgagggcgactgcaacagaagaacccccctgaccaacagagtgtgggaggacagacccagcagcgccggcagcacccccttcccctacaaccccctgatcatgagactgcaggccggcgtgatggccagcccccccccccccggcctgcccgccggcagcggccccctggccggcccccaccacgcctgggacgaggagcccaagcccctgctgtgcagccagtacgagaccctgagcgacagcgagtag

SEQ ID NO: 163857 - protein, 952 aa, Artificial Sequence
  derived and/or modified sequence
MAEGGAADLDTQRSDIATLLKTSLRKGDTWYLVDSRWFKQWKKYVGFDSWDKYQMGDQNVYPGPIDNSGLLKDGDAQSLKEHLIDELDYILLPTEGWNKLVSWYTLMEGQEPIARKVVEQGMFVKHCKVEVYLTELKLCENGNMNNVVTRRFSKADTIDTIEKEIRKIFSIPDEKETRLWNKYMSNTFEPLNKPDSTIQDAGLYQGQVLVIEQKNEDGTWPRGPSTPNVKNSNYCLPSYTAYKNYDYSEPGRNNEQPGLCGLSNLGNTCFMNSAIQCLSNTPPLTEYFLNDKYQEELNFDNPLGMRGEIAKSYAELIKQMWSGKFSYVTPRAFKTQVGRFAPQFSGYQQQDCQELLAFLLDGLHEDLNRIRKKPYIQLKDADGRPDKVVAEEAWENHLKRNDSIIVDIFHGLFKSTLVCPECAKISVTFDPFCYLTLPLPMKKERTLEVYLVRMDPLTKPMQYKVVVPKIGNILDLCTALSALSGIPADKMIVTDIYNHRFHRIFAMDENLSSIMERDDIYVFEININRTEDTEHVIIPVCLREKFRHSSYTHHTGSSLFGQPFLMAVPRNNTEDKLYNLLLLRMCRYVKISTETEETEGSLHCCKDQNINGNGPNGIHEEGSPSEMETDEPDDESSQDQELPSENENSQSEDSVGGDNDSENGLCTEDTCKGQLTGHKKRLFTFQFNNLGNTDINYIKDDTRHIRFDDRQLRLDERSFLALDWDPDLKKRYFDENAAEDFEKHESVEYKPPKKPFVKLKDCIELFTTKEKLGAEDPWYCPNCKEHQQATKKLDLWSLPPVLVVHLKRFSYSRYMRDKLDTLVDFPINDLDMSEFLINPNAGPCRYNLIAVSNHYGGMGGGHYTAFAKNKDDGKWYYFDDSSVSTASEDQIVSKAAYVLFYQRQDTFSGTGFFPLDRETKGASAATGIPLESDEDSNDNDNDIENENCMHTN

SEQ ID NO: 163858 - protein, 956 aa, Artificial Sequence
  derived and/or modified sequence
MAEGGAADLDTQRSDIATLLKTSLRKGDTWYLVDSRWFKQWKKYVGFDSWDKYQMGDQNVYPGPIDNSGLLKDGDAQSLKEHLIDELDYILLPTEGWNKLVSWYTLMEGQEPIARKVVEQGMFVKHCKVEVYLTELKLCENGNMNNVVTRRFSKADTIDTIEKEIRKIFSIPDEKETRLWNKYMSNTFEPLNKPDSTIQDAGLYQGQVLFIVLVIEQKNEDGTWPRGPSTPNVKNSNYCLPSYTAYKNYDYSEPGRNNEQPGLCGLSNLGNTCFMNSAIQCLSNTPPLTEYFLNDKYQEELNFDNPLGMRGEIAKSYAELIKQMWSGKFSYVTPRAFKTQVGRFAPQFSGYQQQDCQELLAFLLDGLHEDLNRIRKKPYIQLKDADGRPDKVVAEEAWENHLKRNDSIIVDIFHGLFKSTLVCPECAKISVTFDPFCYLTLPLPMKKERTLEVYLVRMDPLTKPMQYKVVVPKIGNILDLCTALSALSGIPADKMIVTDIYNHRFHRIFAMDENLSSIMERDDIYVFEININRTEDTEHVIIPVCLREKFRHSSYTHHTGSSLFGQPFLMAVPRNNTEDKLYNLLLLRMCRYVKISTETEETEGSLHCCKDQNINGNGPNGIHEEGSPSEMETDEPDDESSQDQELPSENENSQSEDSVGGDNDSENGLCTEDTCKGQLTGHKKRLFTFQFNNLGNTDINYIKDDTRHIRFDDRQLRLDERSFLALDWDPDLKKRYFDENAAEDFEKHESVEYKPPKKPFVKLKDCIELFTTKEKLGAEDPWYCPNCKEHQQATKKLDLWSLPPVLVVHLKRFSYSRYMRDKLDTLVDFPINDLDMSEFLINPNAGPCRYNLIAVSNHYGGMGGGHYTAFAKNKDDGKWYYFDDSSVSTASEDQIVSKAAYVLFYQRQDTFSGTGFFPLDRETKGASAATGIPLESDEDSNDNDNDIENENCMHTN

SEQ ID NO: 163859 - DNA, 2859 bp, Artificial Sequence
  derived and/or modified sequence
atggccgagggcggcgccgccgacctggacacccagagaagcgacatcgccaccctgctgaagaccagcctgagaaagggcgacacctggtacctggtggacagcagatggttcaagcagtggaagaagtacgtgggcttcgacagctgggacaagtaccagatgggcgaccagaacgtgtaccccggccccatcgacaacagcggcctgctgaaggacggcgacgcccagagcctgaaggagcacctgatcgacgagctggactacatcctgctgcccaccgagggctggaacaagctggtgagctggtacaccctgatggagggccaggagcccatcgccagaaaggtggtggagcagggcatgttcgtgaagcactgcaaggtggaggtgtacctgaccgagctgaagctgtgcgagaacggcaacatgaacaacgtggtgaccagaagattcagcaaggccgacaccatcgacaccatcgagaaggagatcagaaagatcttcagcatccccgacgagaaggagaccagactgtggaacaagtacatgagcaacaccttcgagcccctgaacaagcccgacagcaccatccaggacgccggcctgtaccagggccaggtgctggtgatcgagcagaagaacgaggacggcacctggcccagaggccccagcacccccaacgtgaagaacagcaactactgcctgcccagctacaccgcctacaagaactacgactacagcgagcccggcagaaacaacgagcagcccggcctgtgcggcctgagcaacctgggcaacacctgcttcatgaacagcgccatccagtgcctgagcaacaccccccccctgaccgagtacttcctgaacgacaagtaccaggaggagctgaacttcgacaaccccctgggcatgagaggcgagatcgccaagagctacgccgagctgatcaagcagatgtggagcggcaagttcagctacgtgacccccagagccttcaagacccaggtgggcagattcgccccccagttcagcggctaccagcagcaggactgccaggagctgctggccttcctgctggacggcctgcacgaggacctgaacagaatcagaaagaagccctacatccagctgaaggacgccgacggcagacccgacaaggtggtggccgaggaggcctgggagaaccacctgaagagaaacgacagcatcatcgtggacatcttccacggcctgttcaagagcaccctggtgtgccccgagtgcgccaagatcagcgtgaccttcgaccccttctgctacctgaccctgcccctgcccatgaagaaggagagaaccctggaggtgtacctggtgagaatggaccccctgaccaagcccatgcagtacaaggtggtggtgcccaagatcggcaacatcctggacctgtgcaccgccctgagcgccctgagcggcatccccgccgacaagatgatcgtgaccgacatctacaaccacagattccacagaatcttcgccatggacgagaacctgagcagcatcatggagagagacgacatctacgtgttcgagatcaacatcaacagaaccgaggacaccgagcacgtgatcatccccgtgtgcctgagagagaagttcagacacagcagctacacccaccacaccggcagcagcctgttcggccagcccttcctgatggccgtgcccagaaacaacaccgaggacaagctgtacaacctgctgctgctgagaatgtgcagatacgtgaagatcagcaccgagaccgaggagaccgagggcagcctgcactgctgcaaggaccagaacatcaacggcaacggccccaacggcatccacgaggagggcagccccagcgagatggagaccgacgagcccgacgacgagagcagccaggaccaggagctgcccagcgagaacgagaacagccagagcgaggacagcgtgggcggcgacaacgacagcgagaacggcctgtgcaccgaggacacctgcaagggccagctgaccggccacaagaagagactgttcaccttccagttcaacaacctgggcaacaccgacatcaactacatcaaggacgacaccagacacatcagattcgacgacagacagctgagactggacgagagaagcttcctggccctggactgggaccccgacctgaagaagagatacttcgacgagaacgccgccgaggacttcgagaagcacgagagcgtggagtacaagccccccaagaagcccttcgtgaagctgaaggactgcatcgagctgttcaccaccaaggagaagctgggcgccgaggacccctggtactgccccaactgcaaggagcaccagcaggccaccaagaagctggacctgtggagcctgccccccgtgctggtggtgcacctgaagagattcagctacagcagatacatgagagacaagctggacaccctggtggacttccccatcaacgacctggacatgagcgagttcctgatcaaccccaacgccggcccctgcagatacaacctgatcgccgtgagcaaccactacggcggcatgggcggcggccactacaccgccttcgccaagaacaaggacgacggcaagtggtactacttcgacgacagcagcgtgagcaccgccagcgaggaccagatcgtgagcaaggccgcctacgtgctgttctaccagagacaggacaccttcagcggcaccggcttcttccccctggacagagagaccaagggcgccagcgccgccaccggcatccccctggagagcgacgaggacagcaacgacaacgacaacgacatcgagaacgagaactgcatgcacaccaactag

SEQ ID NO: 163860 - DNA, 2871 bp, Artificial Sequence
  derived and/or modified sequence
atggccgagggcggcgccgccgacctggacacccagagaagcgacatcgccaccctgctgaagaccagcctgagaaagggcgacacctggtacctggtggacagcagatggttcaagcagtggaagaagtacgtgggcttcgacagctgggacaagtaccagatgggcgaccagaacgtgtaccccggccccatcgacaacagcggcctgctgaaggacggcgacgcccagagcctgaaggagcacctgatcgacgagctggactacatcctgctgcccaccgagggctggaacaagctggtgagctggtacaccctgatggagggccaggagcccatcgccagaaaggtggtggagcagggcatgttcgtgaagcactgcaaggtggaggtgtacctgaccgagctgaagctgtgcgagaacggcaacatgaacaacgtggtgaccagaagattcagcaaggccgacaccatcgacaccatcgagaaggagatcagaaagatcttcagcatccccgacgagaaggagaccagactgtggaacaagtacatgagcaacaccttcgagcccctgaacaagcccgacagcaccatccaggacgccggcctgtaccagggccaggtgctgttcatcgtgctggtgatcgagcagaagaacgaggacggcacctggcccagaggccccagcacccccaacgtgaagaacagcaactactgcctgcccagctacaccgcctacaagaactacgactacagcgagcccggcagaaacaacgagcagcccggcctgtgcggcctgagcaacctgggcaacacctgcttcatgaacagcgccatccagtgcctgagcaacaccccccccctgaccgagtacttcctgaacgacaagtaccaggaggagctgaacttcgacaaccccctgggcatgagaggcgagatcgccaagagctacgccgagctgatcaagcagatgtggagcggcaagttcagctacgtgacccccagagccttcaagacccaggtgggcagattcgccccccagttcagcggctaccagcagcaggactgccaggagctgctggccttcctgctggacggcctgcacgaggacctgaacagaatcagaaagaagccctacatccagctgaaggacgccgacggcagacccgacaaggtggtggccgaggaggcctgggagaaccacctgaagagaaacgacagcatcatcgtggacatcttccacggcctgttcaagagcaccctggtgtgccccgagtgcgccaagatcagcgtgaccttcgaccccttctgctacctgaccctgcccctgcccatgaagaaggagagaaccctggaggtgtacctggtgagaatggaccccctgaccaagcccatgcagtacaaggtggtggtgcccaagatcggcaacatcctggacctgtgcaccgccctgagcgccctgagcggcatccccgccgacaagatgatcgtgaccgacatctacaaccacagattccacagaatcttcgccatggacgagaacctgagcagcatcatggagagagacgacatctacgtgttcgagatcaacatcaacagaaccgaggacaccgagcacgtgatcatccccgtgtgcctgagagagaagttcagacacagcagctacacccaccacaccggcagcagcctgttcggccagcccttcctgatggccgtgcccagaaacaacaccgaggacaagctgtacaacctgctgctgctgagaatgtgcagatacgtgaagatcagcaccgagaccgaggagaccgagggcagcctgcactgctgcaaggaccagaacatcaacggcaacggccccaacggcatccacgaggagggcagccccagcgagatggagaccgacgagcccgacgacgagagcagccaggaccaggagctgcccagcgagaacgagaacagccagagcgaggacagcgtgggcggcgacaacgacagcgagaacggcctgtgcaccgaggacacctgcaagggccagctgaccggccacaagaagagactgttcaccttccagttcaacaacctgggcaacaccgacatcaactacatcaaggacgacaccagacacatcagattcgacgacagacagctgagactggacgagagaagcttcctggccctggactgggaccccgacctgaagaagagatacttcgacgagaacgccgccgaggacttcgagaagcacgagagcgtggagtacaagccccccaagaagcccttcgtgaagctgaaggactgcatcgagctgttcaccaccaaggagaagctgggcgccgaggacccctggtactgccccaactgcaaggagcaccagcaggccaccaagaagctggacctgtggagcctgccccccgtgctggtggtgcacctgaagagattcagctacagcagatacatgagagacaagctggacaccctggtggacttccccatcaacgacctggacatgagcgagttcctgatcaaccccaacgccggcccctgcagatacaacctgatcgccgtgagcaaccactacggcggcatgggcggcggccactacaccgccttcgccaagaacaaggacgacggcaagtggtactacttcgacgacagcagcgtgagcaccgccagcgaggaccagatcgtgagcaaggccgcctacgtgctgttctaccagagacaggacaccttcagcggcaccggcttcttccccctggacagagagaccaagggcgccagcgccgccaccggcatccccctggagagcgacgaggacagcaacgacaacgacaacgacatcgagaacgagaactgcatgcacaccaactag

SEQ ID NO: 163861 - DNA, 2859 bp, Artificial Sequence
  derived and/or modified sequence
atggctgagggcggagctgcagacttagacacccagcgctccgacatcgccacactactgaagacatcactccggaaaggggatacatggtatttggtggattctaggtggtttaaacagtggaaaaaatacgtgggttttgattcgtgggataagtaccagatgggagaccagaacgtttatccaggtccaattgataactccggcctgcttaaggatggagatgcccagagtctaaaagagcaccttattgatgagctggactatatcctgctccccacagagggttggaacaaacttgtcagttggtacacactgatggagggccaggagccgattgctaggaaggtggttgagcagggcatgttcgtgaagcactgcaaagtggaggtgtatctcactgagcttaagctgtgcgaaaatgggaacatgaacaacgttgtgactcggcggttctccaaagccgatacaatcgatactattgagaaagaaatccggaagatcttttctatcccagatgagaaagagactaggctctggaacaagtatatgagtaatacatttgagcctctcaataaaccggatagcactatccaggatgcagggctgtaccagggacaggtgctggtcattgaacagaagaatgaagatggaacatggcctcggggcccaagtaccccaaacgtgaaaaactccaactactgtctgccatcttacacagcttataagaactatgattactccgagccgggcaggaacaatgagcaacctgggctctgcggattgtctaacctgggcaacacctgcttcatgaatagtgcaatccaatgcctatctaacacgcctccactgaccgaatattttctgaacgataaatatcaagaggaactgaacttcgacaatcctctcgggatgaggggggagattgccaaatcatatgctgaactcatcaagcaaatgtggagcggaaagttcagctacgttacaccccgcgcatttaagactcaagtcggacggttcgcccctcagttttcgggctaccaacagcaggattgtcaggagctgctggcttttctcctcgatggtctgcatgaggatcttaatcggattcgcaagaaaccctatattcagcttaaggacgcagacggccggcctgacaaggtagtagctgaagaggcctgggagaatcatctgaagagaaacgattcaatcattgtcgacatttttcacggtcttttcaaatccacgcttgtctgtcccgagtgtgccaaaatctccgtgactttcgatcctttctgctacttaaccctgccgctgcctatgaaaaaggagcgcacactggaagtgtacttagtgaggatggaccctcttacaaaacctatgcaatacaaagtggtcgtgccaaaaatcggcaacatcttggatctttgcactgccctttccgccctgtccggaatcccagccgacaaaatgatcgttacggacatatacaaccatcggttccaccgaatcttcgctatggatgaaaatttatcatcaatcatggaacgcgatgacatatacgttttcgagatcaatataaacaggacggaagacaccgagcacgttatcatccccgtttgcttacgggagaaattccggcactcctcctatacccaccataccggtagctcactattcggccaaccattccttatggctgtgccacgaaataatactgaagacaaattgtataatctgctgcttctgagaatgtgccggtacgtcaagatctccactgaaaccgaagagactgagggaagtctgcactgctgcaaggatcagaacatcaacgggaacggacctaacgggattcacgaagaggggagtccaagcgaaatggagactgacgagccagatgatgagtccagtcaggaccaggagcttccaagcgaaaatgaaaactcccaatcggaagacagcgtcgggggcgataatgactcagagaacgggctgtgtaccgaggacacttgcaagggtcagctgaccggccataagaagcggctgtttacctttcagtttaacaatctaggcaataccgacataaattacattaaagatgatactaggcacatccgatttgacgacaggcagctgcggctcgatgagcgtagttttcttgcactagactgggatcccgatcttaagaaaagatacttcgacgagaacgctgccgaggattttgagaaacacgagtccgtggaatacaaacctcctaagaagcccttcgtgaaacttaaggactgcatcgaactgtttaccacaaaggagaagctgggagccgaggacccttggtattgccctaactgcaaggagcaccaacaggccactaaaaagcttgacctgtggtcactccctccagtgctagtcgtccacctcaagcgcttttcttacagtagatatatgcgagacaaattggacaccttggtcgactttcctataaatgatctggatatgagcgagtttcttataaaccccaatgccggcccttgccggtataatctgatcgcagtcagtaatcactacggtggcatggggggcggccactatacagcgtttgcaaaaaacaaggatgacggaaaatggtattatttcgacgatagttctgtgagcaccgcaagcgaggaccagatcgtgagtaaggcagcatacgtcctgttctaccagcgccaggacaccttttcaggcacgggctttttcccgctggacagagagactaagggggcctcagccgccacagggattccgctggagtcagacgaggattctaatgataatgacaacgacatcgaaaatgagaactgtatgcacaccaattag

SEQ ID NO: 163862 - DNA, 2871 bp, Artificial Sequence
  derived and/or modified sequence
atggcagaaggaggagccgccgacctggacactcagcggagcgacatcgccaccctcctcaagaccagccttagaaagggcgatacctggtacctggtagactcacgatggtttaaacagtggaaaaagtatgtcggcttcgatagctgggacaagtatcagatgggggaccagaacgtgtatcccggacctattgacaactcaggactgcttaaggacggggacgcccagagcttgaaagagcatcttatcgacgaattagactacatccttctgccaacagagggttggaacaagctggtttcctggtacaccctcatggagggtcaagagcccattgctagaaaggtggtagaacaggggatgtttgtgaaacactgtaaagtggaggtatacctaacggaactaaagctgtgcgagaatgggaacatgaacaacgttgtcaccaggcggtttagcaaagcagataccattgatacaatagaaaaggaaataagaaaaattttttcgatccccgacgagaaagagactagactttggaacaaatatatgagcaacacgtttgaaccccttaacaagcctgactcgaccattcaagacgcaggcctgtatcagggccaggtgctgttcatcgttctcgtgattgagcagaagaatgaggatgggacttggcccagggggccctccacgcccaacgttaagaattctaactattgcctgccatcctatactgcttataagaattatgactacagtgaaccaggaaggaacaatgagcagccgggcctgtgcgggctgtcaaatcttggtaatacctgtttcatgaactccgccatccagtgtctgagcaacacccccccactcaccgaatattttttgaacgataagtaccaggaagagctcaatttcgataacccactgggaatgcgtggagaaattgctaagagctatgcagaactgatcaaacagatgtggagtggtaaattcagctacgtgacaccacgcgccttcaaaacccaggtgggacgtttcgcaccacagttttctggctaccagcaacaggactgtcaggagctcttggcgtttctgctggatgggcttcatgaagatctcaatcggatacgcaagaaaccatacatccagttgaaagacgcagatgggagacctgacaaggttgtcgcggaagaggcctgggaaaaccatctaaaaaggaacgattcgataatcgtcgatattttccatggcctgttcaagtctactttggtttgtccagaatgtgccaagatcagtgtgacatttgatcccttctgttatctcacgctgcctctgccgatgaagaaggagcggactctcgaagtttatctagtaaggatggatcccctcaccaaacctatgcagtacaaagtggtggtcccaaagataggaaatatcctagatctttgtaccgcactttcagccctcagtggcattccggctgataaaatgattgtcacggacatttacaaccatcgattccacagaatattcgctatggacgagaacctctctagtatcatggaaagagacgatatctatgtcttcgagatcaatatcaaccgcacagaggacactgagcatgtgatcattcccgtatgtctgcgcgaaaagttccggcacagtagttacacccaccacactggatcctcactgtttggccagccattcctcatggccgttccccgcaataatacagaggacaaactctataacctgctcttgcttcgaatgtgtaggtacgtgaagatctctactgagaccgaagaaacagaaggatctttgcactgctgcaaggaccagaacatcaatggcaacggcccaaacggcatacacgaagagggctcaccctccgaaatggaaacagacgagccagatgatgaaagctctcaggaccaggagttgccaagcgagaatgaaaacagccagtccgaggattctgtgggcggcgacaatgactcagaaaatggcctttgtacagaggatacgtgcaaggggcagctgaccggccataaaaaaaggctgtttaccttccaatttaataacctcggcaatacagatataaattacatcaaagacgatacccggcatattaggttcgacgaccgccagttaaggcttgatgagcggagtttcctggccctggattgggatcctgacctcaagaagcgctattttgatgaaaatgcagcagaggactttgaaaagcatgagagcgtcgagtacaagcccccgaagaagccatttgtgaagctgaaggattgcatcgagctgttcacgaccaaagagaaactgggcgccgaggatccctggtactgccctaactgcaaggagcatcagcaagctaccaaaaagctcgacctgtggagcttgccccctgtattagtggtgcatctcaaaaggttttcctattctagatacatgagagataaacttgatactctcgtcgattttcccattaacgacctggacatgtcagagtttcttatcaatcctaacgcgggcccgtgccgatataacttgattgctgtctccaatcactatggcgggatggggggcggtcattacactgccttcgccaaaaataaagatgacgggaagtggtattattttgatgattctagcgtgagtacggcaagcgaggaccagattgtgtctaaagccgcctatgtattgttctatcagaggcaggacaccttctccgggactggattctttcctctagatcgtgaaacaaaaggtgcctccgcagcaactgggatcccgctggaaagtgatgaggactcgaacgataatgataacgacattgagaacgaaaactgcatgcacaccaattag

SEQ ID NO: 163863 - DNA, 2859 bp, Artificial Sequence
  derived and/or modified sequence
atggccgagggcggcgctgctgacctggacacccagaggagtgacatcgccaccctgctgaagaccagcctgaggaagggggacacctggtacctggtggacagccgctggttcaagcagtggaagaagtatgtgggctttgacagctgggacaagtaccagatgggagaccagaatgtgtacccaggccccatcgacaacagcggcctgctgaaggatggagatgcccagagcctgaaggagcacctgattgatgagctggactacatcctgctgcccacagagggctggaacaagctggtgtcctggtacaccctgatggagggccaggagcccatcgccaggaaggtggtggagcagggcatgtttgtgaagcactgcaaggtggaggtgtacctgacagagctgaagctgtgtgaaaatggaaacatgaacaacgtggtgacccggcgcttcagcaaggctgacaccatcgacaccatcgagaaggagatcaggaagatcttcagcatcccagatgagaaggagacccggctgtggaacaagtacatgagcaacacctttgagcccctgaacaagccagacagcaccatccaggatgctggcctgtaccagggccaggtgctggtgattgagcagaagaatgaagatggcacctggccccggggccccagcacccccaacgtgaagaacagcaactactgcctgcccagctacacagcctacaagaactatgactacagcgagcccggcaggaacaatgagcagcccggcctgtgtggcctgagcaacctgggcaacacctgcttcatgaacagcgccatccagtgcctgagcaacaccccacccctgacagagtacttcctgaatgacaagtaccaggaggagctgaactttgacaaccccctgggcatgagaggagaaattgccaagagctatgcagagctgatcaagcagatgtggagcggcaagttctcctatgtgaccccccgggccttcaagacccaggtgggccgctttgccccccagttcagcggctaccagcagcaggactgccaggagctgctggccttcctgctggatggcctgcacgaggacctgaaccgcatcaggaagaagccctacatccagctgaaggatgctgatggccgcccagacaaggtggtggccgaggaggcctgggagaaccacctgaagagaaatgacagcatcatcgtggacatcttccacggcctcttcaagagcaccctggtgtgcccagaatgtgccaagatctctgtgacctttgaccccttctgctacctgaccctgcccctgcccatgaagaaggagaggaccctggaggtgtacctggtgaggatggaccccctgaccaagcccatgcagtacaaggtggtggtgcccaagattggcaacatcctggacctgtgcacagccctgagcgccctgagcggcatcccagctgacaagatgattgtgacagacatctacaaccaccgcttccaccgcatctttgccatggatgagaacctgagcagcatcatggagagagatgacatctacgtgtttgagatcaacatcaacagaacagaggacacagaacatgtgatcatccctgtgtgcctgcgggagaagttccgccacagcagctacacccaccacacaggcagcagcctgtttggccagcccttcctgatggctgtgcccaggaacaacacagaggacaagctgtacaacctgctgctgctgaggatgtgccgctacgtgaagatcagcacagaaacagaggagacagagggcagcctgcactgctgcaaggaccagaacatcaatggaaatggccccaacggcatccacgaggagggcagccccagcgagatggagacagatgagccagatgatgagagcagccaggaccaggagctgcccagtgaaaatgaaaacagccagagcgaggacagcgtgggcggggacaatgattctgaaaatggcctgtgcacagaggacacctgcaagggccagctgaccggccacaagaagaggctcttcaccttccagttcaacaacctgggcaacacagacatcaactacatcaaggatgacaccaggcacatccgctttgatgaccggcagctgcggctggatgagaggagcttcctggccctggactgggaccctgacctgaagaagcgctactttgatgaaaatgctgctgaagattttgagaagcatgagagcgtggagtacaagccacccaagaagccctttgtgaagctgaaggactgcatcgagctgttcaccaccaaggagaagctgggcgctgaggacccctggtactgccccaactgcaaggagcaccagcaggccaccaagaagctggacctgtggagcctgccccctgtgctggtggtgcacctgaagcgcttctcctacagccgctacatgagggacaagctggacaccctggtggacttccccatcaatgacctggacatgtctgagttcctgatcaaccccaatgccggcccctgccgctacaacctgattgctgtgagcaaccactatggaggcatgggcggcggccactacacagcctttgccaagaacaaggatgatggcaagtggtactactttgatgacagctctgtgtccacagccagcgaggaccagatcgtgtccaaggccgcctacgtgctcttctaccagaggcaggacaccttcagcggcaccggcttcttccccctggaccgggagaccaagggggccagcgctgccaccggcatccccctggagagtgatgaggacagcaatgacaatgacaatgacattgaaaatgaaaactgcatgcacaccaactag

SEQ ID NO: 163864 - DNA, 2871 bp, Artificial Sequence
  derived and/or modified sequence
atggccgagggcggcgctgctgacctggacacccagaggagtgacatcgccaccctgctgaagaccagcctgaggaagggggacacctggtacctggtggacagccgctggttcaagcagtggaagaagtatgtgggctttgacagctgggacaagtaccagatgggagaccagaatgtgtacccaggccccatcgacaacagcggcctgctgaaggatggagatgcccagagcctgaaggagcacctgattgatgagctggactacatcctgctgcccacagagggctggaacaagctggtgtcctggtacaccctgatggagggccaggagcccatcgccaggaaggtggtggagcagggcatgtttgtgaagcactgcaaggtggaggtgtacctgacagagctgaagctgtgtgaaaatggaaacatgaacaacgtggtgacccggcgcttcagcaaggctgacaccatcgacaccatcgagaaggagatcaggaagatcttcagcatcccagatgagaaggagacccggctgtggaacaagtacatgagcaacacctttgagcccctgaacaagccagacagcaccatccaggatgctggcctgtaccagggccaggtgctcttcatcgtgctggtgattgagcagaagaatgaagatggcacctggccccggggccccagcacccccaacgtgaagaacagcaactactgcctgcccagctacacagcctacaagaactatgactacagcgagcccggcaggaacaatgagcagcccggcctgtgtggcctgagcaacctgggcaacacctgcttcatgaacagcgccatccagtgcctgagcaacaccccacccctgacagagtacttcctgaatgacaagtaccaggaggagctgaactttgacaaccccctgggcatgagaggagaaattgccaagagctatgcagagctgatcaagcagatgtggagcggcaagttctcctatgtgaccccccgggccttcaagacccaggtgggccgctttgccccccagttcagcggctaccagcagcaggactgccaggagctgctggccttcctgctggatggcctgcacgaggacctgaaccgcatcaggaagaagccctacatccagctgaaggatgctgatggccgcccagacaaggtggtggccgaggaggcctgggagaaccacctgaagagaaatgacagcatcatcgtggacatcttccacggcctcttcaagagcaccctggtgtgcccagaatgtgccaagatctctgtgacctttgaccccttctgctacctgaccctgcccctgcccatgaagaaggagaggaccctggaggtgtacctggtgaggatggaccccctgaccaagcccatgcagtacaaggtggtggtgcccaagattggcaacatcctggacctgtgcacagccctgagcgccctgagcggcatcccagctgacaagatgattgtgacagacatctacaaccaccgcttccaccgcatctttgccatggatgagaacctgagcagcatcatggagagagatgacatctacgtgtttgagatcaacatcaacagaacagaggacacagaacatgtgatcatccctgtgtgcctgcgggagaagttccgccacagcagctacacccaccacacaggcagcagcctgtttggccagcccttcctgatggctgtgcccaggaacaacacagaggacaagctgtacaacctgctgctgctgaggatgtgccgctacgtgaagatcagcacagaaacagaggagacagagggcagcctgcactgctgcaaggaccagaacatcaatggaaatggccccaacggcatccacgaggagggcagccccagcgagatggagacagatgagccagatgatgagagcagccaggaccaggagctgcccagtgaaaatgaaaacagccagagcgaggacagcgtgggcggggacaatgattctgaaaatggcctgtgcacagaggacacctgcaagggccagctgaccggccacaagaagaggctcttcaccttccagttcaacaacctgggcaacacagacatcaactacatcaaggatgacaccaggcacatccgctttgatgaccggcagctgcggctggatgagaggagcttcctggccctggactgggaccctgacctgaagaagcgctactttgatgaaaatgctgctgaagattttgagaagcatgagagcgtggagtacaagccacccaagaagccctttgtgaagctgaaggactgcatcgagctgttcaccaccaaggagaagctgggcgctgaggacccctggtactgccccaactgcaaggagcaccagcaggccaccaagaagctggacctgtggagcctgccccctgtgctggtggtgcacctgaagcgcttctcctacagccgctacatgagggacaagctggacaccctggtggacttccccatcaatgacctggacatgtctgagttcctgatcaaccccaatgccggcccctgccgctacaacctgattgctgtgagcaaccactatggaggcatgggcggcggccactacacagcctttgccaagaacaaggatgatggcaagtggtactactttgatgacagctctgtgtccacagccagcgaggaccagatcgtgtccaaggccgcctacgtgctcttctaccagaggcaggacaccttcagcggcaccggcttcttccccctggaccgggagaccaagggggccagcgctgccaccggcatccccctggagagtgatgaggacagcaatgacaatgacaatgacattgaaaatgaaaactgcatgcacaccaactag

SEQ ID NO: 163865 - DNA, 2859 bp, Artificial Sequence
  derived and/or modified sequence
atggccgagggcggcgccgccgacctggacacccagcggagcgacatcgcgaccttgctaaaaaccagtttgcgaaaaggtgatacttggtacctggtggattcccgttggtttaaacagtggaaaaaatacgtcgggtttgacagctgggacaaataccagatgggtgaccagaatgtgtatcctggacccattgacaacagtggcttgcttaaagatggcgatgcccagtccctgaaggaacacctcatcgacgagctggactacattttgttgcctacagaaggctggaacaagctcgtgagttggtatacccttatggaagggcaagaaccaatcgcccggaaggttgttgagcaaggtatgttcgtcaagcattgcaaagtcgaagtgtacctcacagagcttaaactgtgtgaaaacgggaacatgaacaatgtggtgacccgccgattttcaaaggctgacaccatcgatactatcgaaaaggagatacgaaagattttctcaattccggacgaaaaggagactagactgtggaataaatacatgagcaacacatttgaaccgcttaacaagcctgacagtacgattcaggatgccgggctctatcaaggtcaggtcctcgtcatcgagcagaaaaacgaagacggaacctggccacggggcccttctacaccaaatgttaaaaacagtaattactgtttgcctagttatacagcctacaaaaactatgactactcagaacccggaagaaacaacgagcagcccggactctgtggcctctcaaaccttgggaatacttgctttatgaatagcgctattcagtgtttatccaatacccctcccctgactgaatattttctgaacgataagtaccaggaagagctcaattttgacaaccccttagggatgaggggtgagattgctaagtcttacgctgagctcattaagcaaatgtggagcgggaagttttcttatgtcactcccagagccttcaaaacccaggtgggccgatttgcaccccaatttagtgggtaccaacagcaagattgccaggagcttctcgcattccttcttgacgggctgcatgaggatttgaaccggattcgcaaaaagccatacatccagttaaaagatgctgacggccggcccgataaagtggtggccgaggaagcctgggaaaatcatctcaaacgaaatgattccatcattgtggatatcttccatggccttttcaagtcaactctggtctgtccagagtgcgctaagatctctgtgacattcgaccctttttgctacctcacactgcctctaccgatgaaaaaggagaggaccctggaagtatatctggtacggatggaccctttaacaaagccgatgcagtataaagtggtggtccccaagattggcaacatcctggatttatgtaccgcgctgagcgccttatcgggtatcccggccgataaaatgatagttaccgatatctacaatcatagattccacagaatattcgcgatggacgagaacctctccagtataatggagcgtgacgacatctatgtctttgagatcaacattaataggactgaggacacagaacatgtgattattcccgtctgccttagggagaagtttcgacactcttcctacacccaccatacaggcagtagcctttttggacaacctttcctcatggcagtgccccgcaataacactgaggataagttatacaatctgctcttgctgcggatgtgcaggtacgtcaagatcagtacggaaacggaagaaaccgaagggagcttacactgctgtaaggaccagaatatcaatggcaacggaccaaacggcattcatgaggaggggtcacccagcgaaatggagactgatgagccggacgatgaatcgtctcaggaccaggagttgccgagcgagaacgagaatagccagtctgaggattcagtcgggggggataacgacagcgaaaatggcttgtgcactgaagacacatgtaagggccagctcaccgggcataaaaagagattattcacctttcagttcaacaatttaggaaatacagatatcaactacatcaaagatgacacaaggcatatacggtttgatgataggcagctgaggcttgatgaacgatctttcctggcgctagattgggacccggacttgaagaagcggtactttgacgaaaatgccgctgaagattttgagaagcacgagtctgtcgaatacaagccccccaaaaagccttttgtgaagcttaaggactgcattgagctctttacgaccaaagaaaagctaggagctgaagacccttggtactgcccaaactgtaaagagcatcagcaggcgaccaaaaagctggacttatggtccctcccccctgtacttgtcgtgcaccttaaaagattcagttatagccgctacatgagggataagctagacacactggtggactttccaatcaatgaccttgacatgagtgagtttctcatcaatccaaatgcaggaccctgtagatacaacctgatcgccgtatcaaaccactacggggggatgggggggggccactatacggcttttgcaaaaaacaaagacgatggaaagtggtactactttgatgatagttctgtatccacagcgtccgaggaccagattgtttccaaagctgcatacgtcttattctaccagaggcaagacacgtttagcgggaccggtttttttccattggaccgagaaacaaagggggctagcgccgccaccggaattcccctggaatctgacgaggacagcaacgacaatgataatgatatcgagaatgaaaactgtatgcacaccaattag

SEQ ID NO: 163866 - DNA, 2871 bp, Artificial Sequence
  derived and/or modified sequence
atggccgagggcggcgccgccgacctggacacccagcggagcgacatcgccacactgctcaagaccagcctgcgcaagggcgatacctggtacctggtcgactcccggtggtttaagcagtggaaaaaatacgtgggcttcgactcttgggataaatatcagatgggagaccagaacgtctaccccggtcccatcgacaactccggcttgcttaaggatggagacgcccaatcgctgaaagagcacttaatcgatgagctggattatatcttgctccctacggaagggtggaataagctggtatcgtggtatacactgatggagggtcaggagcccatcgctcggaaagtcgtggagcagggcatgtttgtgaaacattgcaaagtggaagtgtacctcacagaactgaagctgtgtgaaaacggtaacatgaataatgtcgtgacaagacggttcagtaaggccgatactattgacacaattgagaaggaaattagaaagatcttcagcatacccgatgaaaaggagacacgtctctggaacaaatatatgtcaaatacttttgagcccttgaataagccagactctacgatccaggacgcaggtctctatcagggacaagtgctgttcatcgttttggtgattgagcagaaaaacgaggatgggacatggcctcgcggcccctctacacctaatgtgaaaaactccaactactgtctgccatcatacaccgcatacaaaaattacgactactcagaaccaggccggaacaacgagcagcctggcctatgtggtctgtctaatttggggaatacctgctttatgaatagcgcgatccaatgtctgagcaacacacccccccttacggaatattttctcaacgacaaatatcaggaggagctgaattttgataatcctctcggcatgaggggcgagatcgctaagagttacgcggagttgataaaacagatgtggtctgggaaattctcttacgtcacacctcgagccttcaaaactcaagtggggcggttcgctccacaattttcgggctaccaacaacaggattgtcaagaactcctggcattcctcctggacggtctgcacgaggacttgaatagaatccgaaagaagccttatattcagctgaaggacgccgacggtcgacctgataaggtagtggcagaagaggcctgggagaaccacctcaagcgcaatgactcaattattgtagatatcttccacggattgttcaaatccaccttggtatgtcctgagtgtgccaagatcagcgtcacttttgaccctttttgctatctaaccctgcccttgcccatgaagaaggaacgcaccctggaggtttatctcgtgaggatggaccctctgacaaaacccatgcagtacaaggtggtagtgccaaaaatcggaaatatcctggacctgtgcacagccctcagtgccctgtctggcatacccgcagacaagatgattgtaacagatatttataatcaccgttttcaccgaatctttgctatggacgaaaatctgtcttccattatggagcgggatgacatctacgtgttcgagatcaacatcaacagaaccgaagatacagagcacgtgatcattccagtctgtctcagagagaagtttcggcactccagctacacgcatcatacagggagctccctgttcggacagcctttcctcatggccgttccaagaaataacacagaagataagctgtacaaccttctgttgcttagaatgtgtcggtacgtcaagataagtacagagactgaggagactgagggctctctacactgctgcaaagatcagaatattaatggaaacgggccgaacggcattcacgaggagggcagccccagcgaaatggagactgatgaacctgatgatgagtctagtcaggaccaggaactccccagtgagaatgaaaactcacagagtgaggacagcgtgggaggggacaacgactccgagaatggactttgtactgaggacacctgtaaaggccagttgaccggccacaaaaagaggctgtttacctttcagtttaacaatttgggcaataccgatatcaactatattaaggacgacacacggcacatcagattcgatgacaggcagctgaggctggacgagcgcagcttcctggcactcgattgggatcccgatctgaaaaagaggtattttgacgagaacgctgcagaggactttgagaaacatgagtccgtcgagtacaagccacctaagaagccttttgtcaagcttaaagactgcattgaactatttactaccaaagaaaaactcggagctgaggatccctggtactgcccaaactgcaaggagcaccagcaggcaaccaaaaagctggacctttggagtctgcctcctgtccttgtcgtacatttaaagagattcagctacagtaggtacatgcgggataagctcgacacccttgtggattttccgatcaacgacctggacatgagtgaattcctgatcaacccaaacgccggcccctgtcggtataatctcatcgccgtgtctaatcactatggtgggatggggggcggccattatacggcctttgccaaaaataaggacgacggaaaatggtattatttcgatgatagcagtgtgtccactgcctctgaggaccagatcgtgtcgaaggccgcctacgtgttattttaccagcgacaggatacattcagcgggactggattcttcccgttggatcgggaaacaaaaggagcatcagccgcaactggcatccccctggagtccgacgaggactctaatgataacgataacgatatcgaaaacgaaaattgcatgcatactaactag

SEQ ID NO: 163867 - DNA, 2859 bp, Artificial Sequence
  derived and/or modified sequence
atggccgaagggggagcagctgatctcgatacacagaggtccgatattgccaccttactgaaaaccagcctgaggaagggcgatacctggtacttggttgacagccgttggtttaaacagtggaagaaatacgtagggttcgacagctgggacaaataccagatgggggaccagaatgtgtatccaggcccaatcgataacagcgggctcctcaaggacggcgacgcccagagcttgaaggagcacctgattgacgagctggattatatcttgctccccaccgaaggctggaataagctcgtttcatggtacaccctcatggaaggtcaagaacctatcgcccgaaaagtagtcgaacagggtatgttcgtgaagcattgcaaagtagaggtgtatcttaccgaattgaaactgtgcgaaaacggtaatatgaataacgttgtcactagaagattttcaaaagctgacaccattgatacaattgagaaagagataaggaagatcttctccatccctgacgagaaggagactcgcctttggaacaaatatatgtcaaatacgttcgagccattgaacaaaccagattctacaatccaggatgcaggactgtatcaggggcaggtgctcgtgatcgagcagaagaatgaagacggcacatggccaagaggaccctcgacccccaatgtgaaaaatagcaactattgtcttccttcctatactgcctacaagaattacgactactcggaaccaggtcgcaacaatgagcagccaggcctctgcggattaagcaacctcggaaacacctgttttatgaactctgccattcagtgtctctctaacaccccccctcttacagagtatttcctcaatgacaagtaccaggaagagctgaattttgacaaccccctaggcatgcggggtgagatcgccaagtcctacgccgagttaatcaagcagatgtggtctggtaagttttcttatgtaacacctagggcattcaagacacaggtggggagatttgccccacaattctccggttaccaacaacaggactgtcaggaactgcttgcctttctgcttgatggattacacgaggatctgaaccggattagaaaaaaaccttatatacagttgaaggacgctgacggccgaccggataaggtcgtggcggaggaggcctgggaaaatcacctgaaacgaaatgatagcattattgttgacatcttccacgggcttttcaagagcactcttgtttgcccagaatgcgctaaaatatcggtgactttcgatccgttctgctacctgactttgccactgccaatgaaaaaagagagaacactggaggtctacctggtcagaatggaccccctgaccaaacctatgcagtataaagtagtcgtccctaaaatcggcaacatcctcgacctgtgtaccgctctctcggccttaagcggtattcccgcagataagatgatagtaaccgacatatacaatcatcggtttcacaggatttttgccatggatgaaaatttatcttccatcatggagcgggatgatatttatgtgtttgagatcaacatcaacaggacagaagataccgagcatgtgattatcccagtttgcctgcgggagaagttcaggcattcaagctacacacaccacaccggcagtagtctatttggacagccattcctcatggctgtcccccgtaataacaccgaggataaactttataacttattgctactgcgtatgtgccggtacgtcaagatctccaccgagaccgaggagacagagggcagccttcactgttgtaaagaccagaatatcaatggcaacggacccaacgggatccatgaagagggctctccctccgaaatggaaacagatgagcctgacgatgagtccagccaagatcaggagctgccctcagagaatgagaactctcagagtgaagatagcgttgggggagacaacgattccgagaacggcctgtgcactgaggatacatgcaaagggcaactgacgggacacaaaaaaagattattcacatttcaatttaataacctcggaaatactgacatcaactatatcaaagacgatactcgtcacatcagattcgacgatagacaacttaggcttgacgaaaggagcttccttgccctcgactgggatcctgacttaaagaagcgatatttcgatgagaatgctgccgaagactttgagaagcacgagtctgtcgagtataaaccacccaagaagccatttgtgaagcttaaggattgtatagaactctttactactaaggaaaaattgggcgcagaggacccctggtattgtcctaactgcaaagaacaccaacaggctacaaagaaattggacctgtggtctctcccgccagtgctggtggtacacctaaagagattttcgtactcccgttacatgcgcgacaagttggatactcttgtggacttcccgatcaacgacctggacatgtcagagttcttaataaatccaaatgcaggcccttgcaggtacaatctgatcgctgtctcgaaccactacggaggaatgggtggcggtcactacactgcgtttgccaaaaataaagacgacggaaagtggtactattttgacgattcttcagtgtcgaccgccagcgaggaccagatcgtttccaaagctgcttacgttctattctatcagaggcaggatactttctcaggtaccggattctttccactggaccgtgagactaaaggagcaagcgcagccactgggatccccctggagtcagatgaggactctaatgacaacgacaatgacatcgagaacgaaaattgcatgcatactaattag

SEQ ID NO: 163868 - DNA, 2871 bp, Artificial Sequence
  derived and/or modified sequence
atggccgagggcggagctgcagatctcgacacgcaacggtccgacattgctacactgctgaaaacttccctgcgtaagggggatacttggtatttagtggatagtcgctggtttaaacagtggaaaaaatacgtggggtttgattcctgggataagtaccaaatgggcgaccagaacgtctatcctggtcccatagacaatagtggccttttgaaggatggcgacgcccagagcctgaaggagcacttaatcgatgagttggattatatcctgcttcctacagaaggttggaataaactagtgtcgtggtatacgcttatggaaggccaggaaccaatcgcccgaaaagtagtagagcaagggatgttcgtgaagcattgtaaagttgaagtttatctaactgaactcaaactttgcgagaacggtaacatgaacaatgtggtgacccggagattttccaaggcagacaccattgacacaatagagaaagaaattcgtaaaatattctctatacccgacgaaaaagagactagattgtggaacaaatacatgtcgaatacttttgaacctctgaataaaccagacagcaccatacaggatgccggactctatcagggacaggtcctttttattgtgctcgtgattgagcagaagaacgaggacggaacgtggccgagagggccaagcacccccaatgttaaaaattccaactactgtctaccctcctacacagcctacaaaaattacgattactcagagcctggccgtaacaacgaacagcctggcctgtgcggcctctctaacttaggcaacacctgctttatgaatagtgccatacagtgcctatcgaacacccctcctctgacagagtattttctgaacgacaagtaccaggaggaactgaatttcgacaacccgctgggtatgagaggagagatcgcgaagtcctatgccgagctgatcaagcaaatgtggagtggcaagtttagttacgttactcctagagccttcaagacccaggttggtaggtttgccccacagttttccggctatcagcaacaggattgccaggaacttctggcattcctgctggacggccttcacgaggacttgaacaggattcgaaaaaagccctatatccaactgaaagacgcagacggccgtcccgataaggtggtagccgaggaggcttgggaaaaccatctcaaaaggaacgactctatcatagtggatattttccatgggctgtttaagtctaccctggtctgccctgaatgtgcaaagatttccgtcacatttgatccattttgctacctcactctgccactgcccatgaagaaagaacgcacgctggaagtgtatctggtgcggatggatcccctgaccaaaccaatgcagtataaagtggtggttccgaagattggcaacatcttagatctgtgcaccgcgttgtctgccctgtctggtattcctgcagataagatgatcgtcactgacatatataatcaccggttccacagaatattcgccatggacgagaacctctcatccattatggagcgagatgacatctatgttttcgaaatcaatatcaatcgcacagaagacaccgagcatgttatcatacctgtctgtttaagagagaagttccggcattccagttacacacaccatacaggctcctccttgttcggccagccctttctgatggcagttccacgcaataacactgaggataagttgtataacctgctgctcctccgaatgtgccgatacgttaagatctccacagaaactgaggaaaccgagggctcgctgcactgttgtaaggatcaaaacatcaatgggaatggcccaaacggtatccatgaggaggggtctccctctgaaatggagacagatgaacccgatgatgaatcttctcaggaccaggagttacccagtgagaatgaaaattctcagtcagaggattccgttggcggagataatgacagcgaaaacgggttatgtactgaggacacatgcaaaggacaactcacaggtcacaaaaaacggttgttcaccttccagtttaacaatctcgggaatactgacatcaattacattaaggacgacacccgccatatcagatttgacgatcgacagctcagactcgacgagaggtcttttttggcccttgactgggatccagatcttaagaaacgctactttgatgaaaacgccgctgaagattttgaaaaacatgaatccgtggaatacaaaccgccaaagaaaccattcgtcaagctgaaggattgcattgagctcttcactaccaaagagaagttgggagccgaggatccctggtactgccctaactgtaaggagcaccagcaggcgaccaaaaaactcgatctgtggtcattaccccctgtactggtagttcacctcaaaagattcagttattcacggtacatgagagataagttagatacacttgtggactttcccataaacgacctggatatgtccgaatttttgattaatcctaatgctggcccatgcaggtataacttaattgcggtatcaaaccactacggaggcatgggcggagggcattataccgcatttgctaagaacaaggacgacggcaaatggtattacttcgacgattcctcagtctcaacagcatcagaagaccagatcgtgtctaaagcagcatacgtccttttctatcaacggcaggatacctttagtggcaccggcttttttcctcttgatagagagacgaagggagcttcagccgcaacgggaattccccttgagagcgatgaagattctaatgacaatgacaatgatatcgaaaatgagaactgcatgcacactaactag

SEQ ID NO: 163869 - DNA, 4680 bp, Artificial Sequence
  derived and/or modified sequence
gtgggacgccattcccataatgctctggggcgtgccgccgccgtcgctgccacctcccctaccgctagtggaagaagatggcggaaggcggagcggcggatctggacacccagcggtctgacatcgcgacgctgctcaaaacctcgctccggaaaggggacacctggtacctagtcgatagtcgctggttcaaacagtggaaaaaatatgttggctttgacagttgggacaaataccagatgggagatcaaaatgtgtatcctggacccattgataactctggacttctcaaagatggtgatgcccagtcacttaaggaacaccttattgatgaattggattacatactgttgccaactgaaggttggaataaacttgtcagctggtacacattgatggaaggtcaagagccaatagcacgaaaggtggttgaacagggtatgtttgtaaagcactgcaaagtagaagtatatctcacagaattgaagctatgtgaaaatggaaacatgaataatgttgtaactcgaagatttagcaaagctgacacaatagatacaattgaaaaggaaataagaaaaatcttcagtattccagatgaaaaggagaccagattgtggaacaaatacatgagtaacacatttgaaccactgaataaaccagacagcaccattcaggatgctggtttataccaaggacaggtattagtgatagaacagaaaaatgaagatggaacatggccaaggggtccttctactcctaatgtgaaaaactcaaattactgtcttccatcatataccgcttataagaactatgattattcggaacctggaagaaacaatgaacagccaggcctctgtggcctaagtaacttgggaaatacgtgtttcatgaactcagctattcagtgtttgagcaacacacctccacttactgagtatttcctcaatgataagtatcaagaagaactgaattttgacaatcccttaggaatgagaggtgaaatagctaaatcttatgccgaactgatcaagcaaatgtggtctggaaagtttagctacgtcaccccaagagcctttaagacacaggtaggacgttttgcacctcagttctctggatatcagcagcaagactgtcaagaactgttagctttcctattagatggattacatgaggatttgaatagaattaggaaaaaaccatatatacaattaaaagatgcagatggaaggccagataaggtggttgccgaagaagcctgggaaaaccatttaaaacgaaatgattctatcatagtagatatatttcatggccttttcaaatcaactttagtttgtcctgagtgtgctaagatttcagtaacatttgatcctttttgttacttgacacttccattgcccatgaaaaaagaacgcaccttggaagtttacttagttagaatggatccacttaccaaacctatgcagtacaaagtggttgtccccaaaattggaaacatattagatctttgtacagcattgtctgctttgtcaggaatacctgcagataagatgatagttactgatatatacaatcatagatttcacagaatattcgctatggatgaaaaccttagtagtattatggaacgggatgatatttatgtgtttgaaattaacatcaataggacagaagatacagagcacgtgattattcctgtttgcctaagagaaaaattcagacactcgagttatacccaccatactggttcttcactttttggtcagccctttcttatggctgtaccacgaaacaatactgaagacaaactttataatctcctgctcttgagaatgtgccgatatgtcaaaatatctactgaaactgaagaaactgaaggatccctacactgctgtaaggaccaaaatattaatgggaatggcccaaatggcatacatgaagaaggctcaccaagtgaaatggaaacagatgagccagatgatgaatccagccaggatcaagaacttccctcagagaatgaaaacagtcagtctgaagattcagttggaggagataatgattctgaaaatggattatgtactgaggatacttgcaaaggtcaactcacgggacacaaaaaacgattgtttacattccagttcaacaacttaggcaatactgatatcaactacatcaaagatgataccaggcatataagatttgatgataggcagcttaggctagatgaaagatcttttcttgctttggattgggatcctgatttgaaaaaaagatattttgatgaaaatgctgctgaggactttgaaaaacatgaaagtgtggagtataaacctcctaaaaaaccctttgtgaaattaaaagattgcattgaactttttacaacaaaagaaaagctaggtgctgaagatccctggtattgtccgaattgtaaagaacatcagcaagccacaaagaaattggatttatggtccctgcctccagtacttgtagtacatctcaagcgattttcttacagtcgatacatgagagacaagttggataccttagttgattttcctatcaatgacttggatatgtcggaattcttaattaatccaaatgcaggtccttgccgctataatctgattgctgtttccaaccactatggagggatgggaggaggacactatactgcttttgcaaaaaataaagatgatggaaaatggtactattttgatgacagtagtgtctccactgcatctgaagaccaaattgtgtccaaagcagcatatgtactcttctaccagagacaagacactttcagtggaactggcttttttcctcttgaccgagaaactaaaggtgcttcagctgccactggcatcccattagaaagtgatgaagatagcaatgataatgacaatgatatagaaaatgaaaactgtatgcacactaactaatgaaagtcctagaagccataaaagagacactttcctgctggtggtatctatggaaatgatgaagttacccaccacattaaaacaaaagtctgagatggggagtttcagataaccgaatgtaaatcctttatcagattttaacttgtgcagtacttgaagtgaaacacaatgaaaactttaacagaaattgtctcttaatacatttacagtcttgtatttacaagctaaatatatataggaaatcacaaataaatcccttttaagtttgctgctgttttgattaattatgtttcctttaattttttggatgtgagttgatgacaaatgttaaatttgtggatgttggtcatttattttgctctaataatactgcaagaaaactatggctgaacttagtttttggataatctagttcatgtgcattaggctgccgtatatactactatgatatttagctgcagtatcaatgtggcataaatactgcggcagcattcttcgaaaaccgcattttcaaatttatccccgtaatcaatgtgggcctattaaaaaaccaaatcatgatacaagaaacaaccttggaaaagttatttccctttgtaatacctttaaaaatccagagtattatattcattttactgccactgtggaaacaggttctagatttcatactccatctaaagtcatttttcagttacatgtaagtattatttactgctattgggatctattcttcagatattcaaaaacattttttgctttaaaatgcatatctttaattgggtgttggtccaaaattaaaatttttgctgtctgtttttctctaccccattttgtggtaatttggcaacttgagctctcccaattattgtaatataaggacagacataatagtattctgtacccatagtaataattgcatcaagcttagatgagaaatttttttcatatactggcctttaaatcattaatggacaattggctataaaggtaggtctgttaactttctttgtgtgttcctgatggaattcaccatagccttacagcttttctcagaaggtaacttgttataagagaaatggcatttgcatgttccagagtcagaacctgtacagtatataaagcataaacaccttgaatttgattttagttcaccacattcaaggatccaggatgccaaaaatatgtgtgaacatttgaaacatttttatttgctgctttttccctttgatatagttgaaagaatgtattgtaaattggcatacaatactgcctttaatagaaaacctaaatgctggggcacatttcacatatcgactacctgagaaattgctttgtgtcccactgttattaaagcaaaaagtataatgttcttcacttgaactaatcaaatacaatagattataaattgtgtattgtaaataaaagttcactctgtgagtgcacattttggtaaattatttatttatgttagcatttaaaagtttaaaaaaaatgcatttgaccaggataaatgaggtatgttgatcatggctttgctttatatcttgatattaaagctggtttatcatcctggtattttaaaagctgctttggggttttttttttcttttttttttttttaatgtaaactaacctcctgcatgacagaggttaaaattttgtctgcacttgagttcacttgagtttacatttgaaatgtgcatgtttatttatatagatttcaataaagctattcaaggcctta

SEQ ID NO: 163870 - DNA, 4623 bp, Artificial Sequence
  derived and/or modified sequence
tggaagaagatggcggaaggcggagcggcggatctggacacccagcggtctgacatcgcgacgctgctcaaaacctcgctccggaaaggggacacctggtacctagtcgatagtcgctggttcaaacagtggaaaaaatatgttggctttgacagttgggacaaataccagatgggagatcaaaatgtgtatcctggacccattgataactctggacttctcaaagatggtgatgcccagtcacttaaggaacaccttattgatgaattggattacatactgttgccaactgaaggttggaataaacttgtcagctggtacacattgatggaaggtcaagagccaatagcacgaaaggtggttgaacagggtatgtttgtaaagcactgcaaagtagaagtatatctcacagaattgaagctatgtgaaaatggaaacatgaataatgttgtaactcgaagatttagcaaagctgacacaatagatacaattgaaaaggaaataagaaaaatcttcagtattccagatgaaaaggagaccagattgtggaacaaatacatgagtaacacatttgaaccactgaataaaccagacagcaccattcaggatgctggtttataccaaggacaggtattgtttattgtattagtgatagaacagaaaaatgaagatggaacatggccaaggggtccttctactcctaatgtgaaaaactcaaattactgtcttccatcatataccgcttataagaactatgattattcggaacctggaagaaacaatgaacagccaggcctctgtggcctaagtaacttgggaaatacgtgtttcatgaactcagctattcagtgtttgagcaacacacctccacttactgagtatttcctcaatgataagtatcaagaagaactgaattttgacaatcccttaggaatgagaggtgaaatagctaaatcttatgccgaactgatcaagcaaatgtggtctggaaagtttagctacgtcaccccaagagcctttaagacacaggtaggacgttttgcacctcagttctctggatatcagcagcaagactgtcaagaactgttagctttcctattagatggattacatgaggatttgaatagaattaggaaaaaaccatatatacaattaaaagatgcagatggaaggccagataaggtggttgccgaagaagcctgggaaaaccatttaaaacgaaatgattctatcatagtagatatatttcatggccttttcaaatcaactttagtttgtcctgagtgtgctaagatttcagtaacatttgatcctttttgttacttgacacttccattgcccatgaaaaaagaacgcaccttggaagtttacttagttagaatggatccacttaccaaacctatgcagtacaaagtggttgtccccaaaattggaaacatattagatctttgtacagcattgtctgctttgtcaggaatacctgcagataagatgatagttactgatatatacaatcatagatttcacagaatattcgctatggatgaaaaccttagtagtattatggaacgggatgatatttatgtgtttgaaattaacatcaataggacagaagatacagagcacgtgattattcctgtttgcctaagagaaaaattcagacactcgagttatacccaccatactggttcttcactttttggtcagccctttcttatggctgtaccacgaaacaatactgaagacaaactttataatctcctgctcttgagaatgtgccgatatgtcaaaatatctactgaaactgaagaaactgaaggatccctacactgctgtaaggaccaaaatattaatgggaatggcccaaatggcatacatgaagaaggctcaccaagtgaaatggaaacagatgagccagatgatgaatccagccaggatcaagaacttccctcagagaatgaaaacagtcagtctgaagattcagttggaggagataatgattctgaaaatggattatgtactgaggatacttgcaaaggtcaactcacgggacacaaaaaacgattgtttacattccagttcaacaacttaggcaatactgatatcaactacatcaaagatgataccaggcatataagatttgatgataggcagcttaggctagatgaaagatcttttcttgctttggattgggatcctgatttgaaaaaaagatattttgatgaaaatgctgctgaggactttgaaaaacatgaaagtgtggagtataaacctcctaaaaaaccctttgtgaaattaaaagattgcattgaactttttacaacaaaagaaaagctaggtgctgaagatccctggtattgtccgaattgtaaagaacatcagcaagccacaaagaaattggatttatggtccctgcctccagtacttgtagtacatctcaagcgattttcttacagtcgatacatgagagacaagttggataccttagttgattttcctatcaatgacttggatatgtcggaattcttaattaatccaaatgcaggtccttgccgctataatctgattgctgtttccaaccactatggagggatgggaggaggacactatactgcttttgcaaaaaataaagatgatggaaaatggtactattttgatgacagtagtgtctccactgcatctgaagaccaaattgtgtccaaagcagcatatgtactcttctaccagagacaagacactttcagtggaactggcttttttcctcttgaccgagaaactaaaggtgcttcagctgccactggcatcccattagaaagtgatgaagatagcaatgataatgacaatgatatagaaaatgaaaactgtatgcacactaactaatgaaagtcctagaagccataaaagagacactttcctgctggtggtatctatggaaatgatgaagttacccaccacattaaaacaaaagtctgagatggggagtttcagataaccgaatgtaaatcctttatcagattttaacttgtgcagtacttgaagtgaaacacaatgaaaactttaacagaaattgtctcttaatacatttacagtcttgtatttacaagctaaatatatataggaaatcacaaataaatcccttttaagtttgctgctgttttgattaattatgtttcctttaattttttggatgtgagttgatgacaaatgttaaatttgtggatgttggtcatttattttgctctaataatactgcaagaaaactatggctgaacttagtttttggataatctagttcatgtgcattaggctgccgtatatactactatgatatttagctgcagtatcaatgtggcataaatactgcggcagcattcttcgaaaaccgcattttcaaatttatccccgtaatcaatgtgggcctattaaaaaaccaaatcatgatacaagaaacaaccttggaaaagttatttccctttgtaatacctttaaaaatccagagtattatattcattttactgccactgtggaaacaggttctagatttcatactccatctaaagtcatttttcagttacatgtaagtattatttactgctattgggatctattcttcagatattcaaaaacattttttgctttaaaatgcatatctttaattgggtgttggtccaaaattaaaatttttgctgtctgtttttctctaccccattttgtggtaatttggcaacttgagctctcccaattattgtaatataaggacagacataatagtattctgtacccatagtaataattgcatcaagcttagatgagaaatttttttcatatactggcctttaaatcattaatggacaattggctataaaggtaggtctgttaactttctttgtgtgttcctgatggaattcaccatagccttacagcttttctcagaaggtaacttgttataagagaaatggcatttgcatgttccagagtcagaacctgtacagtatataaagcataaacaccttgaatttgattttagttcaccacattcaaggatccaggatgccaaaaatatgtgtgaacatttgaaacatttttatttgctgctttttccctttgatatagttgaaagaatgtattgtaaattggcatacaatactgcctttaatagaaaacctaaatgctggggcacatttcacatatcgactacctgagaaattgctttgtgtcccactgttattaaagcaaaaagtataatgttcttcacttgaactaatcaaatacaatagattataaattgtgtattgtaaataaaagttcactctgtgagtgcacattttggtaaattatttatttatgttagcatttaaaagtttaaaaaaaatgcatttgaccaggataaatgaggtatgttgatcatggctttgctttatatcttgatattaaagctggtttatcatcctggtattttaaaagctgctttggggttttttttttcttttttttttttttaatgtaaactaacctcctgcatgacagaggttaaaattttgtctgcacttgagttcacttgagtttacatttgaaatgtgcatgtttatttatatagatttcaataaagctattcaaggcctt

SEQ ID NO: 163871 - protein, 227 aa, Artificial Sequence
  derived and/or modified sequence
MGGKLSKKKKGYNVNDEKAKEKDKKAEGAATEEEGTPKESEPQAAAEPAEAKEGKEKPDQDAEGKAEEKEGEKDAAAAKEEAPKAEPEKTEGAAEAKAEPPKAPEQEQAAPGPAAGGEAPKAAEAAAAPAESAAPAAGEEPSKEEGEPKKTEAPAAPAAQETKSDGAPASDSKPGSSEAAPSSKETPAATEAPSSTPKAQGPAASAEEPKPVEAPAANSDQTVTVKE

SEQ ID NO: 163872 - protein, 173 aa, Artificial Sequence
  derived and/or modified sequence
MGGKLSKKKKGYNVNDEKAKEKDKKAEGAATEEEGTPKESEPQAAAEPAEAKEGKEKPDQDAEGKAEEKEGEKDAAAAKEEAPKAEPDKEEGEPKKTEAPAAPAAQETKSDGAPASDSKPGSSEAAPSSKETPAATEAPSSTPKAQGPAASAEEPKPVEAPAANSDQTVTVKE

SEQ ID NO: 163873 - DNA, 684 bp, Artificial Sequence
  derived and/or modified sequence
atgggaggaaagctttctaaaaagaagaagggatacaacgtgaatgacgagaaagccaaagaaaaggacaagaaggcagaaggtgcagccacagaagaagagggcactccaaaggagagcgagccccaagcggctgctgagccggcggaagcaaaggaagggaaagaaaagcctgaccaggacgcagagggcaaagcagaggaaaaagaaggggagaaagacgctgctgccgctaaagaggaagctccgaaagcagaaccagaaaaaactgagggagccgcagaggccaaggctgagcctccaaaagccccagagcaggagcaagctgctcctggccccgcagctgggggagaagcccccaaggcagcggaagctgccgcagcgcctgcggaatccgccgctccggcagctggtgaagagccctctaaggaagaaggcgagccaaaaaaaacagaggcccccgctgcacctgcggcgcaggagacaaaaagcgacggagcccctgcgtcagatagtaaaccagggagctcggaagccgctccaagtagtaaggaaactccagctgccactgaagcacccagttctacgcccaaggctcagggccctgcagcctccgcagaagaacccaaaccagtggaagcacccgcagccaactcggaccagacagtgaccgtgaaggaatag

SEQ ID NO: 163874 - DNA, 522 bp, Artificial Sequence
  derived and/or modified sequence
atggggggaaagctttccaagaaaaagaaagggtataacgtgaacgatgaaaaggctaaggaaaaagacaaaaaagcagagggggccgccacagaagaagaaggaacccccaaagagagcgagcctcaggccgccgcagagccagcagaagccaaggaaggcaaagaaaaacccgaccaagacgctgaaggcaaggccgaggaaaaagaaggagaaaaagacgccgctgccgcgaaggaggaagctcctaaggccgaacccgacaaggaggagggggaacccaaaaagacagaagcccccgcagcgcctgccgcacaggagaccaaatctgatggggcaccggcatccgacagcaaacccggaagctcagaagccgccccttcgtcgaaagagactccggctgccacagaagcccccagctcaacccccaaggcgcaaggcccagctgcatccgctgaggagccaaagccggtcgaggctccggcagctaattcggaccagacagtgacagtgaaagaatag

SEQ ID NO: 163875 - DNA, 684 bp, Artificial Sequence
  derived and/or modified sequence
atgggcggcaagctgagcaagaagaagaagggctacaacgtgaatgatgagaaggccaaggagaaggacaagaaggccgagggcgccgccacagaggaggagggcacccccaaggagagcgagccccaggccgctgctgagcctgctgaggccaaggagggcaaggagaagccagaccaggatgctgagggcaaggccgaggagaaggagggggagaaggatgctgctgctgccaaggaggaggcccccaaggccgagcctgagaagacagagggcgctgctgaggccaaggccgagccccccaaggcccctgagcaggagcaggccgcccctggccctgctgctggaggagaggcccccaaggctgctgaggccgctgctgccccagctgagagcgctgccccagctgctggggaggagcccagcaaggaggagggggagcccaagaagacagaggccccagctgccccagctgcccaggagaccaagagtgatggagccccagccagtgacagcaagccaggcagcagcgaggccgcccccagcagcaaggagaccccagctgccacagaggcccccagcagcacccccaaggcccagggccctgctgccagcgctgaggagcccaagcctgtggaggccccagctgccaacagcgaccagacagtgacagtgaaggagtag

SEQ ID NO: 163876 - DNA, 522 bp, Artificial Sequence
  derived and/or modified sequence
atgggcggcaagctgagcaagaagaagaagggctacaacgtgaatgatgagaaggccaaggagaaggacaagaaggccgagggcgccgccacagaggaggagggcacccccaaggagagcgagccccaggccgctgctgagcctgctgaggccaaggagggcaaggagaagccagaccaggatgctgagggcaaggccgaggagaaggagggggagaaggatgctgctgctgccaaggaggaggcccccaaggccgagccagacaaggaggagggggagcccaagaagacagaggccccagctgccccagctgcccaggagaccaagagtgatggagccccagccagtgacagcaagccaggcagcagcgaggccgcccccagcagcaaggagaccccagctgccacagaggcccccagcagcacccccaaggcccagggccctgctgccagcgctgaggagcccaagcctgtggaggccccagctgccaacagcgaccagacagtgacagtgaaggagtag

SEQ ID NO: 163877 - DNA, 684 bp, Artificial Sequence
  derived and/or modified sequence
atgggcggcaagctgagcaagaagaagaagggctacaacgtgaacgacgaaaaggctaaagagaaggacaaaaaagcagagggggccgcaacagaagaagagggtactcctaaggagagcgagccacaagcagccgctgaaccagcagaagcgaaggagggcaaggaaaaaccagaccaggatgctgagggaaaggcagaggaaaaagagggcgagaaggatgccgcagccgctaaagaagaggcccctaaggctgagcctgaaaagactgaaggcgcagctgaagcaaaggccgagcccccaaaggcaccagaacaggagcaggccgctcctggtcctgcagcgggtggagaagcgccgaaggccgctgaggctgcagcggctcctgccgaaagcgccgcccctgccgccggggaggagcctagtaaagaggaaggcgagcccaagaagacggaggcccccgccgcccctgccgcccaggagacaaagagtgacggcgcaccagcaagcgactccaaaccaggcagctcggaggccgcaccgagcagtaaggagaccccagccgctacggaggccccctcgagtactcccaaggcacaggggcccgcagcgagtgctgaggagcccaagcccgtggaggcccccgcagctaactctgaccagactgtgaccgtcaaggagtag

SEQ ID NO: 163878 - DNA, 522 bp, Artificial Sequence
  derived and/or modified sequence
atgggcggcaagctgagcaagaagaagaagggctacaacgtgaacgacgagaaggcaaaggaaaaggacaaaaaggccgaaggcgccgcaaccgaagaggagggcactccaaaggagtccgagccccaggcagccgcggaaccagccgaggcaaaagagggtaaagagaagcctgaccaggacgccgagggaaaggcagaggaaaaggagggcgaaaaagacgccgcagctgccaaagaagaggctcctaaggccgagccggataaggaggaaggggagcccaagaagacagaggcacccgccgctcccgctgcccaggaaacaaagagtgacggggcgcctgccagcgactcaaagcctggcagtagcgaggccgctccttcctccaaagaaacgcccgcggcaacagaagccccaagtagcacgcccaaagcccagggtcctgcagcctccgccgaagagcccaaacccgtggaagccccagctgccaattccgatcaaaccgttaccgtcaaagagtag

SEQ ID NO: 163879 - DNA, 684 bp, Artificial Sequence
  derived and/or modified sequence
atgggaggtaaactctcaaagaagaagaaaggctataacgtgaacgatgagaaggctaaagagaaagacaaaaaggccgaaggcgctgccactgaggaggaaggtacacctaaagagagcgagcctcaggcggcagcagaacctgccgaagctaaagaggggaaagagaagccagatcaagacgccgaggggaaagctgaggaaaaagagggagagaaagatgctgccgctgcgaaagaagaggctcctaaggccgaaccggaaaagacagagggagccgcagaagccaaggctgaaccgccaaaagcacctgaacaggaacaggctgcccctggaccagccgctgggggtgaggctccgaaagcagcggaggccgcagctgctccagcagaatctgcagcgccagccgctggagaggaaccaagtaaggaggagggggaacccaagaaaacggaggctccagcggctcctgccgctcaagaaaccaagtccgatggagcccctgcctcagactctaaacccggaagctcggaggcagccccatcttctaaggagacaccagctgccacagaagccccaagcagcacacccaaggcccagggacccgcagcctccgcagaagagcccaagcctgtggaggcacctgcagcgaactccgatcagacagtgaccgtgaaagagtag

SEQ ID NO: 163880 - DNA, 522 bp, Artificial Sequence
  derived and/or modified sequence
atggggggtaagttaagtaaaaagaagaaaggctacaacgtcaatgatgagaaagccaaagagaaagataagaaggctgagggtgctgcaacagaggaggagggcactcccaaggaatctgagccacaggccgcagccgaacccgcagaagcaaaggaaggaaaagagaagccagatcaggatgcagaaggaaaggctgaagaaaaggaaggcgagaaggatgccgctgctgccaaggaagaagccccaaaggccgaacctgataaagaggagggggaaccaaagaaaactgaggcccctgccgctcccgctgcccaggaaaccaaaagtgatggtgctcctgcttccgatagcaaacctgggagctctgaagcggctccttcgagcaaagagaccccagccgcaacagaggctcccagctctaccccgaaagcacaggggcctgcggctagcgcagaagaacccaagcctgtcgaggcgccagctgctaactcggaccagacagtcactgttaaggagtag

SEQ ID NO: 163881 - DNA, 1878 bp, Artificial Sequence
  derived and/or modified sequence
gggcactgggcaggaaggggagggggagcgagcgcgagaaatgcagaggctgcagcggcggcggcggcggcagtagcggcagcggcgacgacggcggcggcagcgctccaactggctcctcgctccgggctccgccgtcgagccgggagagagcctccgccagcggccaggcaccagccagacgacgccagcgaccccggcctctcggcggcaccgcgctaactcaggggctgcataggcacccagagccgaactccaagatgggaggcaagctcagcaagaagaagaagggctacaatgtgaacgacgagaaagccaaggagaaagacaagaaggccgagggcgcggcgacggaagaggaggggaccccgaaggagagtgagccccaggcggccgcagagcccgccgaggccaaggagggcaaggagaagcccgaccaggacgccgagggcaaggccgaggagaaggagggcgagaaggacgcggcggctgccaaggaggaggccccgaaggcggagcccgagaagacggagggcgcggcagaggccaaggctgagcccccgaaggcgcccgagcaggagcaggcggcccccggccccgctgcgggcggcgaggcccccaaagctgctgaggccgccgcggccccggccgagagcgcggcccctgccgccggggaggagcccagcaaggaggaaggggaacccaaaaagactgaggcgcccgcagctcctgccgcccaggagaccaaaagtgacggggccccagcttcagactcaaaacccggcagctcggaggctgccccctcttccaaggagacccccgcagccacggaagcgcctagttccacacccaaggcccagggccccgcagcctctgcagaagagcccaagccggtggaggccccggcagctaattccgaccaaaccgtaaccgtgaaagagtgacaaggacagcctataggaaaaacaataccacttaaaacaatctcctctctctctctctctctctctctctatctctctctctatctcctctctctctctcctctcctatctctcctctctctctctcctatactaacttgtttcaaattggaagtaatgatatgtattgcccaaggaaaaatacaggatgttgtcccatcaagggagggagggggtgggagaatccaaatagtatttttgtggggaaatatctaatataccttcagtcaactttaccaagaagtcctggatttccaagatccgcgtctgaaagtgcagtacatcgtttgtacctgaaactgccgccacatgcactcctccaccgctgagagttgaatagcttttcttctgcaatgggagttgggagtgatgcgtttgattctgcccacagggcctgtgccaaggcaatcagatctttatgagagcagtattttctgtgttttctttttaatttacagcctttcttattttgatatttttttaatgttgtggatgaatgccagctttcagacagagcccacttagcttgtccacatggatctcaatgccaatcctccattcttcctctccagatatttttgggagtgacaaacattctctcatcctacttagcctacctagatttctcatgacgagttaatgcatgtccgtggttgggtgcacctgtagttctgtttattggtcagtggaaatgaaaaaaaaaaaaaaaaaaagtctgcgttcattgcagttccagtttctcttccattctgtgtcacagacaccaacacaccactcattggaaaatggaaaaaaaaaacaaaaaaaaaacaaaaaaatgtacaatggatgcattgaaattatatgtaattgtataaatggtgcaacagtaataaagttaaacaattaaaaagaa

SEQ ID NO: 163882 - DNA, 738 bp, Artificial Sequence
  derived and/or modified sequence
agaggctgcagcggcggcggcggcggcagtagcggcagcggcgacgacggcggcggcagcgctccaactggctcctcgctccgggctccgccgtcgagccgggagagagcctccgccagcggccaggcaccagccagacgacgccagcgaccccggcctctcggcggcaccgcgctaactcaggggctgcataggcacccagagccgaactccaagatgggaggcaagctcagcaagaagaagaagggctacaatgtgaacgacgagaaagccaaggagaaagacaagaaggccgagggcgcggcgacggaagaggaggggaccccgaaggagagtgagccccaggcggccgcagagcccgccgaggccaaggagggcaaggagaagcccgaccaggacgccgagggcaaggccgaggagaaggagggcgagaaggacgcggcggctgccaaggaggaggccccgaaggcggagcccgacaaggaggaaggggaacccaaaaagactgaggcgcccgcagctcctgccgcccaggagaccaaaagtgacggggccccagcttcagactcaaaacccggcagctcggaggctgccccctcttccaaggagacccccgcagccacggaagcgcctagttccacacccaaggcccagggccccgcagcctctgcagaagagcccaagccggtggaggccccggcagctaattccgaccaaaccgtaaccgtgaaagagtga

SEQ ID NO: 163883 - DNA, 684 bp, Artificial Sequence
  derived and/or modified sequence
atgggcggcaagctgagcaagaagaagaagggctacaacgtgaacgacgagaaggccaaggagaaggacaagaaggccgagggcgccgccaccgaggaggagggcacccccaaggagagcgagccccaggccgccgccgagcccgccgaggccaaggagggcaaggagaagcccgaccaggacgccgagggcaaggccgaggagaaggagggcgagaaggacgccgccgccgccaaggaggaggcccccaaggccgagcccgagaagaccgagggcgccgccgaggccaaggccgagccccccaaggcccccgagcaggagcaggccgcccccggccccgccgccggcggcgaggcccccaaggccgccgaggccgccgccgcccccgccgagagcgccgcccccgccgccggcgaggagcccagcaaggaggagggcgagcccaagaagaccgaggcccccgccgcccccgccgcccaggagaccaagagcgacggcgcccccgccagcgacagcaagcccggcagcagcgaggccgcccccagcagcaaggagacccccgccgccaccgaggcccccagcagcacccccaaggcccagggccccgccgccagcgccgaggagcccaagcccgtggaggcccccgccgccaacagcgaccagaccgtgaccgtgaaggagtag

SEQ ID NO: 163884 - DNA, 522 bp, Artificial Sequence
  derived and/or modified sequence
atgggcggcaagctgagcaagaagaagaagggctacaacgtgaacgacgagaaggccaaggagaaggacaagaaggccgagggcgccgccaccgaggaggagggcacccccaaggagagcgagccccaggccgccgccgagcccgccgaggccaaggagggcaaggagaagcccgaccaggacgccgagggcaaggccgaggagaaggagggcgagaaggacgccgccgccgccaaggaggaggcccccaaggccgagcccgacaaggaggagggcgagcccaagaagaccgaggcccccgccgcccccgccgcccaggagaccaagagcgacggcgcccccgccagcgacagcaagcccggcagcagcgaggccgcccccagcagcaaggagacccccgccgccaccgaggcccccagcagcacccccaaggcccagggccccgccgccagcgccgaggagcccaagcccgtggaggcccccgccgccaacagcgaccagaccgtgaccgtgaaggagtag

SEQ ID NO: 163885 - protein, 213 aa, Artificial Sequence
  derived and/or modified sequence
MPDENIFLFVPNLIGYARIVFAIISFYFMPCCPLTASSFYLLSGLLDAFDGHAARALNQGTRFGAMLDMLTDRCSTMCLLVNLALLYPGATLFFQISMSLDVASHWLHLHSSVVRGSESHKMIDLSGNPVLRIYYTSRPALFTLCAGNELFYCLLYLFHFSEGPLVGSVGLFRMGLWVTAPIALLKSLISVIHLITAARNMAALDAADRAKKK

SEQ ID NO: 163886 - protein, 182 aa, Artificial Sequence
  derived and/or modified sequence
MLPTAAGFSIWGQPGAAREAPRCQTKISSCSCPTSSVSAAHGPGPNERARGLGGLPDPALSPRVPFQGYARIVFAIISFYFMPCCPLTASSFYLLSGLLDAFDGHAARALNQGTRFGAMLDMLTDRCSTMCLLVNLALLYPGATLFFQISMSLDVASHWLHLHRSAAILGAWATWRHYSGVG

SEQ ID NO: 163887 - DNA, 642 bp, Artificial Sequence
  derived and/or modified sequence
atgcccgacgagaacatcttcctgttcgtgcccaacctgatcggctacgccagaatcgtgttcgccatcatcagcttctacttcatgccctgctgccccctgaccgccagcagcttctacctgctgagcggcctgctggacgccttcgacggccacgccgccagagccctgaaccagggcaccagattcggcgccatgctggacatgctgaccgacagatgcagcaccatgtgcctgctggtgaacctggccctgctgtaccccggcgccaccctgttcttccagatcagcatgagcctggacgtggccagccactggctgcacctgcacagcagcgtggtgagaggcagcgagagccacaagatgatcgacctgagcggcaaccccgtgctgagaatctactacaccagcagacccgccctgttcaccctgtgcgccggcaacgagctgttctactgcctgctgtacctgttccacttcagcgagggccccctggtgggcagcgtgggcctgttcagaatgggcctgtgggtgaccgcccccatcgccctgctgaagagcctgatcagcgtgatccacctgatcaccgccgccagaaacatggccgccctggacgccgccgacagagccaagaagaagtag

SEQ ID NO: 163888 - DNA, 549 bp, Artificial Sequence
  derived and/or modified sequence
atgctgcccaccgccgccggcttcagcatctggggccagcccggcgccgccagagaggcccccagatgccagaccaagatcagcagctgcagctgccccaccagcagcgtgagcgccgcccacggccccggccccaacgagagagccagaggcctgggcggcctgcccgaccccgccctgagccccagagtgcccttccagggctacgccagaatcgtgttcgccatcatcagcttctacttcatgccctgctgccccctgaccgccagcagcttctacctgctgagcggcctgctggacgccttcgacggccacgccgccagagccctgaaccagggcaccagattcggcgccatgctggacatgctgaccgacagatgcagcaccatgtgcctgctggtgaacctggccctgctgtaccccggcgccaccctgttcttccagatcagcatgagcctggacgtggccagccactggctgcacctgcacagaagcgccgccatcctgggcgcctgggccacctggagacactacagcggcgtgggctag

SEQ ID NO: 163889 - DNA, 642 bp, Artificial Sequence
  derived and/or modified sequence
atgcctgacgaaaatatctttcttttcgtgccgaatctcataggctacgctcgaatcgtgttcgccatcatcagcttctacttcatgccttgctgccctctcactgcttcctccttctacttactctctgggttgctggacgcctttgacggccacgccgccagagcactcaatcaggggacacgttttggcgctatgcttgatatgctgacagaccgctgttctacaatgtgcctgctggtgaatctcgcccttctgtacccaggagccacactattctttcagattagtatgagtttagacgtcgcttcccactggttgcacctgcacagcagtgtggtacgcggcagtgaaagtcacaaaatgattgatttatcaggaaatccagtccttagaatctattacacctcccgccccgccctgtttaccctgtgcgcaggtaatgagctgttctactgtttactctacctctttcactttagcgaaggcccgctggtggggagcgtcggcctgtttaggatggggctgtgggtgactgcacctattgctctactgaagagccttattagcgtcatccatctgatcaccgccgcgcggaacatggccgccctcgacgcagctgatcgcgctaagaaaaagtag

SEQ ID NO: 163890 - DNA, 549 bp, Artificial Sequence
  derived and/or modified sequence
atgttgccaactgccgccggctttagcatatggggtcagccaggcgctgccagggaggcaccaaggtgccaaaccaaaatatcaagctgctcctgcccaacatcctccgtgtccgccgcccacggaccaggtccgaacgagagagcccggggcctgggaggtctaccagatccagccctttctccccgggtgcccttccagggttatgccaggatcgtgtttgcgatcataagcttctactttatgccctgctgccccctcactgcatcatccttctatctgcttagtggtctgctcgacgcgtttgatggccacgctgctcgggctttaaaccagggcacaaggtttggggcaatgctcgatatgcttaccgatagatgcagcacgatgtgcctcctggtgaatctggccctgctgtacccaggcgctaccctgttcttccaaataagcatgagcctggacgttgcatctcactggctccacctgcacagatcggccgcaatccttggtgcgtgggcaacctggcgtcattactctggagtcggttag

SEQ ID NO: 163891 - DNA, 642 bp, Artificial Sequence
  derived and/or modified sequence
atgccagatgagaacatcttcctgtttgtgcccaacctgattggctacgccagaattgtgtttgccatcatctccttctacttcatgccctgctgccccctgacagccagcagcttctacctgctgagcggcctgctggatgcctttgatggccatgctgcccgggccctgaaccagggcaccaggtttggagccatgctggacatgctgacagaccgctgcagcaccatgtgcctgctggtgaacctggccctgctgtacccaggggccaccctcttcttccagatctccatgagcctggatgtggccagccactggctgcacctgcacagctctgtggtgcggggcagcgagagccacaagatgattgacctgagcggcaaccctgtgctgcgcatctactacaccagcaggcctgccctcttcaccctgtgtgctggaaatgagctgttctactgcctgctgtacctgttccacttcagcgagggccccctggtgggctctgtgggcctcttcaggatgggcctgtgggtgacagcccccatcgccctgctgaagagcctcatcagcgtcatccacctgatcacagctgccaggaacatggccgccctggatgctgctgaccgggccaagaagaagtag

SEQ ID NO: 163892 - DNA, 549 bp, Artificial Sequence
  derived and/or modified sequence
atgctgcccacagctgctggcttcagcatctggggccagcccggggccgcccgggaggccccccgctgccagaccaagatcagcagctgcagctgccccaccagctctgtgtctgctgcccacggccctggccccaatgaaagagcccggggcctgggcggcctgcctgaccctgccctgagcccccgggtgcccttccagggctacgcccgcatcgtgtttgccatcatctccttctacttcatgccctgctgccccctgacagccagcagcttctacctgctgagcggcctgctggatgcctttgatggccacgccgcccgggccctgaaccagggcaccaggtttggagccatgctggacatgctgacagaccgctgcagcaccatgtgcctgctggtgaacctggccctgctgtacccaggggccaccctcttcttccagatctccatgagcctggatgtggccagccactggctgcacctgcacaggtctgctgccatcctgggcgcctgggccacctggaggcactacagcggcgtgggctag

SEQ ID NO: 163893 - DNA, 642 bp, Artificial Sequence
  derived and/or modified sequence
atgcccgacgagaacatcttcctgttcgtgcccaacctgatcggctacgccagaattgtattcgccattatttctttttatttcatgccgtgttgtccgctgacggccagttccttctacttactaagtggactgctggacgcctttgacggtcacgccgcccgggcgttgaatcagggcactcggtttggggctatgttagatatgcttaccgaccggtgctccaccatgtgcttattagtgaatctggccctgctgtatcccggtgcgactttattcttccagatttccatgtctctggatgtggcgagtcactggcttcatttacatagcagcgtggtccgaggatctgaatcacacaaaatgatcgacctgtcagggaatcctgtgctgagaatttactatacgtctaggcctgccttatttacactgtgtgctggcaacgagctcttctattgtctcctttacctcttccattttagcgagggccccttagtgggaagtgtgggcctcttcagaatgggcctttgggtgaccgctcctatagcgctgctgaaatcactgatcagcgtgatccatcttattactgccgctagaaatatggctgcactggacgcagccgatagggccaaaaagaaatag

SEQ ID NO: 163894 - DNA, 549 bp, Artificial Sequence
  derived and/or modified sequence
atgctgcccaccgccgccggcttcagcatctggggccagcccggcgcagcccgggaggctcctagatgtcagacaaagatcagctcgtgctcctgtccgacatcttccgtcagtgctgcgcacggaccggggcctaacgaacgagcccgaggccttggagggttacccgaccctgccctatctcctagggtacccttccaaggatacgcccggattgttttcgcaatcattagtttctattttatgccgtgctgtccacttactgcctcgtctttttacctgctctcagggctattagatgctttcgacggccatgcagcccgcgctctgaaccagggaacacggtttggtgccatgctggatatgcttactgatcgttgtagcactatgtgccttctggtcaatttagctctgttatacccaggcgctactctgttttttcagatttctatgagccttgatgtagccagtcactggctgcatcttcaccgctcagccgcaatcttgggcgcctgggctacttggcgccactattccggggtggggtag

SEQ ID NO: 163895 - DNA, 642 bp, Artificial Sequence
  derived and/or modified sequence
atgccagacgaaaatattttcctgttcgtgcccaacttgataggttacgccagaatagtattcgccataatctccttctacttcatgccgtgctgccccttgacagctagcagcttttatttgctatccggactgctagacgccttcgatggccatgcagctcgcgcactcaatcaggggactaggttcggtgctatgctggacatgctaacagacagatgttcaacgatgtgtttgcttgttaacttggcgttgttatacccaggagctactctttttttccagattagcatgtccttggacgtagcatctcattggttgcacctgcacagctctgtggtgcggggttctgaaagccacaagatgattgatctgtccggaaacccggttctccggatttactacacgtctcggcctgcactcttcaccctctgtgccggaaatgagctgttttattgcctgctttacctgttccactttagcgagggcccactggttgggtccgtgggcctgttccgaatgggcttgtgggtgaccgctcccatcgccctgttgaaaagcctcatatctgtgatacacctcatcaccgcagcacggaacatggcagctttagatgctgcagaccgggctaaaaagaagtag

SEQ ID NO: 163896 - DNA, 549 bp, Artificial Sequence
  derived and/or modified sequence
atgctcccgaccgccgctgggttcagtatttggggacagcctggggctgcccgagaggcgccaagatgccagacaaaaatatcttcatgttcatgccctacctcgtctgtgtccgcagcccacggacccggacctaacgaaagggccagaggcttaggcggtctgccagaccctgcactgtctcctcgtgttcccttccagggatacgcccgaattgtattcgcgatcatctccttctattttatgccttgttgccccttgactgcttccagtttttacctgctgtccggcctccttgacgccttcgatggtcacgccgcacgagccctcaatcaggggactagattcggtgccatgcttgacatgctaactgaccgatgttccacaatgtgtctcctcgttaatctggctcttttatatccgggtgccactctgtttttccagatctctatgtccctggacgtcgcttcacattggctccacttacatcggtccgccgctatcttgggcgcttgggccacatggcgccactactcaggcgtgggatag

SEQ ID NO: 163897 - DNA, 2351 bp, Artificial Sequence
  derived and/or modified sequence
gtacccctccaggtgcctccttgagggcagtgaccccaagcgccagacgcttgagaagcttgggaggatgacgtagggtggagcctgcgacctaatcctcccatcacaaggggcacgcgaaaagcaacccatctgcagggcgctctggagcctctctagccgcctagagcctgcgagagcaaaggcggctggagacttagggggcggggagtaaagtgaggactgcaccaaatctcctggcctcttggggacgcaaagactcaggaggaggaattttatcgccttatctttgcctccaggaagtcataccctccacaaaaggaaagcagagatttttattcggtcttctcttttaccctttccttttccgtttctaactttgcttgacgttaatggttccttcctccctctcctcctctgcgctttggtacgagccaagggagaggggcggagggaggaaaagggaaaggaagccgacaggccttaaaggggccgcaactatttttttaagccactttttcctctctccaattttgcaacgacgggcgcggaggaggaggttcccggaagccacgcgcagctggagcagcggcgaccgcagctggaggcccggagcgcctgcggggctggcagaggcgagggaggttgcgggtaggaagggcggactgcgcgcgccccctgcgtcccgcgcacctcggggccggtccatgctcccgacggctgcgggcttcagcatctggggccaggttggggcggcggggtccagggcgcaggtggtgcggccgatgcgccgggccggaggctgaggccgcgctgcggggctgggacagcactggcatctccagagcaggcccggggcagcaagggaggcgccgcgatgccagacgaaaatatcttcctgttcgtgcccaacctcatcggttatgcccggattgtcttcgccatcatttctttctacttcatgccctgctgccccctcacggcctcctccttctacctgctcagcggcctgctggacgctttcgatggacacgctgctcgcgctcttaatcaaggaacccggtttggggccatgctggacatgctgacggaccgctgctccaccatgtgcctgttggtcaacctggccctgctgtaccctggagccacgctgttcttccaaatcagcatgagtttggatgtggccagtcactggctgcacctccacagttctgtggtccgaggcagtgagagtcacaagatgatcgacttgtccgggaatccggtgcttcggatctactacacctcgaggcctgctctgttcaccttgtgtgctgggaatgagctcttctactgcctcctctacctgttccatttctctgagggacctttagttggctctgtgggactgttccggatgggcctctgggtcactgcccccatcgccttgctgaagtcgctcatcagcgtcatccacctgatcacggccgcccgcaacatggctgccctggacgcagcagaccgcgccaagaagaagtgacgctggagccccgggtcctggctgcccacctgccctgggagtcttgctgtgccacacagctccccaccccctgctaggaggtcccagtctcacgccttcctcatgtgttgttctacctgctgggatgggggtcagcctctctttggtgacgtcacgttctctgggatcctgaggacccgggcctcaaatcagggaggatacgcgggaggccccctccatccaggcggtgctcctggggtgccgggaccgggcagtgtcacaccctgcctgctcagtcctggggtccgagatgctagggacgcttgagtgagggaggtggtgtgagggccaggtttcctgaaaggcgggagtcagacctccgcccccagccagagcaagcttggggcaccatgcccaggagggaagaagccatccacagccttccctgtcaccggctcctctgtcctgcctaccctggtcctggcgggacttcactatttgacttggtttcctttcagatattcttggctcagggcctgggttgagggagcttagggaaggacgtccgtctgggtgcttttcctccagtttgctggctggcttctccgtctacccacagtgacctcacagagaggccctcctgccacccatgctcatgtggtgtccccaccgcccacttgtttgatgtcactgactgtctacatgtatttatattcttgatattttctaccctcactagaatgtaaactccatgaaggcacagacttttcttgttctcttctctatccctagagtaagaccaacttgaacctggcatatagtagctgcttaataaatactcgtctgtcaatga

SEQ ID NO: 163898 - DNA, 2075 bp, Artificial Sequence
  derived and/or modified sequence
atgctcccgacggctgcgggcttcagcatctggggccagcccggggcagcaagggaggcgccgcgatgccagacgaaaatatcttcctgttcgtgcccaacctcatcggtgagtgctgcccacggccccgggccgaacgagagggcgaggggccttggcgggctccctgatcctgccctgtctccccgcgtcccgttccaaggttatgcccggattgtcttcgccatcatttctttctacttcatgccctgctgccccctcacggcctcctccttctacctgctcagcggcctgctggacgctttcgatggacacgctgctcgcgctcttaatcaaggaacccggtttggggccatgctggacatgctgacggaccgctgctccaccatgtgcctgttggtcaacctggccctgctgtaccctggagccacgctgttcttccaaatcagcatgagtttggatgtggccagtcactggctgcacctccacaggtctgctgcgattctgggggcctgggccacttggagacattacagtggggtgggctgagcctagacggaagggtgtctgggatggcactaggcatcctggaagggctcctttttagctctgctttgtagaaagaccccaggcaaacctgcctctctttaaagcttcagtcatgtttacagttgcattaagcaattcttaggactcttctggctgggtattctaggattccatataggtgacagcttataggaaggggcatgggagctttcaaatgtggcatttgaatcctgactctgcccccaaataggtaactgtggctttcggcaggatactggtccttagccgtgcccagttttccatctgtacaataggtgttaacatgaggattggatgcatggtagtggtcatgaaaccttgtgggttcccctgttttctccccaagttctgtggtccgaggcagtgagagtcacaagatgatcgacttgtccgggaatccggtgcttcggatctactacacctcgaggcctgctctgttcaccttgtgtgctgggaatgagctcttctactgcctcctctacctgttccatttctctgagggacctttagttggctctgtgggactgttccggatgggcctctgggtcactgcccccatcgccttgctgaagtcgctcatcagcgtcatccacctgatcacggccgcccgcaacatggctgccctggacgcagcagaccgcgccaagaagaagtgacgctggagccccgggtcctggctgcccacctgccctgggagtcttgctgtgccacacagctccccaccccctgctaggaggtcccagtctcacgccttcctcatgtgttgttctacctgctgggatgggggtcagcctctctttggtgacgtcacgttctctgggatcctgaggacccgggcctcaaatcagggaggatacgcgggaggccccctccatccaggcggtgctcctggggtgccgggaccgggcagtgtcacaccctgcctgctcagtcctggggtccgagatgctagggacgcttgagtgagggaggtggtgtgagggccaggtttcctgaaaggcgggagtcagacctccgcccccagccagagcaagcttggggcaccatgcccaggagggaagaagccatccacagccttccctgtcaccggctcctctgtcctgcctaccctggtcctggcgggacttcactatttgacttggtttcctttcagatattcttggctcagggcctgggttgagggagcttagggaaggacgtccgtctgggtgcttttcctccagtttgctggctggcttctccgtctacccacagtgacctcacagagaggccctcctgccacccatgctcatgtggtgtccccaccgcccacttgtttgatgtcactgactgtctacatgtatttatattcttgatattttctaccctcactagaatgtaaactccatgaaggcacagacttttcttgttctcttctctatccctagagtaagaccaacttgaacctggcatatagtagctgcttaataaatactcgtctgtcaatg

SEQ ID NO: 163899 - protein, 223 aa, Artificial Sequence
  derived and/or modified sequence
MAAGDGDVKLGTLGSGSESSNDGGSESPGDAGAAAEGGGWAAAALALLTGGGEMLLNVALVALVLLGAYRLWVRWGRRGLGAGAGAGEESPATSLPRMKKRDFSLEQLRQYDGSRNPRILLAVNGKVFDVTKGSKFYGPAGPYGIFAGRDASRGLATFCLDKDALRDEYDDLSDLNAVQMESVREWEMQFKEKYDYVGRLLKPGEEPSEYTDEEDTKDHNKQD

SEQ ID NO: 163900 - protein, 247 aa, Artificial Sequence
  derived and/or modified sequence
MGGAGRGVGEGRGRGGGGRRWRAVMAAGDGDVKLGTLGSGSESSNDGGSESPGDAGAAAEGGGWAAAALALLTGGGEMLLNVALVALVLLGAYRLWVRWGRRGLGAGAGAGEESPATSLPRMKKRDFSLEQLRQYDGSRNPRILLAVNGKVFDVTKGSKFYGPAGPYGIFAGRDASRGLATFCLDKDALRDEYDDLSDLNAVQMESVREWEMQFKEKYDYVGRLLKPGEEPSEYTDEEDTKDHNKQD

SEQ ID NO: 163901 - DNA, 672 bp, Artificial Sequence
  derived and/or modified sequence
atggccgccggcgacggggacgtcaagctggggacacttggaagtggttccgaaagctctaacgacggtggaagcgagtctcctggggatgctggcgccgcagccgaaggcggtggatgggcagcagctgcattagcattgttgaccggagggggcgaaatgttgttaaacgttgctttagtcgccctcgtgctgctcggcgcatacaggctgtgggtgcggtggggtaggcgaggactgggcgcgggagcaggagccggtgaggagagccctgcaacatctctaccccggatgaaaaaaagagatttttccctggaacaactacggcaatacgatggaagtcgtaacccacggatcctgctagccgtgaacggtaaagttttcgatgtgactaaaggatctaagttctacggccccgctggcccatatggaatctttgccggccgcgacgcctcacgcggtctcgcgaccttctgcctcgacaaagacgcactgcgcgacgagtatgacgaccttagtgacctaaatgctgttcagatggagtccgtgcgggagtgggagatgcagttcaaggaaaaatatgattatgttggaaggctgctaaagccaggggaagagccttccgagtacacagacgaagaggataccaaggatcacaataaacaggactag

SEQ ID NO: 163902 - DNA, 744 bp, Artificial Sequence
  derived and/or modified sequence
atgggcggagctggcaggggcgttggcgaaggacgaggccgcggaggcggcggtcgcaggtggcgggcggtgatggcagccggggacggagatgtgaagttgggtactctgggctcggggtccgagagctctaacgacgggggtagtgagtctccaggggacgccggcgccgcagccgagggcggtgggtgggccgccgccgccttagcgcttctcacagggggaggagaaatgctgctgaacgtggccctggtagctctcgtgctgcttggggcatatagactttgggtcagatgggggcgaaggggactcggggctggggcgggggccggagaggagagccctgccaccagtctgcctcgcatgaaaaagcgggatttctcgctagaacagctcagacagtacgatggttccagaaatccaaggatactactggctgtcaacggcaaagtgttcgatgttacaaagggatccaaattttatggaccagccggcccatatggaatttttgccggtagggacgcatctagaggtcttgccaccttttgtttggacaaggacgctctgcgtgacgagtatgatgatttgagcgacttaaacgctgtgcagatggagagtgtgcgcgaatgggagatgcaattcaaggaaaaatatgactacgtgggccgcctcctgaaacccggcgaggagccctcggagtacaccgatgaggaggatacgaaagatcataacaagcaggattag

SEQ ID NO: 163903 - DNA, 672 bp, Artificial Sequence
  derived and/or modified sequence
atggctgctggagatggagatgtgaagctgggcaccctgggcagcggcagcgagagcagcaatgatggcggcagcgagagccctggagatgctggagctgctgctgagggcggcggctgggccgctgctgccctggccctgctgactggaggaggagagatgctgctgaatgtggccctggtggccctggtgctgctgggcgcctaccgcctgtgggtgcgctggggcagaagaggcctgggcgctggggccggggccggggaggagagccctgccaccagcctgcccaggatgaagaagagggacttcagcctggagcagctgcggcagtatgatggcagcaggaacccccgcatcctgctggccgtgaatggcaaggtgtttgatgtgaccaagggcagcaagttctacggccctgctggcccctacggcatctttgctggaagagatgccagccggggcctggccaccttctgcctggacaaggatgccctgagagatgaatatgatgacctgagtgacctgaatgctgtgcagatggagagcgtgcgggagtgggagatgcagttcaaggagaagtatgactatgtgggccgcctgctgaagccaggagaggagcccagcgagtacacagatgaggaggacaccaaggaccacaacaagcaggactag

SEQ ID NO: 163904 - DNA, 744 bp, Artificial Sequence
  derived and/or modified sequence
atgggcggggccggccggggcgtgggggagggccggggccggggcggcggcggccgccgctggagggctgtgatggctgctggagatggagatgtgaagctgggcaccctgggcagcggcagcgagagcagcaatgatggcggcagcgagagccctggagatgctggagctgctgctgagggcggcggctgggccgctgctgccctggccctgctgactggaggaggagagatgctgctgaatgtggccctggtggccctggtgctgctgggcgcctaccgcctgtgggtgcgctggggcagaagaggcctgggcgctggggccggggccggggaggagagccctgccaccagcctgcccaggatgaagaagagggacttcagcctggagcagctgcggcagtatgatggcagcaggaacccccgcatcctgctggccgtgaatggcaaggtgtttgatgtgaccaagggcagcaagttctacggccctgctggcccctacggcatctttgctggaagagatgccagccggggcctggccaccttctgcctggacaaggatgccctgagagatgaatatgatgacctgagtgacctgaatgctgtgcagatggagagcgtgcgggagtgggagatgcagttcaaggagaagtatgactatgtgggccgcctgctgaagccaggagaggagcccagcgagtacacagatgaggaggacaccaaggaccacaacaagcaggactag

SEQ ID NO: 163905 - DNA, 672 bp, Artificial Sequence
  derived and/or modified sequence
atggccgccggcgacggcgacgtgaagctgggcaccctgggcagcgggtctgagagctcaaatgacgggggctccgagtctcccggcgacgccggcgcagctgcagaggggggcggatgggcagctgccgcgttggccttgctgaccggtggaggagaaatgctgcttaacgtggccttggttgcgctggtgttgcttggggcttacaggttgtgggtccgctggggcaggaggggcttgggtgctggcgccggcgccggggaagagagccccgctacctccctgcctagaatgaaaaagcgcgatttttcacttgaacagctgcggcaatacgacggcagtaggaacccacggattctgctggcggttaacggaaaggtgtttgacgtaacgaaagggtccaaattctacggccccgcaggaccctacgggatctttgcaggtcgggatgcatcgcgtggtctggccaccttttgtctagataaggacgccctccgggatgaatatgacgatctgagcgatcttaacgccgtgcagatggagagcgtcagagaatgggagatgcaattcaaggagaagtacgactatgtcggccgactcttgaagccgggtgaggagcccagtgagtacacagatgaggaggacacaaaggatcacaataaacaggactag

SEQ ID NO: 163906 - DNA, 744 bp, Artificial Sequence
  derived and/or modified sequence
atgggcggcgccggccggggcgtgggcgagggccggggccggggcgggggcggcaggcgatggcgagctgttatggccgctggtgatggagatgtgaagctgggtacactcggttcaggcagcgagagctccaatgatggtgggtctgagtcgccaggggatgccggggcggccgccgaagggggcggctgggctgcagccgctctcgccttgttgaccggtggtggggagatgctgcttaatgtcgctttggtggctctggtcctgctcggggcttacaggctgtgggtgaggtggggaaggcgtgggcttggggccggcgccggtgctggcgaagagtcgccagctaccagtctgccacggatgaagaaacgcgatttctccctggagcagctgcggcagtacgatggctctaggaacccccgcatactgttggcagtaaacggcaaagtatttgacgtaacaaaaggctcaaaattctacggccccgctggaccctacggtatcttcgcaggacgagatgcctctagggggttagccacattttgcttagataaggatgcattgagagatgaatatgatgatctgtctgacctgaatgcagtccagatggagagtgtgcgggagtgggaaatgcagtttaaagaaaaatacgattacgtgggtcgcttgttgaagcccggagaagagcccagcgaatatacagacgaagaggacactaaggatcacaataaacaggattag

SEQ ID NO: 163907 - DNA, 672 bp, Artificial Sequence
  derived and/or modified sequence
atggcggctggagacggggacgtgaagctgggaactctgggctctggttccgagtcatcaaacgatggaggatccgagtcacctggtgacgccggagctgcggctgaggggggaggctgggctgccgctgccctagcccttcttaccggaggcggtgagatgctgctgaatgttgccctcgtggccctggttctgctgggagcatataggctctgggttcggtggggacgcagaggcctgggcgcaggcgctggcgctggggaagaaagccctgctactagcctgcctaggatgaagaaacgggacttcagtctggagcagctgcggcagtatgacggatcacgcaatcccaggattctgctcgccgttaatggcaaggttttcgacgtcactaaagggagtaagttttacggccctgcagggccttacgggatctttgccggacgagatgcaagccggggattggccactttctgccttgacaaagacgctcttagagacgagtatgacgacctgtcagacctgaatgctgtccagatggagagcgttcgggagtgggagatgcagtttaaggaaaagtatgactacgtgggccgactgctgaagcccggtgaagaaccttccgagtacacagatgaggaagacaccaaagatcataacaaacaggactag

SEQ ID NO: 163908 - DNA, 402 bp, Artificial Sequence
  derived and/or modified sequence
atggccgctggcgacggggacgtcaagctgggcactctgggcagtggcagcgagtctagtaatgacggcggatcagagtcccccggagacgcaggtgccgcagcggaaggcggtggatgggcggctgctgcactggctcttctgaccggtggaggcgagatgctgcttaatgttgccttggttgccctggtgctgctgggtgcttatagactttgggtgcggtgggggagacgcggactgggggctggggcaggtgccggtctccagttaggagccgctgcacctgttcgtcgacttccccagcccgctcaccccgctaggggccagtgggaatccctgcgacgggatcagcggcagcaggtgctgcgccctggagggagtatatggaacatttgctggtag

SEQ ID NO: 163909 - DNA, 744 bp, Artificial Sequence
  derived and/or modified sequence
atgggaggagcagggcgaggggtgggcgaaggacgtgggagagggggaggtggcagaaggtggcgagccgtcatggcagctggggacggtgacgtcaagctgggcaccctggggagtgggtccgagagctctaacgacggcggtagcgagagtcctggcgacgctggagcggctgccgagggcggaggctgggcggctgcagccctcgctttattgacaggcggaggggagatgctgctcaacgtggctctggtggcactagtgttactaggggcttacagactctgggtgagatggggcaggcgcggtttaggagccggtgcgggtgctggtgaggagagtcccgctactagtttgcctcggatgaaaaagcgcgatttcagcttagaacagcttaggcagtacgatggatcacgcaatcctagaatcctgttagcggtgaacggcaaggtatttgatgtcaccaagggatctaagttctacggcccagcaggaccctacggcatctttgccggacgggacgcctcaagaggactcgcgaccttttgtctggacaaagacgcactgagggatgaatatgacgacctgagtgatttaaacgcagtccaaatggaatccgtgagggagtgggagatgcagtttaaagagaagtatgactacgtcgggaggctgctgaagcctggtgaagaaccttcagaatacaccgacgaggaagatacgaaggaccacaacaagcaggattag

SEQ ID NO: 163910 - DNA, 3783 bp, Artificial Sequence
  derived and/or modified sequence
cacactagaatttcaaggtgtgagaggctaaaagacgtccaagtacatgaaacagaacctgcaaataagagtgaatgacgaatagaaagaccacctcaacctgtccacttccctacggccgcagaagttatgattcaaggaataatgagactctaaatcctttaaaattctacaagagcagcctttgccaaacccagcggggagtggctgctcggtgccagcgcgaggagcacgtagactgccgatgccagagaagcccggtgcgggttccgtgctttctctccgttccaggaagaccccagctcgtggccaaatcttcttgccgcttcccggtctgcgcgcctacgctgccggtttcccgacaaaagcgacggcgccctggtgaaaagcagacgcccctcatcggtttgcgccttgcagctcaactatgccccagcctcccacaagccacctgcccgcgtcctccgccaggcgtccagcccggacctgcccccgcggccgccaaggcgcacgtgaagctcccgggcggggggagcgcaaggaggcgggagtttgcggacgcgaacgcaggcctaggaagggaagcgattccagggcgcacgcgcagagcctggagactgggcggggcgtgcctcccgcaggggttacgaacgaaaggcgagcgcgtggcgctcaggagcccgcgcacgcgctgtggtctcgccccgcccatgagcgtccgcgcggccgtcgtagcatcttttcttcagacccgcccggctcgtctacttaacctagcggaggcttggagtgagagcagggaagtgtggggcgaggtgggcggggcgttgcacgcgtgcgcggccagcgaaagaagggagggggcgggagatccgagacaacgttaccccgtcaacacccaatcaggagccggcctgaccccgccccctcttctcacgttattggctgagaggcccccagatgggcggggccggccgtggggttggggagggcagggggcggggaggaggaggaaggcgctggcgggcagtgatggcggctggtgatggggacgtgaagctaggcaccctggggagtggcagcgagagcagcaacgacggcggcagcgagagtccaggcgacgcgggagcggcagcggaagggggaggctgggcggcggcggcgttggcgcttctgacggggggcggggaaatgctgctgaacgtggcgctggtggctctggtgctgctgggggcctaccggctgtgggtgcgctgggggcggcggggtctgggggccggggccggggcgggcgaggagagccccgccacctctctgcctcgcatgaagaagcgggacttcagcttggagcagctgcgccagtacgacggctcccgcaacccgcgcatcctgctcgcggtcaatgggaaagtcttcgacgtgaccaaaggcagcaagttctacggcccggcgggtccatatggaatatttgctggtagggatgcctccagaggactggccacattttgcctagataaagatgcacttagagatgaatatgatgatctctcagatttgaatgcagtacaaatggagagtgttcgagaatgggaaatgcagtttaaagaaaaatatgattatgtaggcagactcctaaaaccaggagaagaaccatcagaatatacagatgaagaagataccaaggatcacaataaacaggattgaactttgtaaacaaccaaagtcaggggccttcagaactgcaattcttactccctttcacagactgtccggagtctttgggtttgattcacctgctgcgaaaaacattcaacaaattgtgtacaagataaattaatctcactatgaagatttgaataactagacattatttatgctgccaaactcatttgttgcagttgtttgtaatgtctagtggggcttcatcatcctgaaaagaaggagacagggatttttttaaagagcaagaaagtcacaatattacttctttccttccttttttccttctttcctttcttctttctctttctttctttttaaaatatattgaagacaaccagatatgtatttgctactcaagtgtacagatctcctcaagaaacatcaagggactcctgtgtcacatactgtgtttttattttaacatgggtgagggaggcgacctgatcaggggaggtgggggtacacatcaatttgagttgttcaggctactgaaacattaaaatgtgaattcccaaacttttctttttggctttgtcagggaaaagaaaaatatctttataaagaaatctttggaaattaggagaaggaatttcaggtgggtttaagtcagagctagttccccaacagaaagatcatttgaaaccagtttttatcccttctctttccttccctttccctaaatcaaatcaatattaattgtgccttatttcacttaacatagacttgaattatttttagggaaagcccctataatgaattcagaaatcactacaagcagcattaagactgaagttggaatattctgttgaccataaaaccttgatatcattctgtgtatatagaatgtaaaaggaatattacagtgttaactgccatatatgtaatatacacaaactcaattagcattgtaatggccaaatgcattcccccatgcttttctgttttcaaaaaaattgaaaaacaaatcaactcttatccccaacagctgcctaattttaggagtctgaccctccacatctcactggtgtgggtgcatggggctgtggagtgggtgtcagtatggatgtgtctgaatgtgtgaggccttggaagggactctttctgcagatactgtaaatacaagtaccattttaataaagcatgtacaataaaccaaaataagcttgagttggactttatatacagaactgtaagccagtgcattatgatacagttgtaagattgtgcatttgattcaagataaggaaaaatcttggaaatgaaaagcaggcactggttaaccaagttgtacacattgtaccacattcagcataactttaggaagaaattccactttgtggaacattctccagaaatccaagattattcaggtaagaattggtatattaaatgtacatctttttactttctattttgatgccaactgattatactagacaattagcactccaggtggttattgaacacaaaacagtaaaagaatattgcactgatagatactaaattattattttattaggttgaaaaagcccttactaaaagcccctcatatatcaattactttatttcattatgactacttaggttccgggctggggacaagttcacttaaaaaggcaatgttatttaacaggtcaccagttaagacttctgctttgtagatacatgcagaagccatcaaacaagggggagcttttaactgcaacaataagctaaagtatgtaaaatactacattctattcagtcttggagtgttttgtagaaagttatcttcagccaaatctttgctgaagactggttgtggagtgttggtaaatgctttgtgtttttatgtaaaatattttctaaacaaaaaatgttaaaagtacatgtcctctgtagtaaactgatatctatatatatgaatcattcaagcctaaagtctagtaataaactgtacttgtgaatagagaaaccctaaatattcatgcagaaaaaattatgcggtctgttaagaaaaatgagtaatttgtgttttggacttgaaataaacagtgttctgtagataattcctcaacttca

SEQ ID NO: 163911 - DNA, 2708 bp, Artificial Sequence
  derived and/or modified sequence
gaaggcgctggcgggcagtgatggcggctggtgatggggacgtgaagctaggcaccctggggagtggcagcgagagcagcaacgacggcggcagcgagagtccaggcgacgcgggagcggcagcggaagggggaggctgggcggcggcggcgttggcgcttctgacggggggcggggaaatgctgctgaacgtggcgctggtggctctggtgctgctgggggcctaccggctgtgggtgcgctgggggcggcggggtctgggggccggggccggggcgggacttcagcttggagcagctgcgccagtacgacggctcccgcaacccgcgcatcctgctcgcggtcaatgggaaagtcttcgacgtgaccaaaggcagcaagttctacggcccggcgggtccatatggaatatttgctggtagggatgcctccagaggactggccacattttgcctagataaagatgcacttagagatgaatatgatgatctctcagatttgaatgcagtacaaatggagagtgttcgagaatgggaaatgcagtttaaagaaaaatatgattatgtaggcagactcctaaaaccaggagaagaaccatcagaatatacagatgaagaagataccaaggatcacaataaacaggattgaactttgtaaacaaccaaagtcaggggccttcagaactgcaattcttactccctttcacagactgtccggagtctttgggtttgattcacctgctgcgaaaaacattcaacaaattgtgtacaagataaattaatctcactatgaagatttgaataactagacattatttatgctgccaaactcatttgttgcagttgtttgtaatgtctagtggggcttcatcatcctgaaaagaaggagacagggatttttttaaagagcaagaaagtcacaatattacttctttccttccttttttccttctttcctttcttctttctctttctttctttttaaaatatattgaagacaaccagatatgtatttgctactcaagtgtacagatctcctcaagaaacatcaagggactcctgtgtcacatactgtgtttttattttaacatgggtgagggaggcgacctgatcaggggaggtgggggtacacatcaatttgagttgttcaggctactgaaacattaaaatgtgaattcccaaacttttctttttggctttgtcagggaaaagaaaaatatctttataaagaaatctttggaaattaggagaaggaatttcaggtgggtttaagtcagagctagttccccaacagaaagatcatttgaaaccagtttttatcccttctctttccttccctttccctaaatcaaatcaatattaattgtgccttatttcacttaacatagacttgaattatttttagggaaagcccctataatgaattcagaaatcactacaagcagcattaagactgaagttggaatattctgttgaccataaaaccttgatatcattctgtgtatatagaatgtaaaaggaatattacagtgttaactgccatatatgtaatatacacaaactcaattagcattgtaatggccaaatgcattcccccatgcttttctgttttcaaaaaaattgaaaaacaaatcaactcttatccccaacagctgcctaattttaggagtctgaccctccacatctcactggtgtgggtgcatggggctgtggagtgggtgtcagtatggatgtgtctgaatgtgtgaggccttggaagggactctttctgcagatactgtaaatacaagtaccattttaataaagcatgtacaataaaccaaaataagcttgagttggactttatatacagaactgtaagccagtgcattatgatacagttgtaagattgtgcatttgattcaagataaggaaaaatcttggaaatgaaaagcaggcactggttaaccaagttgtacacattgtaccacattcagcataactttaggaagaaattccactttgtggaacattctccagaaatccaagattattcaggtaagaattggtatattaaatgtacatctttttactttctattttgatgccaactgattatactagacaattagcactccaggtggttattgaacacaaaacagtaaaagaatattgcactgatagatactaaattattattttattaggttgaaaaagcccttactaaaagcccctcatatatcaattactttatttcattatgactacttaggttccgggctggggacaagttcacttaaaaaggcaatgttatttaacaggtcaccagttaagacttctgctttgtagatacatgcagaagccatcaaacaagggggagcttttaactgcaacaataagctaaagtatgtaaaatactacattctattcagtcttggagtgttttgtagaaagttatcttcagccaaatctttgctgaagactggttgtggagtgttggtaaatgctttgtgtttttatgtaaaatattttctaaacaaaaaatgttaaaagtacatgtcctctgtagtaaactgatatctatatatatgaatcattcaagcctaaagtctagtaataaactgtacttgtgaatagagaaaccctaaatattcatgcagaaaaaattatgcggtctgttaagaaaaatgagtaatttgtgttttggacttgaaataaacagtgttctgt

SEQ ID NO: 163912 - DNA, 3785 bp, Artificial Sequence
  derived and/or modified sequence
actttttcacactagaatttcaaggtgtgagaggctaaaagacgtccaagtacatgaaacagaacctgcaaataagagtgaatgacgaatagaaagaccacctcaacctgtccacttccctacggccgcagaagttatgattcaaggaataatgagactctaaatcctttaaaattctacaagagcagcctttgccaaacccagcggggagtggctgctcggtgccagcgcgaggagcacgtagactgccgatgccagagaagcccggtgcgggttccgtgctttctctccgttccaggaagaccccagctcgtggccaaatcttcttgccgcttcccggtctgcgcgcctacgctgccggtttcccgacaaaagcgacggcgccctggtgaaaagcagacgcccctcatcggtttgcgccttgcagctcaactatgccccagcctcccacaagccacctgcccgcgtcctccgccaggcgtccagcccggacctgcccccgcggccgccaaggcgcacgtgaagctcccgggcggggggagcgcaaggaggcgggagtttgcggacgcgaacgcaggcctaggaagggaagcgattccagggcgcacgcgcagagcctggagactgggcggggcgtgcctcccgcaggggttacgaacgaaaggcgagcgcgtggcgctcaggagcccgcgcacgcgctgtggtctcgccccgcccatgagcgtccgcgcggccgtcgtagcatcttttcttcagacccgcccggctcgtctacttaacctagcggaggcttggagtgagagcagggaagtgtggggcgaggtgggcggggcgttgcacgcgtgcgcggccagcgaaagaagggagggggcgggagatccgagacaacgttaccccgtcaacacccaatcaggagccggcctgaccccgccccctcttctcacgttattggctgagaggcccccagatgggcggggccggccgtggggttggggagggcagggggcggggaggaggaggaaggcgctggcgggcagtgatggcggctggtgatggggacgtgaagctaggcaccctggggagtggcagcgagagcagcaacgacggcggcagcgagagtccaggcgacgcgggagcggcagcggaagggggaggctgggcggcggcggcgttggcgcttctgacggggggcggggaaatgctgctgaacgtggcgctggtggctctggtgctgctgggggcctaccggctgtgggtgcgctgggggcggcggggtctgggggccggggccggggcgggcgaggagagccccgccacctctctgcctcgcatgaagaagcgggacttcagcttggagcagctgcgccagtacgacggctcccgcaacccgcgcatcctgctcgcggtcaatgggaaagtcttcgacgtgaccaaaggcagcaagttctacggcccggcgggtccatatggaatatttgctggtagggatgcctccagaggactggccacattttgcctagataaagatgcacttagagatgaatatgatgatctctcagatttgaatgcagtacaaatggagagtgttcgagaatgggaaatgcagtttaaagaaaaatatgattatgtaggcagactcctaaaaccaggagaagaaccatcagaatatacagatgaagaagataccaaggatcacaataaacaggattgaactttgtaaacaaccaaagtcaggggccttcagaactgcaattcttactccctttcacagactgtccggagtctttgggtttgattcacctgctgcgaaaaacattcaacaaattgtgtacaagataaattaatctcactatgaagatttgaataactagacattatttatgctgccaaactcatttgttgcagttgtttgtaatgtctagtggggcttcatcatcctgaaaagaaggagacagggatttttttaaagagcaagaaagtcacaatattacttctttccttccttttttccttctttcctttcttctttctctttctttctttttaaaatatattgaagacaaccagatatgtatttgctactcaagtgtacagatctcctcaagaaacatcaagggactcctgtgtcacatactgtgtttttattttaacatgggtgagggaggcgacctgatcaggggaggtgggggtacacatcaatttgagttgttcaggctactgaaacattaaaatgtgaattcccaaacttttctttttggctttgtcagggaaaagaaaaatatctttataaagaaatctttggaaattaggagaaggaatttcaggtgggtttaagtcagagctagttccccaacagaaagatcatttgaaaccagtttttatcccttctctttccttccctttccctaaatcaaatcaatattaattgtgccttatttcacttaacatagacttgaattatttttagggaaagcccctataatgaattcagaaatcactacaagcagcattaagactgaagttggaatattctgttgaccataaaaccttgatatcattctgtgtatatagaatgtaaaaggaatattacagtgttaactgccatatatgtaatatacacaaactcaattagcattgtaatggccaaatgcattcccccatgcttttctgttttcaaaaaaattgaaaaacaaatcaactcttatccccaacagctgcctaattttaggagtctgaccctccacatctcactggtgtgggtgcatggggctgtggagtgggtgtcagtatggatgtgtctgaatgtgtgaggccttggaagggactctttctgcagatactgtaaatacaagtaccattttaataaagcatgtacaataaaccaaaataagcttgagttggactttatatacagaactgtaagccagtgcattatgatacagttgtaagattgtgcatttgattcaagataaggaaaaatcttggaaatgaaaagcaggcactggttaaccaagttgtacacattgtaccacattcagcataactttaggaagaaattccactttgtggaacattctccagaaatccaagattattcaggtaagaattggtatattaaatgtacatctttttactttctattttgatgccaactgattatactagacaattagcactccaggtggttattgaacacaaaacagtaaaagaatattgcactgatagatactaaattattattttattaggttgaaaaagcccttactaaaagcccctcatatatcaattactttatttcattatgactacttaggttccgggctggggacaagttcacttaaaaaggcaatgttatttaacaggtcaccagttaagacttctgctttgtagatacatgcagaagccatcaaacaagggggagcttttaactgcaacaataagctaaagtatgtaaaatactacattctattcagtcttggagtgttttgtagaaagttatcttcagccaaatctttgctgaagactggttgtggagtgttggtaaatgctttgtgtttttatgtaaaatattttctaaacaaaaaatgttaaaagtacatgtcctctgtagtaaactgatatctatatatatgaatcattcaagcctaaagtctagtaataaactgtacttgtgaatagagaaaccctaaatattcatgcagaaaaaattatgcggtctgttaagaaaaatgagtaatttgtgttttggacttgaaataaacagtgttctgtagataattcctcaa

SEQ ID NO: 163913 - DNA, 672 bp, Artificial Sequence
  derived and/or modified sequence
atggccgccggcgacggcgacgtgaagctgggcaccctgggcagcggcagcgagagcagcaacgacggcggcagcgagagccccggcgacgccggcgccgccgccgagggcggcggctgggccgccgccgccctggccctgctgaccggcggcggcgagatgctgctgaacgtggccctggtggccctggtgctgctgggcgcctacagactgtgggtgagatggggcagaagaggcctgggcgccggcgccggcgccggcgaggagagccccgccaccagcctgcccagaatgaagaagagagacttcagcctggagcagctgagacagtacgacggcagcagaaaccccagaatcctgctggccgtgaacggcaaggtgttcgacgtgaccaagggcagcaagttctacggccccgccggcccctacggcatcttcgccggcagagacgccagcagaggcctggccaccttctgcctggacaaggacgccctgagagacgagtacgacgacctgagcgacctgaacgccgtgcagatggagagcgtgagagagtgggagatgcagttcaaggagaagtacgactacgtgggcagactgctgaagcccggcgaggagcccagcgagtacaccgacgaggaggacaccaaggaccacaacaagcaggactag

SEQ ID NO: 163914 - DNA, 744 bp, Artificial Sequence
  derived and/or modified sequence
atgggcggcgccggcagaggcgtgggcgagggcagaggcagaggcggcggcggcagaagatggagagccgtgatggccgccggcgacggcgacgtgaagctgggcaccctgggcagcggcagcgagagcagcaacgacggcggcagcgagagccccggcgacgccggcgccgccgccgagggcggcggctgggccgccgccgccctggccctgctgaccggcggcggcgagatgctgctgaacgtggccctggtggccctggtgctgctgggcgcctacagactgtgggtgagatggggcagaagaggcctgggcgccggcgccggcgccggcgaggagagccccgccaccagcctgcccagaatgaagaagagagacttcagcctggagcagctgagacagtacgacggcagcagaaaccccagaatcctgctggccgtgaacggcaaggtgttcgacgtgaccaagggcagcaagttctacggccccgccggcccctacggcatcttcgccggcagagacgccagcagaggcctggccaccttctgcctggacaaggacgccctgagagacgagtacgacgacctgagcgacctgaacgccgtgcagatggagagcgtgagagagtgggagatgcagttcaaggagaagtacgactacgtgggcagactgctgaagcccggcgaggagcccagcgagtacaccgacgaggaggacaccaaggaccacaacaagcaggactag

SEQ ID NO: 163915 - protein, 907 aa, Artificial Sequence
  derived and/or modified sequence
MATPDQKSPNVLLQNLCCRILGRSEADVAQQFQYAVRVIGSNFAPTVERDEFLVAEKIKKELIRQRREADAALFSELHRKLHSQGVLKNKWSILYLLLSLSEDPRRQPSKVSSYATLFAQALPRDAHSTPYYYARPQTLPLSYQDRSAQSAQSSGSVGSSGISSIGLCALSGPAPAPQSLLPGQSNQAPGVGDCLRQQLGSRLAWTLTANQPSSQATTSKGVPSAVSRNMTRSRREGDTGGTMEITEAALVRDILYVFQGIDGKNIKMNNTENCYKVEGKANLSRSLRDTAVRLSELGWLHNKIRRYTDQRSLDRSFGLVGQSFCAALHQELREYYRLLSVLHSQLQLEDDQGVNLGLESSLTLRRLLVWTYDPKIRLKTLAALVDHCQGRKGGELASAVHAYTKTGDPYMRSLVQHILSLVSHPVLSFLYRWIYDGELEDTYHEFFVASDPTVKTDRLWHDKYTLRKSMIPSFMTMDQSRKVLLIGKSINFLHQVCHDQTPTTKMIAVTKSAESPQDAADLFTDLENAFQGKIDAAYFETSKYLLDVLNKKYSLLDHMQAMRRYLLLGQGDFIRHLMDLLKPELVRPATTLYQHNLTGILETAVRATNAQFDSPEILRRLDVRLLEVSPGDTGWDVFSLDYHVDGPIATVFTRECMSHYLRVFNFLWRAKRMEYILTDIRKGHMCNAKLLRNMPEFSGVLHQCHILASEMVHFIHQMQYYITFEVLECSWDELWNKVQQAQDLDHIIAAHEVFLDTIISRCLLDSDSRALLNQLRAVFDQIIELQNAQDAIYRAALEELQRRLQFEEKKKQREIEGQWGVTAAEEEEENKRIGEFKESIPKMCSQLRILTHFYQGIVQQFLVLLTTSSDESLRFLSFRLDFNEHYKAREPRLRVSLGTRGRRSSHT

SEQ ID NO: 163916 - DNA, 2724 bp, Artificial Sequence
  derived and/or modified sequence
atggctacccccgaccaaaagtcacccaatgtcttgctgcaaaacctttgttgtcggatacttggccgcagcgaagccgacgtggcgcagcagttccagtacgctgtgcgggttatcggcagcaatttcgctcccaccgtggagcgcgacgaattcctggttgccgagaagataaaaaaagaactgatacggcaaaggcgggaggctgacgcagccctttttagcgaattgcaccgcaagttacacagtcagggcgtactgaagaacaaatggagtattctatatctcttgctgtccctctctgaggacccccgccggcagcctagcaaggtgtcatcttatgcaactctgtttgcccaggccctcccacgagacgcccactccacaccatattactacgcccgcccgcaaacacttcctctgtcttatcaggaccgctcagcccagtccgcacagtctagtggctccgtcggctcaagcgggatctccagtatcggactgtgcgccctctcagggcctgcgccagccccacagtctctccttcccggtcagtccaaccaggctcctggcgtgggggattgtttgcggcagcagttgggttcacgtctggcctggacgctcactgccaaccagcctagttcacaggccacgacttccaagggagtgccttccgctgtgagccgcaatatgaccaggtccaggagagaaggcgatactggaggcacaatggaaatcacagaagccgcgcttgttagagacattctctacgtgttccaaggcatcgacggcaagaatatcaagatgaacaatactgaaaactgttacaaggtggaaggcaaagcaaatctgtcccgctctctgcgtgacacagccgtgcggctctccgaactgggatggctgcataataaaattcgtcgctacaccgaccaaagatccctcgatcgctcgtttggcctagttggacagtcattctgtgctgccttgcaccaggagctccgggagtattatcgtctgctctccgtcctccattcccaactgcagctggaagatgaccaaggagtgaatctgggcctcgagtcgtcattaactctgcgtcgattgcttgtgtggacctatgatccgaaaattcggctgaaaaccctggccgccctcgtggatcattgtcagggcaggaaaggaggagaactcgcctctgcagttcatgcttacactaagaccggtgatccatacatgcggtctcttgtacagcacatactgtccctggttagtcatcccgtgctatccttcctctatcggtggatctacgatggggagcttgaggacacataccacgagttttttgtggcgtcagatcctaccgttaagacagatagactttggcacgataagtacacactgaggaaaagcatgattccgtcatttatgaccatggatcagtcgagaaaagtcctgcttatcgggaagagcattaatttcttgcaccaagtgtgtcacgatcaaacacccaccactaagatgatcgcagtgactaaatctgccgaaagcccccaggacgccgcagatcttttcaccgatttggaaaatgctttccagggtaaaatagacgcagcatactttgaaacctcgaaatacctgctggatgtgttaaataagaagtattccctacttgaccacatgcaagcaatgcgccggtatcttcttctcggacagggcgactttatccgtcacctgatggatctgctgaagccggagcttgtaaggccagccaccaccctctatcagcacaacttgacaggcatacttgagaccgctgtgagagctaccaacgcacagtttgattcacctgagatcctgcggcggcttgatgttagactccttgaggtgtcccccggggataccggttgggatgtgttctctctggactaccacgtcgacggaccgatagcaaccgtttttacgagggagtgtatgtctcactacttacgagtgtttaatttcctttggagggcaaagcggatggaatatattctgacggatatccgcaaaggccacatgtgtaatgctaagctcctccgtaatatgccggagtttagcggcgtcttacaccagtgtcacatcttggccagtgagatggtccactttattcaccaaatgcagtattatataacatttgaggtgctcgaatgcagctgggatgagctctggaataaggtgcagcaggcccaagatctggatcatattatcgccgctcacgaggtgttcctggacacaataatctcccggtgcttgctcgacagcgattcccgagcactgctgaaccagctcagggctgtgtttgaccagatcatcgagctgcagaacgcgcaagatgcgatttatcgtgccgccctggaagaacttcaacggcgccttcagttcgaagagaagaagaaacagagagagattgaagggcagtggggtgttaccgcagctgaagaagaggaggaaaacaaacgtatcggcgaatttaaagagagtattccaaaaatgtgttcccagctgaggatcctcacgcacttttaccagggcatagtgcagcaattcttggttctgctcaccacctccagcgatgagtcgctccgttttctatcctttcgactggattttaatgaacactacaaagctcgggagcctaggctgagggtctcccttgggaccagaggcagaaggtcctctcacacatag

SEQ ID NO: 163917 - DNA, 2724 bp, Artificial Sequence
  derived and/or modified sequence
atggccaccccagaccagaagagccccaacgtgctgctgcagaacctgtgctgccgcatcctgggccgctctgaggctgatgtggcccagcagttccagtatgctgtgcgggtgattggcagcaactttgcccccaccgtggagagagatgagttcctggtggccgagaagatcaagaaggagctgatccggcagaggcgggaggctgatgctgccctcttcagcgagctgcacaggaagctgcacagccagggcgtgctgaagaacaagtggagcatcctgtacctgctgctgagcctgtctgaggacccccggcggcagcccagcaaggtgtcctcctatgccaccctgtttgcccaggccctgcccagagatgcccacagcaccccctactactatgcccggccccagaccctgcccctgagctaccaggacagaagtgcccagagcgcccagagcagcggctctgtgggcagcagcggcatcagcagcatcggcctgtgtgccctgagcggccctgccccagccccccagagcctgctgcccggccagagcaaccaggcccctggggtgggggactgcctgcggcagcagctgggcagccggctggcctggaccctgacagccaaccagcccagcagccaggccaccaccagcaagggcgtgcccagcgctgtgtccaggaacatgaccaggagccggcgggagggggacacaggaggcaccatggagatcacagaggccgccctggtgcgggacatcctgtatgtgttccagggcattgatggcaagaacatcaagatgaacaacacagagaactgctacaaggtggagggcaaggccaacctgagccgcagcctgcgggacacagctgtgcggctgtctgagctgggctggctgcacaacaagatccgccgctacacagaccagaggagcctggacaggagctttggcctggtgggccagagcttctgtgccgccctgcaccaggagctgcgggagtactaccgcctgctgtctgtgctgcacagccagctgcagctggaggatgaccagggcgtgaacctgggcctggagagcagcctgaccctgcggcggctgctggtgtggacctatgaccccaagatccggctgaagaccctggccgccctggtggaccactgccagggcaggaagggcggggagctggccagcgctgtgcacgcctacaccaagacaggagacccctacatgaggagcctggtgcagcacatcctgagcctggtgagccaccctgtgctgtccttcctgtaccgctggatctatgatggagagctggaggacacctaccacgagttctttgtggccagtgaccccaccgtgaagacagaccggctgtggcatgacaagtacaccctgaggaagtccatgatccccagcttcatgaccatggaccagagcaggaaggtgctgctgattggcaagagcatcaacttcctgcaccaggtgtgccacgaccagacccccaccaccaagatgattgctgtgaccaagtctgctgagagcccccaggatgctgctgacctcttcacagacctggagaatgccttccagggcaagattgatgctgcctactttgagaccagcaagtacctgctggatgtgctgaacaagaagtacagcctgctggaccacatgcaggccatgaggcgctacctgctgctgggccagggcgacttcatccgccacctgatggacctgctgaagccagagctggtgcggcctgccaccaccctgtaccagcacaacctgaccggcatcctggagacagctgtgcgggccaccaatgcccagtttgacagccctgagatcctgcggcggctggatgtgcggctgctggaggtgtcccctggggacaccggctgggatgtgttcagcctggactaccacgtggatggccccatcgccaccgtcttcacccgggagtgcatgagccactacctgcgggtcttcaacttcctgtggagggccaagaggatggagtacatcctgacagacatcaggaagggccacatgtgcaatgccaagctgctgaggaacatgcctgagttcagcggcgtgctgcaccagtgccacatcctggccagcgagatggtgcacttcatccaccagatgcagtactacatcacctttgaggtgctggagtgctcctgggatgagctgtggaacaaggtgcagcaggcccaggacctggaccacatcatcgccgcccacgaggtgttcctggacaccatcatcagccgctgcctgctggacagcgacagccgggccctgctgaaccagctgcgggctgtgtttgaccagatcatcgagctgcagaatgcccaggatgccatctacagagctgccctggaggagctgcagaggcggctgcagtttgaggagaagaagaagcagcgggagattgagggccagtggggcgtgacagctgctgaggaggaggaggagaacaagagaattggagagttcaaggagagcatccccaagatgtgcagccagctgcgcatcctgacccacttctaccagggcatcgtgcagcagttcctggtgctgctgaccaccagcagtgatgagagcctgcgcttcctgtccttccggctggacttcaatgagcactacaaggcccgggagccccggctgcgggtgtccctgggcacccggggccgccgcagcagccacacctag

SEQ ID NO: 163918 - DNA, 2724 bp, Artificial Sequence
  derived and/or modified sequence
atggccacccccgaccagaagagccccaacgtgctgctgcagaacttatgttgccggatactggggagatccgaggcagatgtggcacagcaattccagtacgccgtgagggttatcgggtctaattttgcccccacagtggaaagagacgaatttctggtggctgaaaagataaagaaggagctcattaggcagaggcgcgaggcagacgctgccttgtttagcgaactgcaccgaaagcttcactcccaaggcgtgcttaaaaacaagtggtccatactctacctgttgctgtctttaagcgaggacccgaggcgccaaccatccaaggtctccagttacgccacactattcgcccaggctctcccaagagatgcacacagtacaccatattactatgctaggcctcagaccttgcccctttcttaccaggatcgttctgcccagtcagcccagtcctccggttctgtgggtagttctggcatttcgtctattggcctgtgtgccctgtccgggcctgctcccgccccccagagccttctccctggccagagcaaccaagctcctggcgttggggattgcttgcggcagcagctgggatctagactggcatggacacttacagccaatcagccatcaagccaagccactacgagtaagggcgttccctctgccgtgtcccggaacatgacgcggtcaagaagggaaggggacacaggcggaacaatggagattactgaggccgctctggtccgagacatcttgtacgtgtttcagggcattgatggaaagaatattaaaatgaataacaccgagaattgctacaaggtagagggaaaggcaaatctgtcgcgttctctgagagatactgccgtccgtttgagtgagctcggttggctccacaataagatacgccgatataccgaccaaagaagcctggacaggtcattcggcctggtggggcagtccttctgcgctgcacttcatcaggaactccgggaatactaccgactgctatctgttctccatagccagcttcagctggaggatgatcagggggtgaatctgggattggagagctcccttaccctccggcgcttactcgtttggacctatgaccctaaaatcaggctgaaaactctggcagctcttgtcgatcactgtcaggggagaaagggaggggagttagcgagtgccgtgcacgcctataccaaaacaggggatccctatatgcgatcactggttcaacacatactgagtctcgtatcccatcctgtgctgagctttctgtacaggtggatttacgacggagaattggaagacacttaccacgagttcttcgtcgcttccgacccaacagtcaaaaccgacagattatggcatgacaaatatacactcagaaagtccatgatacccagttttatgaccatggatcagtccagaaaagtcctactgattggtaaaagcattaacttcctacatcaggtgtgccacgaccagacaccaactacaaaaatgattgccgtgacgaaatctgccgaaagccctcaagatgccgccgatctctttaccgatctggaaaatgcatttcaaggtaaaattgacgcagcatacttcgagacttccaagtacctgttggatgtgcttaacaagaaatactcactgctcgaccacatgcaagccatgagaagatacctgttgctcggtcagggtgattttatccggcatctgatggaccttctgaaaccagagttggtgaggcctgctacaacactctaccagcacaatctaacaggaatactcgagaccgctgtgcgagctactaacgcgcagttcgactcacctgaaatactccggcggctggacgtcaggttgcttgaggtgagccccggagatacaggctgggatgtgtttagtcttgactatcacgtggatggaccgatagccacagtgtttaccagggaatgcatgagtcactatctccgagtttttaacttcctttggcgtgccaaacgtatggagtacatcttgaccgatatcagaaaaggtcacatgtgcaatgccaagctgttgagaaatatgcccgaattctccggtgtgttacatcaatgtcacattctcgccagcgaaatggtgcatttcatacaccagatgcaatattacatcacctttgaggtgcttgaatgcagttgggacgagctctggaataaggttcaacaggctcaggatctggatcacattattgctgcacatgaggtattcttggatacaatcataagccgctgtctcctggactcggatagccgggccttgttgaatcagctgagagccgtattcgaccaaattatcgagctacagaatgcgcaggatgccatctaccgggccgcattggaagagttgcagcggagactacagtttgaggagaaaaagaagcagagggagatagaggggcagtggggggttaccgctgccgaagaagaagaagaaaataaaaggatcggcgaatttaaagagagtattcccaaaatgtgtagccagctgaggatactcactcacttctatcagggcattgtccagcagtttctggttctgctgacaacatctagcgacgaaagcctccgatttctgtcttttaggttggatttcaatgaacactacaaagcccgtgagcctaggttgcgggtttcgctgggcactcgcggtcgaagaagctctcacacatag

SEQ ID NO: 163919 - DNA, 2724 bp, Artificial Sequence
  derived and/or modified sequence
atggccaccccagatcaaaagtcccctaatgttttgctccagaacttgtgctgccggatactcgggaggagtgaggccgatgtcgcacagcagttccagtatgcagttagggtcattggatctaacttcgcacccaccgtggaacgtgatgagtttctggtggctgaaaaaatcaaaaaagagctcattagacagcgaagggaggcagacgcagctctcttcagtgaactgcatcggaaattgcactcccaaggggtcttgaagaacaaatggtccattctgtacctgcttttaagcctcagcgaagatccaaggcgacaacctagtaaagtatcctcctacgcaacgctgttcgcccaggcactgccccgtgatgcacacagtactccgtactactacgctaggcctcagacactgccactgtcataccaggaccgtagcgcacagagcgcccagtcttcaggatccgtgggttcttccgggatttccagtattggactatgtgccctctccggacccgcaccagcaccccagagtttattgcctgggcagtctaaccaggcccctggagtcggcgactgcctgagacagcagctgggcagtcgccttgcttggacactcacggcgaatcaacctagttcacaggctacaacaagcaaaggcgttccctctgcagtatcacggaacatgacccgttcgcggagggagggggatactggcggaaccatggaaattaccgaggccgcactggtcagggacattctgtatgtatttcagggcatagatggcaagaatatcaagatgaataatactgagaattgctacaaagtcgagggcaaggccaatctttccagatccttgagagatacagcagtgagactgagcgagctggggtggctgcacaataagattcggcgttatactgatcagcgcagtctggatagaagctttgggctggtgggtcagagtttctgcgccgctttacatcaggagcttcgtgagtactatagattactgtccgtcctgcattctcagctgcagctcgaagacgaccagggcgtcaatctgggcctcgaaagttctctgacactgcgaaggctccttgtctggacatacgacccgaagatcagactgaaaactctagcggctctggtggaccactgccagggtaggaaaggtggagaacttgcttcggctgtacacgcttatacaaagactggggacccatacatgcggtcactggtacaacacatcctgtccttggtgagtcacccagtcctgtcctttctctacaggtggatctacgacggagagttggaagacacttatcacgagttcttcgtggcctcggatccgaccgtcaaaacagatcggctatggcacgataagtacacccttaggaaaagtatgatcccctcctttatgacgatggatcagtcacgaaaagtgctactgattggtaagtccataaactttctgcaccaagtgtgccatgatcaaacccctaccacgaaaatgatcgctgtgaccaaaagtgcggaaagtcctcaggacgcagctgatttatttacagacctggagaacgccttccagggcaagatcgacgccgcatacttcgaaacgagcaaatatctccttgacgtgctgaataagaaatacagcttgctggaccacatgcaggctatgcgacgttacctactgctggggcagggtgactttattcgccatcttatggacttactcaagcctgagcttgttcggcctgccacgacactgtaccagcacaatctaaccggcatcctggaaacagccgtgagagctactaatgcccagttcgatagcccagaaatcttgcggcgattggacgtgcgtctgcttgaggtgtcccccggagatacaggctgggatgtcttcagtctggactaccacgtcgacggccctatcgccacggtttttaccagggagtgcatgtctcactacctgagagtcttcaacttcttgtggagagcgaagaggatggagtacattctgacagacatccgaaaggggcatatgtgtaatgccaagctactgcggaatatgcccgagttctcaggcgtgctgcaccagtgccacattctagcctcggaaatggttcattttatccaccaaatgcagtactacattaccttcgaagtgctggaatgctcatgggacgaactttggaacaaagtccagcaggcacaggacctggatcatataatcgccgcacatgaggtcttcctggacaccattatcagcaggtgcctgttggatagtgacagtcgggctctgctgaatcagcttcgcgctgtgttcgaccagatcatcgagcttcagaacgctcaggacgcaatataccgcgcagccttggaagagcttcagaggcgattgcagtttgaggaaaagaaaaagcaacgcgagatcgagggccagtggggggtgactgcggctgaggaggaagaagaaaataagcggattggtgagtttaaggaatcaatccctaaaatgtgcagtcagcttagaatcctgacacacttctaccagggaatagtgcaacagttcttggtgctcttaacaacgtcatctgacgagtctctacgcttcctcagcttccggttggactttaatgagcattacaaagccagagagcccagactgagagtctccctgggaactcgaggacggagaagctcacacacttag

SEQ ID NO: 163920 - DNA, 3893 bp, Artificial Sequence
  derived and/or modified sequence
tgtgggaagcgcccgcgctttcggcgggttccgttaaaatggcgccctggtggccggcggcgcccgcgccttagcctgtcaggagcagggagcttgcggggcgcaggaagggcgcgggccgcggtccctgcgcgtgcggcggcagtggcggctctgcccggaccaccgtgcacggctccgggcgaggatggcgaccccggaccagaagtcgccgaacgttctgctgcagaacctgtgctgcaggatcctgggcaggagcgaagctgatgtagcccagcagttccagtatgctgtgcgggtgattggcagcaacttcgccccaactgttgaaagagatgaatttttagtagctgaaaaaatcaagaaagagcttattcgacaacgaagagaagcagatgctgcattattttcagaactccacagaaaacttcattcacagggagttttgaaaaataaatggtcaatactctacctcttgctgagcctcagtgaggacccacgcaggcagccaagcaaggtttctagctatgctacgttatttgctcaggccttaccaagagatgcccactcaaccccttactactatgccaggcctcagacccttcccctgagctaccaagatcggagtgcccagtcagcccagagctccggcagcgtgggcagcagtggcatcagcagcattggcctgtgtgccctcagtggccccgcgcctgcgccacaatctctcctcccaggacagtctaatcaagctccaggagtaggagattgccttcgacagcagttggggtcacgactcgcatggactttaactgcaaatcagccttcttcacaagccactacctcaaaaggtgtccccagtgctgtgtctcgcaacatgacaaggtccaggagagaaggggatacgggtggtactatggaaattacagaagcagctctggtaagggacattttgtacgtctttcagggcatagatggcaaaaacatcaaaatgaacaacactgaaaattgttacaaagtagaaggaaaggcaaatctaagtaggtctttgagagacacagcagtcaggctttctgagttgggatggttgcataataaaatcagaagatacacggaccagaggagcctggaccgctcattcggactcgtcgggcagagcttttgtgctgccttgcaccaggaactcagagaatactatcgattgctctctgttttacattctcagctacaactagaggatgaccagggtgtgaatttgggacttgagagtagtttaacacttcggcgcctcctggtttggacctatgatcccaaaatacgactgaagacccttgcggccctagtggaccactgccaaggaaggaaaggaggtgagctggcctcagctgtccacgcctacacaaaaacaggagacccgtacatgcggtctctggtgcagcacatcctcagcctcgtgtctcatcctgttttgagcttcctgtaccgctggatatatgatggggagcttgaggacacttaccacgaattttttgtagcatcagatccaacagttaaaacagatcgactgtggcacgacaagtatactttgaggaaatcgatgattccttcgtttatgacgatggatcagtctaggaaggtccttttgataggaaaatcaataaatttcttgcaccaagtttgtcatgatcagactcccactacaaagatgatagctgtgaccaagtctgcagagtcaccccaggacgctgcagacctattcacagacttggaaaatgcatttcaggggaagattgatgctgcttattttgagaccagcaaatacctgttggatgttctcaataaaaagtacagcttgctggaccacatgcaggcaatgaggcggtacctgcttcttggtcaaggagactttataaggcacttaatggacttgctaaaaccagaacttgtccgtccagctacgactttgtatcagcataacttgactggaattctagaaaccgctgtcagagccaccaacgcacagtttgacagtcctgagatcctgcgaaggctggacgtgcggctgctggaggtctctccaggtgacactggatgggatgtcttcagcctcgattatcatgttgacggaccaattgcaactgtgtttactcgagaatgtatgagccactacctaagagtatttaacttcctctggagggcgaagcggatggaatacatcctcactgacatacggaagggacacatgtgcaatgcaaagctcctgagaaacatgccagagttctccggggtgctgcaccagtgtcacattttggcctctgagatggtccatttcattcatcagatgcagtattacatcacatttgaggtgcttgaatgttcttgggatgagctttggaacaaagtccagcaggcccaggatttggatcacatcattgctgcacacgaggtgttcttagacaccatcatctcccgctgcctgctggacagtgactccagggcacttttaaatcaacttagagctgtgtttgatcaaattattgaacttcagaatgctcaagatgcaatatacagagctgctctggaagaattgcagagacgattacagtttgaagagaaaaagaaacagcgtgaaattgagggccagtggggagtgacggcagcagaggaagaggaggaaaataagaggattggagaatttaaagaatctataccaaaaatgtgctcacagttgcgaatattgacccatttctaccagggtatcgtgcagcagtttttggtgttactgacgaccagctctgacgagagtcttcggtttcttagcttcaggctggacttcaacgagcattacaaagccagggagcccaggctccgtgtgtctctgggtaccagggggcggcgcagctcccacacgtgaagctcgcggtcctcccagggagctgcgggtgatgttcgttgcactgctagacacgaaattcccattgacgtcctgcaggaactgcatgctgcaggtgtcctgcccttccgcccacgagtgcgccatgtttcagcggagcggcgtgtgggagaagccacgtcgtgtttcacatgtcggagtcgaatgcatttgtaaatccctaagtcaagtaggctggctgcactgttcacatttgtctctaaaagtcttcatcgctaaaagataccataatttgctgaggcttcttaagctttctatgttataatttatatttgtcactttaaaaaatccatttcttttagaaaaaattagggtgataggatattcattagttaagatggtaacgtcattgctatttttttaacatcctctttagaggtaatttttgttaacataaccaaaaattaaattgaaacaaaatgtcccaactaagaaaatatatagagcattttatttttttttagtgttgtaaaatattaacctctgtgagatcctttgtatcttaatgcattacctttacacatatttattcttattttctctcctttcagagtttacatttttatatttaatttactatttcagatttttaaaatagtatagaaaaaagtaggagtgatagagaacaaaaatactcttatacagtgcaacccaaataccgcgaatgcatcagctaaagcagcgtgtaaataggagtgacgagaaagttaatggagtattttattttcaaagttcctgataagcattggaaagaaatcgacatggataatgaagatttcctttttccttgcctattttttcattgtaaatatttatatactactgaccaagatgttggggtgggggggattgttttttgtaaaaatgtcattatcaggtcacataaatctgcctttatgttgcataagtgaaaatttagaaaattaaaagcaattatctttca

SEQ ID NO: 163921 - DNA, 2724 bp, Artificial Sequence
  derived and/or modified sequence
atggccacccccgaccagaagagccccaacgtgctgctgcagaacctgtgctgcagaatcctgggcagaagcgaggccgacgtggcccagcagttccagtacgccgtgagagtgatcggcagcaacttcgcccccaccgtggagagagacgagttcctggtggccgagaagatcaagaaggagctgatcagacagagaagagaggccgacgccgccctgttcagcgagctgcacagaaagctgcacagccagggcgtgctgaagaacaagtggagcatcctgtacctgctgctgagcctgagcgaggaccccagaagacagcccagcaaggtgagcagctacgccaccctgttcgcccaggccctgcccagagacgcccacagcaccccctactactacgccagaccccagaccctgcccctgagctaccaggacagaagcgcccagagcgcccagagcagcggcagcgtgggcagcagcggcatcagcagcatcggcctgtgcgccctgagcggccccgcccccgccccccagagcctgctgcccggccagagcaaccaggcccccggcgtgggcgactgcctgagacagcagctgggcagcagactggcctggaccctgaccgccaaccagcccagcagccaggccaccaccagcaagggcgtgcccagcgccgtgagcagaaacatgaccagaagcagaagagagggcgacaccggcggcaccatggagatcaccgaggccgccctggtgagagacatcctgtacgtgttccagggcatcgacggcaagaacatcaagatgaacaacaccgagaactgctacaaggtggagggcaaggccaacctgagcagaagcctgagagacaccgccgtgagactgagcgagctgggctggctgcacaacaagatcagaagatacaccgaccagagaagcctggacagaagcttcggcctggtgggccagagcttctgcgccgccctgcaccaggagctgagagagtactacagactgctgagcgtgctgcacagccagctgcagctggaggacgaccagggcgtgaacctgggcctggagagcagcctgaccctgagaagactgctggtgtggacctacgaccccaagatcagactgaagaccctggccgccctggtggaccactgccagggcagaaagggcggcgagctggccagcgccgtgcacgcctacaccaagaccggcgacccctacatgagaagcctggtgcagcacatcctgagcctggtgagccaccccgtgctgagcttcctgtacagatggatctacgacggcgagctggaggacacctaccacgagttcttcgtggccagcgaccccaccgtgaagaccgacagactgtggcacgacaagtacaccctgagaaagagcatgatccccagcttcatgaccatggaccagagcagaaaggtgctgctgatcggcaagagcatcaacttcctgcaccaggtgtgccacgaccagacccccaccaccaagatgatcgccgtgaccaagagcgccgagagcccccaggacgccgccgacctgttcaccgacctggagaacgccttccagggcaagatcgacgccgcctacttcgagaccagcaagtacctgctggacgtgctgaacaagaagtacagcctgctggaccacatgcaggccatgagaagatacctgctgctgggccagggcgacttcatcagacacctgatggacctgctgaagcccgagctggtgagacccgccaccaccctgtaccagcacaacctgaccggcatcctggagaccgccgtgagagccaccaacgcccagttcgacagccccgagatcctgagaagactggacgtgagactgctggaggtgagccccggcgacaccggctgggacgtgttcagcctggactaccacgtggacggccccatcgccaccgtgttcaccagagagtgcatgagccactacctgagagtgttcaacttcctgtggagagccaagagaatggagtacatcctgaccgacatcagaaagggccacatgtgcaacgccaagctgctgagaaacatgcccgagttcagcggcgtgctgcaccagtgccacatcctggccagcgagatggtgcacttcatccaccagatgcagtactacatcaccttcgaggtgctggagtgcagctgggacgagctgtggaacaaggtgcagcaggcccaggacctggaccacatcatcgccgcccacgaggtgttcctggacaccatcatcagcagatgcctgctggacagcgacagcagagccctgctgaaccagctgagagccgtgttcgaccagatcatcgagctgcagaacgcccaggacgccatctacagagccgccctggaggagctgcagagaagactgcagttcgaggagaagaagaagcagagagagatcgagggccagtggggcgtgaccgccgccgaggaggaggaggagaacaagagaatcggcgagttcaaggagagcatccccaagatgtgcagccagctgagaatcctgacccacttctaccagggcatcgtgcagcagttcctggtgctgctgaccaccagcagcgacgagagcctgagattcctgagcttcagactggacttcaacgagcactacaaggccagagagcccagactgagagtgagcctgggcaccagaggcagaagaagcagccacacctag

SEQ ID NO: 163922 - protein, 1268 aa, Artificial Sequence
  derived and/or modified sequence
MSAPAGSSHPAASARIPPKFGGAAVSGAAAPAGPGAGPAPHQQNGPAQNQMQVPSGYGLHHQNYIAPSGHYSQGPGKMTSLPLDTQCGDYYSALYTVPTQNVTPNTVNQQPGAQQLYSRGPPAPHIVGSTLGSFQGAASSASHLHTSASQPYSSFVNHYNSPAMYSASSSVASQGFPSTCGHYAMSTVSNAAYPSVSYPSLPAGDTYGQMFTSQNAPTVRPVKDNSFSGQNTAISHPSPLPPLPSQQHHQQQSLSGYSTLTWSSPGLPSTQDNLIRNHTGSLAVANNNPTITVADSLSCPVMQNVQPPKSSPVVSTVLSGSSGSSSTRTPPTANHPVEPVTSVTQPSELLQQKGVQYGEYVNNQASSAPTPLSSTSDDEEEEEEDEEAGVDSSSTTSSASPMPNSYDALEGGSYPDMLSSSASSPAPDPAPEPDPASAPAPASAPAPVVPQPSKMAKPFGYGYPTLQPGYQNATAPLISGVQPSNPVYSGFQQYPQQYPGVNQLSSSIGGLSLQSSPQPESLRPVNLTQERNILPMTPVWAPVPNLNADLKKLNCSPDSFRCTLTNIPQTQALLNKAKLPLGLLLHPFRDLTQLPVITSNTIVRCRSCRTYINPFVSFIDQRRWKCNLCYRVNDVPEEFMYNPLTRSYGEPHKRPEVQNSTVEFIASSDYMLRPPQPAVYLFVLDVSHNAVEAGYLTILCQSLLENLDKLPGDSRTRIGFMTFDSTIHFYNLQEGLSQPQMLIVSDIDDVFLPTPDSLLVNLYESKELIKDLLNALPNMFTNTRETHSALGPALQAAFKLMSPTGGRVSVFQTQLPSLGAGLLQSREDPNQRSSTKVVQHLGPATDFYKKLALDCSGQQTAVDLFLLSSQYSDLASLACMSKYSAGCIYYYPSFHYTHNPSQAEKLQKDLKRYLTRKIGFEAVMRIRCTKGLSMHTFHGNFFVRSTDLLSLANINPDAGFAVQLSIEESLTDTSLVCFQTALLYTSSKGERRIRVHTLCLPVVSSLADVYAGVDVQAAICLLANMAVDRSVSSSLSDARDALVNAVVDSLSAYGSTVSNLQHSALMAPSSLKLFPLYVLALLKQKAFRTGTSTRLDDRVYAMCQIKSQPLVHLMKMIHPNLYRIDRLTDEGAVHVNDRIVPQPPLQKLSAEKLTREGAFLMDCGSVFYIWVGKGCDNNFIEDVLGYTNFASIPQKMTHLPELDTLSSERARSFITWLRDSRPLSPILHIVKDESPAKAEFFQHLIEDRTEAAFSYYEFLLHVQQQICK

SEQ ID NO: 163923 - DNA, 3807 bp, Artificial Sequence
  derived and/or modified sequence
atgagcgcccccgccggcagcagccaccccgccgccagcgccagaatcccccccaagttcggcggcgccgccgtgagcggcgccgccgcccccgccggccccggcgccggccccgccccccaccagcagaacggccccgcccagaaccagatgcaggtgcccagcggctacggcctgcaccaccagaactacatcgcccccagcggccactacagccagggccccggcaagatgaccagcctgcccctggacacccagtgcggcgactactacagcgccctgtacaccgtgcccacccagaacgtgacccccaacaccgtgaaccagcagcccggcgcccagcagctgtacagcagaggcccccccgccccccacatcgtgggcagcaccctgggcagcttccagggcgccgccagcagcgccagccacctgcacaccagcgccagccagccctacagcagcttcgtgaaccactacaacagccccgccatgtacagcgccagcagcagcgtggccagccagggcttccccagcacctgcggccactacgccatgagcaccgtgagcaacgccgcctaccccagcgtgagctaccccagcctgcccgccggcgacacctacggccagatgttcaccagccagaacgcccccaccgtgagacccgtgaaggacaacagcttcagcggccagaacaccgccatcagccaccccagccccctgccccccctgcccagccagcagcaccaccagcagcagagcctgagcggctacagcaccctgacctggagcagccccggcctgcccagcacccaggacaacctgatcagaaaccacaccggcagcctggccgtggccaacaacaaccccaccatcaccgtggccgacagcctgagctgccccgtgatgcagaacgtgcagccccccaagagcagccccgtggtgagcaccgtgctgagcggcagcagcggcagcagcagcaccagaaccccccccaccgccaaccaccccgtggagcccgtgaccagcgtgacccagcccagcgagctgctgcagcagaagggcgtgcagtacggcgagtacgtgaacaaccaggccagcagcgcccccacccccctgagcagcaccagcgacgacgaggaggaggaggaggaggacgaggaggccggcgtggacagcagcagcaccaccagcagcgccagccccatgcccaacagctacgacgccctggagggcggcagctaccccgacatgctgagcagcagcgccagcagccccgcccccgaccccgcccccgagcccgaccccgccagcgcccccgcccccgccagcgcccccgcccccgtggtgccccagcccagcaagatggccaagcccttcggctacggctaccccaccctgcagcccggctaccagaacgccaccgcccccctgatcagcggcgtgcagcccagcaaccccgtgtacagcggcttccagcagtacccccagcagtaccccggcgtgaaccagctgagcagcagcatcggcggcctgagcctgcagagcagcccccagcccgagagcctgagacccgtgaacctgacccaggagagaaacatcctgcccatgacccccgtgtgggcccccgtgcccaacctgaacgccgacctgaagaagctgaactgcagccccgacagcttcagatgcaccctgaccaacatcccccagacccaggccctgctgaacaaggccaagctgcccctgggcctgctgctgcaccccttcagagacctgacccagctgcccgtgatcaccagcaacaccatcgtgagatgcagaagctgcagaacctacatcaaccccttcgtgagcttcatcgaccagagaagatggaagtgcaacctgtgctacagagtgaacgacgtgcccgaggagttcatgtacaaccccctgaccagaagctacggcgagccccacaagagacccgaggtgcagaacagcaccgtggagttcatcgccagcagcgactacatgctgagacccccccagcccgccgtgtacctgttcgtgctggacgtgagccacaacgccgtggaggccggctacctgaccatcctgtgccagagcctgctggagaacctggacaagctgcccggcgacagcagaaccagaatcggcttcatgaccttcgacagcaccatccacttctacaacctgcaggagggcctgagccagccccagatgctgatcgtgagcgacatcgacgacgtgttcctgcccacccccgacagcctgctggtgaacctgtacgagagcaaggagctgatcaaggacctgctgaacgccctgcccaacatgttcaccaacaccagagagacccacagcgccctgggccccgccctgcaggccgccttcaagctgatgagccccaccggcggcagagtgagcgtgttccagacccagctgcccagcctgggcgccggcctgctgcagagcagagaggaccccaaccagagaagcagcaccaaggtggtgcagcacctgggccccgccaccgacttctacaagaagctggccctggactgcagcggccagcagaccgccgtggacctgttcctgctgagcagccagtacagcgacctggccagcctggcctgcatgagcaagtacagcgccggctgcatctactactaccccagcttccactacacccacaaccccagccaggccgagaagctgcagaaggacctgaagagatacctgaccagaaagatcggcttcgaggccgtgatgagaatcagatgcaccaagggcctgagcatgcacaccttccacggcaacttcttcgtgagaagcaccgacctgctgagcctggccaacatcaaccccgacgccggcttcgccgtgcagctgagcatcgaggagagcctgaccgacaccagcctggtgtgcttccagaccgccctgctgtacaccagcagcaagggcgagagaagaatcagagtgcacaccctgtgcctgcccgtggtgagcagcctggccgacgtgtacgccggcgtggacgtgcaggccgccatctgcctgctggccaacatggccgtggacagaagcgtgagcagcagcctgagcgacgccagagacgccctggtgaacgccgtggtggacagcctgagcgcctacggcagcaccgtgagcaacctgcagcacagcgccctgatggcccccagcagcctgaagctgttccccctgtacgtgctggccctgctgaagcagaaggccttcagaaccggcaccagcaccagactggacgacagagtgtacgccatgtgccagatcaagagccagcccctggtgcacctgatgaagatgatccaccccaacctgtacagaatcgacagactgaccgacgagggcgccgtgcacgtgaacgacagaatcgtgccccagccccccctgcagaagctgagcgccgagaagctgaccagagagggcgccttcctgatggactgcggcagcgtgttctacatctgggtgggcaagggctgcgacaacaacttcatcgaggacgtgctgggctacaccaacttcgccagcatcccccagaagatgacccacctgcccgagctggacaccctgagcagcgagagagccagaagcttcatcacctggctgagagacagcagacccctgagccccatcctgcacatcgtgaaggacgagagccccgccaaggccgagttcttccagcacctgatcgaggacagaaccgaggccgccttcagctactacgagttcctgctgcacgtgcagcagcagatctgcaagtag

SEQ ID NO: 163924 - DNA, 3807 bp, Artificial Sequence
  derived and/or modified sequence
atgagtgcccctgccggcagtagccacccagcagccagcgcccgcatcccgccgaagttcggaggcgcagcagttagcggagccgcagcacctgccggacccggtgccggaccagcacctcatcagcagaacgggcctgcacaaaaccaaatgcaagtgcccagtggatatggtctgcatcaccagaactacatagcacccagtggccattacagccagggacctgggaagatgacgagcctgcctctggacacacagtgcggggattactactccgctctgtatacggtacctacacagaacgtgacccccaatacagtcaatcaacaaccaggcgcgcagcagctctacagccgcgggcccccggctccccatattgtgggctcaacactggggtctttccagggagcagccagctccgcaagccacctgcatacaagcgcttcacagccatacagctcttttgtaaaccattacaattctcctgctatgtactccgcatcctcctcagtggccagccaggggttcccaagcacctgcggtcattacgcaatgtccaccgtgtctaatgctgcttacccgtcagtgtcatatccgtctttgccagcgggcgatacctacgggcagatgttcacctcccagaacgcccccacagtgagaccagtcaaggacaacagcttttcagggcagaacactgccatatcccacccatcccccctgccccccctcccttcacaacagcaccatcagcagcaatccctgtctggctattccaccctgacgtggagtagcccaggtctcccatcaacacaggacaatctcattcgaaatcacacaggctcgctcgctgtagctaacaacaaccccactattactgttgcagatagcctatcctgtcctgtcatgcagaacgtgcaacccccaaaatcctctcccgttgtctcaacagtcctctcgggctcgagtggcagtagcagtacacggacccctccaacagctaaccaccccgttgagcctgtaacttctgtgacgcagccctctgagctgctgcagcagaagggggttcaatacggtgagtatgtcaacaatcaagcttcgagtgcccccacgcccctttcctccacgtccgatgacgaagaggaagaagaggaggacgaggaagctggagtggattcttcatccactactagctcagcatccccaatgccaaacagctacgacgcactggaagggggtagttacccagatatgctgagtagctccgctagctcacctgcgcccgaccccgcccctgagcctgatcccgccagtgcccccgcaccagcatcagctcccgctcccgtggttccacagccatccaaaatggctaaaccatttggttatgggtatccaacattgcagccaggctaccagaacgcaaccgcccccctgatttccggtgtgcagccttcaaatcccgtctacagcggtttccagcagtatcctcaacagtaccctggagtaaaccagctgagctcctcaattggcggcttgagcctgcagagttctccccagcccgagtctctacgtcccgtcaatcttacgcaagagcgaaatatccttccaatgacccctgtgtgggcaccagtgcccaatcttaatgcggacctgaaaaagctgaactgttcgccagattctttcaggtgtacattaacgaatataccacagacacaggcgctcctgaacaaagcgaagctgcctctgggcctattgctgcaccctttccgcgacttgactcagctgccagtcattacatccaacacgattgtgagatgcagatcgtgtagaacctacatcaacccgttcgttagcttcatcgatcaacgaaggtggaagtgcaacctgtgctaccgggtaaatgatgtgcctgaagagttcatgtacaaccccctaactagatcatatggagagccacataagcggcctgaagtgcagaattcgaccgtggaattcatcgcctccagtgattacatgctgaggcccccacagccagctgtctatttgttcgtgctcgacgtaagccacaacgccgtggaagctggctacctgactatcctgtgccagagtctactggaaaatctcgataagcttcctggcgatagcagaacccgaatcggctttatgactttcgacagcaccatccatttctataacctccaagagggactgtctcaaccgcagatgttaatcgtatctgatatcgatgatgtgtttctgcctactcccgattctttactggttaatctctacgagagtaaggagctcatcaaggacctgctaaacgctttgcctaatatgttcaccaataccagggaaacacactccgccttgggccctgccctccaggcggccttcaaactgatgagccctacgggaggaagggtatctgtgttccaaacgcagctgccttctctaggggcgggcctcttgcagagccgggaggaccccaaccaacgctcttccacgaaggtcgttcaacacctcgggcctgccactgacttttacaagaaactggcacttgactgctctgggcaacagaccgctgtggatctttttctgctcagctcccagtacagtgacctggcgtcgctggcttgtatgagcaagtatagcgccgggtgtatctactactaccctagtttccactatacccacaatccttctcaggctgagaagctacagaaggatctcaaaagatatttgacccgcaagatcggcttcgaggcagtgatgcggattagatgcactaaggggctctcgatgcatactttccacggtaacttcttcgtcaggtccacggatttgttgagtctagccaacatcaatcccgacgctgggttcgctgtgcagttgagcatagaggagagtctcacagacacaagcttggtgtgctttcagactgccctgctgtacaccagctcaaagggtgagcgaaggattcgagttcacacactatgcctccccgtcgtgtctagcttggctgatgtttatgcaggcgtggatgtgcaggccgccatatgccttttggccaatatggccgtcgatagaagtgtctccagtagcctgagcgatgcccgcgacgctctggttaacgctgtggtggatagcctcagtgcatacggcagtaccgtgagtaacctacagcactccgccctcatggcaccttcatctttgaaattgtttcctctttatgtcctggctttactaaagcaaaaagcatttcgaacaggcacatctacacgactggatgaccgcgtttacgcaatgtgtcagataaagtcccaaccgcttgtgcacctcatgaagatgattcatcctaatctttaccgtatcgaccgtctcacggatgaaggggcagttcatgtgaacgaccgtatcgtccctcagcctcccctgcagaagctgtcggccgagaagctaaccagggagggcgccttcttgatggactgtggttcagttttttatatttgggtggggaaagggtgcgacaacaacttcattgaagacgtgctggggtacaccaactttgctagtataccacaaaagatgactcatctcccggagttggatacgctgtccagtgagagggcaagaagctttatcacttggctgcgggatagcagacctttgtctcctatactgcacattgttaaagatgaaagccctgcaaaagcggagtttttccaacacctgattgaagaccgaacggaggctgcgttcagctattacgagtttctcctgcatgtccagcagcaaatatgcaagtag

SEQ ID NO: 163925 - DNA, 3807 bp, Artificial Sequence
  derived and/or modified sequence
atgtctgccccagctggcagcagccaccctgctgccagcgcccgcatcccccccaagtttggaggagctgctgtgtctggagctgctgccccagctggccctggggccggccctgccccccaccagcagaatggacctgcccagaaccagatgcaggtgcccagcggctacggcctgcaccaccagaactacatcgcccccagcggccactacagccagggccctgggaagatgaccagcctgcccctggacacccagtgtggggactactacagcgccctgtacacagtgcccacccagaatgtgacccccaacacagtgaaccagcagcccggggcccagcagctgtacagccggggccccccagccccccacatcgtgggcagcaccctgggcagcttccagggcgccgccagcagcgccagccacctgcacaccagcgccagccagccctacagcagctttgtgaaccactacaacagccctgccatgtacagcgccagcagctctgtggccagccagggcttccccagcacctgtggccactacgccatgagcacagtgtccaatgctgcctaccccagcgtgtcctaccccagcctgcctgctggggacacctacggccagatgttcaccagccagaatgcccccaccgtgcggcctgtgaaggacaacagcttcagcggccagaacacagccatcagccaccccagccccctgccccccctgcccagccagcagcaccaccagcagcagagcctgagcggctacagcaccctgacctggagcagccctggcctgcccagcacccaggacaacctgatccggaaccacacaggcagcctggccgtggccaacaacaaccccaccatcaccgtggccgacagcctgagctgccctgtgatgcagaatgtgcagccccccaagagcagccctgtggtgtccacagtgctgagcggcagcagcggcagcagcagcaccaggaccccacccacagccaaccaccctgtggagcctgtgacctctgtgacccagcccagcgagctgctgcagcagaagggcgtgcagtatggagaatatgtgaacaaccaggccagcagcgcccccacccccctgagcagcaccagtgatgatgaggaggaggaggaggaggatgaggaggccggcgtggacagcagcagcaccaccagcagcgccagccccatgcccaacagctatgatgccctggagggcggcagctacccagacatgctgagcagcagcgccagcagccctgccccagaccctgcccctgagccagaccctgccagcgccccagccccagccagcgccccagcccctgtggtgccccagcccagcaagatggccaagcccttcggctacggctaccccaccctgcagcccggctaccagaatgccacagcccccctcatctctggagtgcagcccagcaaccctgtgtacagcggcttccagcagtacccccagcagtacccaggagtgaaccagctgagcagcagcatcggcggcctgagcctgcagagcagcccccagcctgagagcctgcggcctgtgaacctgacccaggagaggaacatcctgcccatgacccctgtgtgggcccctgtgcccaacctgaatgctgacctgaagaagctgaactgcagcccagacagcttccgctgcaccctgaccaacatcccccagacccaggccctgctgaacaaggccaagctgcccctgggcctgctgctgcaccccttccgggacctgacccagctgcctgtgatcaccagcaacaccatcgtgcgctgccgcagctgcaggacctacatcaacccctttgtgtccttcatcgaccagaggcgctggaagtgcaacctgtgctacagagtgaatgatgtgcctgaggagttcatgtacaaccccctgaccaggagctatggagagccccacaagaggcctgaggtgcagaacagcacagtggagttcatcgccagcagtgactacatgctgcggcccccccagcctgctgtgtacctgtttgtgctggatgtgagccacaatgctgtggaggccggctacctgaccatcctgtgccagagcctgctggagaacctggacaagctgcccggggacagcaggacccgcatcggcttcatgacctttgacagcaccatccacttctacaacctgcaggagggcctgagccagccccagatgctgattgtgtctgacattgatgatgtgttcctgcccaccccagacagcctgctggtgaacctgtatgagagcaaggagctgatcaaggacctgctgaatgccctgcccaacatgttcaccaacacccgggagacccacagcgccctgggccctgccctgcaggccgccttcaagctgatgagccccaccggcggccgggtgtctgtgttccagacccagctgcccagcctgggcgccggcctgctgcagagccgggaggaccccaaccagaggagcagcaccaaggtggtgcagcacctgggccctgccacagacttctacaagaagctggccctggactgcagcggccagcagacagctgtggacctcttcctgctgagcagccagtacagcgacctggccagcctggcctgcatgagcaagtacagcgctggctgcatctactactaccccagcttccactacacccacaaccccagccaggccgagaagctgcagaaggacctgaagcgctacctgaccaggaagattggatttgaggccgtgatgaggatccgctgcaccaagggcctgtccatgcacaccttccacggcaacttctttgtgcgcagcacagacctgctgagcctggccaacatcaacccagatgctggctttgctgtgcagctgagcattgaggagagcctgacagacaccagcctggtgtgcttccagacagccctgctgtacaccagcagcaagggggagcggcgcatccgggtgcacaccctgtgcctgcctgtggtgagcagcctggctgatgtgtatgccggcgtggatgtgcaggccgccatctgcctgctggccaacatggctgtggacagatctgtgagcagcagcctgagtgatgccagagatgccctggtgaatgctgtggtggacagcctgagcgcctacggcagcacagtgagcaacctgcagcacagcgccctgatggcccccagcagcctgaagctgttccccctgtatgtgctggccctgctgaagcagaaggccttcagaacaggcaccagcacccggctggatgacagagtgtatgccatgtgccagatcaagagccagcccctggtgcacctgatgaagatgatccaccccaacctgtacagaattgaccggctgacagatgaaggagctgtgcacgtgaatgacagaattgtgccccagccccccctgcagaagctgtctgctgagaagctgacccgggagggcgccttcctgatggactgtggctctgtgttctacatctgggtgggcaagggctgtgacaacaacttcattgaagatgtgctgggctacaccaactttgccagcatcccccagaagatgacccacctgcctgagctggacaccctgagcagcgagcgggcccggagcttcatcacctggctgcgggacagccggcccctgagccccatcctgcacatcgtgaaggatgagagccctgccaaggccgagttcttccagcacctgattgaggacagaacagaagctgccttctcctactatgagttcctgctgcacgtgcagcagcagatctgcaagtag

SEQ ID NO: 163926 - DNA, 3807 bp, Artificial Sequence
  derived and/or modified sequence
atgagcgcccccgccggcagcagccaccccgccgccagcgcccggattccgcccaaattcgggggagctgcagtgtccggagcagctgcccccgccggccctggagcagggcccgcaccccatcaacaaaacggccctgctcagaaccaaatgcaggtaccttcagggtacggactacaccaccagaattatatagccccaagtggtcactattcccagggccctggcaaaatgacgtccctgcctcttgatactcagtgcggcgactactacagtgcgttatacaccgtcccaacacagaatgtgacacccaacactgtgaatcagcagccaggggcacagcaactatactctcgaggacctcccgcgccccacattgttggatccacccttggttcattccagggggctgcctcttccgccagccacctacatacgagtgcatcccagccttattccagtttcgtgaatcactataacagccctgccatgtacagcgcgtcctcctctgtggctagccaaggcttcccctccacatgtggtcattatgcaatgagcacagtgtccaacgctgcttatccttcagttagctatccttcactacccgcaggtgacacgtatgggcagatgttcacgagccaaaatgctcccactgtgcgccctgtaaaggacaacagcttcagtgggcagaacacagctatcagccaccccagccccctgccacctctgccttcgcagcaacatcatcagcagcagtctctgagtggctatagtacgctcacctggtcatctccaggtctcccttctactcaagacaatttaatccgaaaccatactggatctcttgcggtcgcaaataataatcctacaatcaccgtggcggattcgctgtcttgccccgtcatgcagaatgtccaacctcctaaatcctcacctgtggtttccacagtattgagcgggtcctctggctcttcctcaacaagaacgcctccaacagcaaatcaccctgtggagcccgtgacgtcagttacgcagccttccgagctcctccaacaaaaaggagtgcagtatggagagtacgtcaacaatcaggcctcttctgctcctactcccctgtcttctacttctgacgacgaggaagaggaggaggaggacgaagaggcaggcgtggacagttcatcaaccacatcttctgcctccccgatgcctaacagttatgacgcgttggaaggcggctcttaccctgacatgctgtcttccagtgcgagttcacccgccccagaccccgccccagaacccgaccctgcatcagcacccgcacccgcctcagcccctgcacctgtcgtgccccaaccaagtaagatggccaaacccttcggctatggctaccctacccttcagccaggttatcagaacgcaaccgcaccactcatatcaggagttcagccctctaaccctgtgtattcaggcttccaacagtaccctcagcagtatcccggcgtcaatcagctctcttcgtcaataggaggtctatccttgcaatccagcccacagccagagagcttgcgccccgtgaatttaacccaggagcggaatatccttcctatgactcccgtgtgggccccagtgccgaatcttaacgctgacctgaaaaagctgaactgttcccctgattcatttaggtgcaccctaactaacatccctcagacacaggccctcctaaacaaagcaaaactgccacttggattactcctgcacccttttcgggatctaacccagctcccggtgattaccagcaatacaatcgtgaggtgccgttcctgcagaacctatatcaatccctttgtcagcttcatcgatcaaagaaggtggaagtgcaacttatgttacagggtgaatgacgtgcctgaggaattcatgtataacccgctgactcggagctatggcgagcctcacaaacgtcctgaagtccaaaacagcactgttgaattcatagcttcaagtgactacatgttacgacctccccagccggcagtttacctttttgtcctggacgtctcccataacgccgtggaggctgggtatctgactatcttatgccagagtctgttagagaatttggacaagctgccgggagactctcgcacacgtattggtttcatgaccttcgactccactatccatttctacaatctgcaggagggactgtcacagccccagatgctgattgtgtccgacatcgatgacgtgttcctcccaacacctgactcattgcttgtgaatctgtatgaatccaaagaactgattaaggatctcctgaatgcattgcccaacatgttcacaaatacacgtgagacccacagcgctttgggacccgcactgcaagcagcctttaagctcatgtctcccaccggaggcagggtgtccgtttttcagacccagcttccctctctcggtgcaggtttactccagtcccgggaggaccccaaccagagaagcagtaccaaggttgtacagcacctcggtcccgccacagatttctataagaagcttgctctggactgcagtggacagcaaactgccgtcgatctgttcctactctcttcccaatatagtgatctcgcgagtctggcatgtatgagtaagtatagcgccggatgtatatattactatccaagttttcattacactcataatccgtcccaagccgaaaagttgcaaaaagatctgaaacggtacctgacaaggaagatcgggtttgaggccgtgatgcgcataagatgcactaaaggtctatcaatgcacacatttcacggcaacttttttgtgaggagcaccgatctcctcagccttgctaatatcaaccctgacgctgggttcgccgtccagctctccatcgaggaaagcctgactgatacaagcctggtgtgctttcaaacagcactgttgtacacttcctccaagggagaacggaggattcgtgtccacaccctgtgtctgcctgtggtttcgagtctggctgacgtgtacgccggagttgacgtacaggctgccatttgcttgctggctaacatggcagtggatcgctctgtgtccagctctctgtccgatgctagggatgcgctggtaaacgccgtcgtggattcactgtcagcatatggctctacagtgtctaacctgcagcattccgcgctgatggctcctagttcgctaaagctgtttcctctgtatgttttggcacttttgaagcagaaagccttccggactggcacaagtacacgtttggacgaccgcgtgtatgctatgtgtcaaatcaagtcgcagcccctcgtgcatttaatgaaaatgattcacccgaacctctatcgcatcgacaggctcaccgatgaaggtgcggtccacgtcaacgaccgcattgtccctcagccccctctgcagaaattgagtgcagagaaacttacccgtgaaggagccttcttgatggactgcggttcagtattctacatctgggtgggtaaaggctgcgacaacaacttcatagaggacgtactgggatacacaaacttcgcctccattccccaaaagatgacacacttgcccgaactcgatacattgtctagcgaaagggcacgcagctttataacctggcttagggattcaaggcctctgagtcccatccttcacatcgtgaaggacgaaagcccagccaaagcagaatttttccagcaccttatagaggatcgtaccgaggctgctttttcgtactacgagttcctgcttcacgttcagcagcagatctgcaagtag

SEQ ID NO: 163927 - DNA, 3807 bp, Artificial Sequence
  derived and/or modified sequence
atgtctgcgccagcgggaagcagtcaccctgctgcctctgccaggattccacccaaatttgggggtgccgctgtgtccggtgcagctgcaccagcaggccctggggcagggccagccccacatcagcagaacgggccagctcagaaccaaatgcaggtgccatcagggtacggcctgcaccatcagaactacatcgcaccaagtgggcactacagccagggccctggtaaaatgacttctctccctctcgatactcaatgtggagattactattcagcactgtacactgtccctacccagaacgtgactccaaatactgttaatcagcagccgggagcgcagcagttgtattcgcgcggaccgcctgctcctcacatcgttggcagcaccctgggaagtttccaaggcgcagcgtcttcagctagccacctgcacacatcagcgtctcagccttatagcagtttcgtcaaccactataattctcctgccatgtatagcgcatcatcttcggtagcttcacagggatttccttccacttgcggacattacgctatgtctacagtgtccaacgctgcctacccctccgtcagctacccctctctccctgcaggggatacgtacggacaaatgttcacatcgcagaatgctcccaccgtgcggcctgtcaaagacaattccttcagcggccagaacacggctatctcacatccctcccccctgcccccattgccatcacagcagcatcatcagcaacaaagtttatccggttactcaacgctgacttggagcagccccggtctgccaagcacacaagacaatctgattcggaaccatacaggcagtcttgcagttgccaacaataaccctaccataacggttgccgattcgttatcttgcccggtcatgcaaaatgtacagccgcctaaatcgagccctgtagtaagtactgtcttaagtggttcatcaggtagctcctccactaggacaccccctacggctaaccatcctgtggagccagtgacaagcgtgacccaaccgtccgaactgctacagcagaaaggggtccagtacggagagtatgtcaataatcaggcgagcagcgcacctactcccctttctagcacttcagacgatgaggaggaggaggaggaggacgaagaggcaggagtggactcatcgtcgactacttcctctgccagtcccatgcccaatagttacgatgcgctggaaggaggctcctatcctgacatgctcagctcatctgcctcgtccccagctccggatccagctccagagcctgaccctgccagtgctccagccccagcgagcgccccagcacctgtcgtccctcagccatctaaaatggccaagcccttcggttatggataccccacactccagcccggatatcagaatgcaactgccccactcatcagtggcgtccagccttcgaacccggtgtactccgggttccagcaatacccccaacaataccccggagtgaaccagctgagttccagcatcggcggtctgagcctccagtctagcccacagcccgagtcccttcgcccagttaacctcactcaggagcggaatatccttcccatgacaccagtctgggcccctgtgcctaacctaaatgctgacctaaagaagcttaactgcagcccagacagttttaggtgcaccctgaccaacatccctcagacgcaggcgctactcaacaaggctaagctgccactggggttgcttttgcacccatttagagacttgacccaactgcctgtgatcacgtctaataccattgtaagatgtcgttcgtgtcgcacgtacatcaatccctttgtctcatttattgaccagcggcgatggaaatgcaatttatgctatagagtaaacgatgtgcctgaagaattcatgtataatccactgacccgatcctatggcgagccgcacaagcggcctgaagtccaaaacagcaccgtggagttcattgcctcaagcgactacatgttacggcctccacagcccgctgtgtatttgtttgttttggacgtgtctcataacgccgttgaagcagggtacctcactatcctctgtcagtccctgttggaaaatctcgacaagctgcctggggacagtcgcacccgaatcggatttatgactttcgattcaaccatccacttctacaacctccaagagggcctgagtcagccacaaatgctcatcgtgagtgacattgacgatgtatttctacctactcctgactccctccttgtgaatctctacgagtccaaggagctgataaaggacttgctgaatgccctgcccaacatgtttaccaatactcgcgaaacccacagtgccctgggtcccgcactgcaggccgcttttaagttaatgagtccaactggagggcgagtgagtgtttttcagactcagctcccatctctgggggctggcttactacagagtagggaggaccccaaccagcgttcatccacaaaggtggttcaacacctagggccagcaaccgatttctacaaaaagttggccctggactgctctgggcaacagacagccgtggatctgtttctgctgtcctcacagtattctgacttggccagtctggcatgcatgtcaaaatattccgctggctgtatctactactaccccagcttccactatacacacaacccttctcaggccgagaaattacagaaagacctgaaaaggtacttgacaagaaaaatcggtttcgaggccgtgatgagaatcaggtgtaccaagggcctgtccatgcatacattccatggcaacttcttcgttcggtccacagacttactgtccttagctaatatcaatccagatgcagggtttgctgttcaattgtccattgaagaatcgctgaccgacacatccctcgtgtgttttcagacggctcttctatacacatcatccaaaggggaaaggcggatcagagtgcacactttgtgtcttcctgtcgtgagttcgctagcagatgtatatgcgggagtggatgtgcaggccgcaatttgcctgcttgccaatatggctgtggatcgttccgtgagtagcagtctgagcgatgctagagatgcattggttaatgcggtcgtggacagcctgagcgcctatggatccaccgtttcgaatttgcagcacagcgcgctcatggccccttcgtcactgaaacttttccccctgtacgtcttggctctgctgaaacagaaggcatttagaacaggaacctcaactaggctggacgaccgcgtgtatgcaatgtgccaaatcaagagccagcctcttgtgcacctgatgaagatgatccatcccaacttgtacagaatagatagactgacagacgaaggagccgtccacgtgaacgatcggattgtcccccaaccacccctccagaagttaagcgctgagaagctcacaagggagggggcatttctgatggattgtgggagcgtgttctatatctgggtaggaaaaggatgtgataacaattttatcgaggacgtactagggtatacgaacttcgccagcatacctcagaagatgacacacctccctgagctggacaccttaagttccgaacgggctagatcattcattacatggctgagggattcgaggccattatctccgattctccacatcgtgaaggatgagagccccgctaaggctgagttctttcagcaccttatcgaggatagaactgaagcggctttcagctactatgaattcctccttcacgtgcaacagcaaatttgcaagtag

SEQ ID NO: 163928 - DNA, 4643 bp, Artificial Sequence
  derived and/or modified sequence
cccttccctccgcccacctccctgaagcggagccgccgtcgccaccagcgccgtcatgtcggcccccgccgggtcctctcacccggccgccagcgcccggatcccgcccaagttcggcggagcggccgtctcaggagccgcagcgcccgcgggcccgggtgcgggcccggcgccgcaccagcagaacggtccagcccagaatcaaatgcaggttccatctggatatggattgcatcatcaaaactatattgctccctcaggacattactctcaaggacctgggaaaatgacctcattgccattggatacccagtgtggtgattactactctgctctctatacagtaccaacacaaaatgtgactcctaacacagtgaaccagcaaccaggagcacagcagttgtacagcaggggtcctcctgcccctcatattgtgggatccactctaggatctttccaaggtgctgcatcgtcagcatcccatttgcatacgagtgcctcccaaccatactcctcttttgtgaatcactacaatagtccagccatgtactctgccagctcttctgttgcgtctcagggatttccctctacttgtggtcattatgctatgtcaactgtttctaatgccgcgtatcctagtgtttcatatccctctctgcctgctggtgatacatatgggcaaatgtttacctcacagaatgctccgactgttaggccagttaaagataattcattctctggtcaaaatacagctatcagccatccatcgccacttccacctctaccatcacaacagcaccaccagcagcaaagtctttcaggatacagtactctaacgtggtcatctccaggccttccatcgactcaagacaatctcatccgaaaccacacaggatccctggctgtagcgaacaacaacccaaccattactgttgcagattctttatcctgtcctgttatgcaaaatgttcagcctcccaagtccagcccagtggtatccactgttttatcaggatcctcaggatcctcatcaacaagaacacctcccactgcaaatcacccagttgagcctgtgacctcagttacacagccatcagagctattacaacaaaaaggcgtgcagtatggtgaatatgttaataaccaagctagctccgcaccaactcccttgtcatcaacttccgatgatgaggaagaggaggaggaggatgaggaagcaggtgttgacagctcttctaccacaagcagtgcttctccaatgcccaacagttatgatgccctggaaggaggcagttacccagatatgctttcttcatcagcaagcagtcctgctcctgatcccgcccctgaacctgatcctgcttctgctccagctccagcttcagctccagctcctgtcgtccctcagccttcaaaaatggctaagccttttggctatggctatccaacacttcagcctggttatcagaatgctacagcaccacttatttctggagtacagcccagtaacccggtatattctggattccagcagtatcctcaacagtatcctggtgtgaaccagctatcctccagtataggaggattgagtcttcagagttctccacaaccagaaagcctgagacctgtaaaccttactcaggagaggaatattttacctatgactcctgtttgggctcctgtacctaacttgaatgcagacctcaaaaaattaaactgtagcccagattcatttcggtgtactttgacaaatattccacagacacaggctttactgaataaagctaagcttcctttaggattgttgttacatcccttcagagacctaacgcaattaccagtgataacatcaaataccattgtgaggtgccgatcctgtcgaacgtatattaacccctttgtatccttcattgatcaacgtagatggaaatgcaatttgtgctatagagtaaacgatgttcctgaagaatttatgtataacccccttacccgatcttatggagagcctcataaacgaccagaagttcagaattcaactgtggagttcattgcttcttcagattacatgctgcgtcctcctcaacctgcagtttacttgtttgttttagatgtgtctcataatgcagtggaagctggatatttgacaattttgtgccagtcactcctagaaaatctagacaagcttcctggagattcacgaacaagaataggattcatgacctttgatagcactattcatttctacaatttacaagaaggattatcacagcctcaaatgttgattgtgtctgatatagatgatgtttttctacctacaccggatagtttacttgtgaatctatatgaaagtaaagagcttataaaagacttactgaatgcattaccaaacatgttcaccaatacaagagaaacacacagtgcccttggtcctgcacttcaggctgcctttaaattaatgtctccaacaggtggccgtgtgtctgtatttcagacacagttaccttccttgggtgcaggacttctgcaatccagagaagatcctaatcagagatcaagtacaaaggtggtacaacatcttggccctgcaactgatttttataagaaacttgcattagattgctcgggacagcaaactgcagtggatttgttccttttaagttcacagtattctgatcttgcttctctagcttgcatgtccaagtattctgcagggtgcatctattattatccatcattccactatactcacaatccttcacaagcagaaaagttacaaaaagacctaaaacggtatctcacaagaaaaattgggtttgaagctgttatgagaataaggtgtactaaaggtctttcaatgcacacttttcacggtaacttctttgtccgttctactgatttgttatcccttgccaacatcaatcctgatgctggatttgcggtgcagttgtcaattgaagaaagtttaacagatacttccttagtatgttttcaaacagccctattatatacatcaagcaaaggtgagcggagaattagagtacatacactttgtttgccagtggtaagttcactagcagatgtatatgcgggagtggatgtacaagctgccatctgccttctggcaaacatggctgtggatcggtccgtttcatcaagtctgtcagatgcaagagatgccttagtgaatgctgtagtggactcattgtctgcatatggctcaactgtctcaaatttacagcactctgcattgatggcgcccagctccctcaagttgtttcctctctatgttttggcccttctcaaacagaaagcatttagaacgggtacaagcacacggctggatgatcgtgtatatgccatgtgtcagataaagtctcagccacttgttcatctaatgaaaatgattcatcccaacttatacaggatagacagattgacagatgagggtgcagtacatgttaatgacaggattgtaccacagccacctcttcaaaaattgtctgcagagaagctgacaagagaaggtgctttccttatggactgtggctctgttttttacatttgggttgggaaaggctgtgacaataacttcatagaggatgtgcttggatatactaattttgcatcaataccacagaaaatgacacatcttccagagctagatacactttcatcagaaagagccagatccttcataacttggcttagagacagcagaccattaagtccaatccttcacatagtaaaagatgagagtcctgccaaagcagaattttttcagcatttgattgaagaccggacagaggctgcattttcttactatgaatttttgcttcatgttcagcagcagatttgtaagtgaagtagaataaaattgaataagaaaaagatctataacctaggtaaagcataatctgtcagagaagcgcgtgagaaatttgaaatgaaggcatttgttaatacaagatgcaacgcacagcactctgtctgaggctttggtaaaaagtaaaggggaagaaagaacttgacagatctttttcaactcaaattaatggtaacgatgatgctgtttcaccaagtatattttgaattggtttctacacatttccagtagtatggcagtacagtgctctgttcattgcaagctggcaaatttatgtagctatgtggaatgatatgtcataatgtaaaattagataaattcttttttcttataattaatataacatttctggacttgaactctggcaagagatgccaaaaggcattggtaccgtgttatttgtttatatgaattactttttaacaaggaatgtttcttattcattaaatgaattcaacattttctctgtaaaaacaatagagtttcagtacatgaactatagaaaaaaatctatatataatgtacataaatgttacatttgtaaagaaaatgtaaaaatgtaactatagcatatgaattgcttaaactgtgctgcattgttggatgacaactctttttgtcacagttagagaatgaggttgactaatgcatattatgaattgagtccacaaaggaacacaaaactctttgtaattctgttaaatcttttatgtagatttatttatgatcagcctactaattaaaactatttcgcttgaca

SEQ ID NO: 163929 - protein, 299 aa, Artificial Sequence
  derived and/or modified sequence
MEEFDSEDFSTSEEDEDYVPSGGEYSEDDVNELVKEDEVDGEEQTQKTQGKKRKAQSIPARKRRQGGLSLEEEEEEDANSESEGSSSEEEDDAAEQEKGIGSEDARKKKEDELWASFLNDVGPKSKVPPSTQVKKGEETEETSSSKLLVKAEELEKPKETEKVKITKVFDFAGEEVRVTKEVDATSKEAKSFFKQNEKEKPQANVPSALPSLPAGSGLKRSSGMSSLLGKIGAKKQKMSTLEKSKLDWESFKEEEGIGEELAIHNRGKEGYIERKAFLDRVDHRQFEIERDLRLSKMKP

SEQ ID NO: 163930 - DNA, 900 bp, Artificial Sequence
  derived and/or modified sequence
atggaagagttcgattccgaagacttctctacatcggaggaagatgaggattatgtgccttcagggggcgaatacagtgaggatgacgtgaatgagctggtaaaagaggatgaagtagacggggaggagcagacccagaaaacccagggaaagaaacgtaaggctcagtccattccagcaagaaagcgccgtcagggcggactgtccctagaggaggaggaagaagaggatgcaaactcagagtccgagggaagctcgtcagaggaggaagatgacgctgccgaacaggagaaaggaatcggaagcgaagatgcaagaaaaaagaaagaggatgaactctgggcaagcttcttaaacgacgtgggacccaaaagtaaagtgccaccatcaacacaggtgaaaaagggtgaggagacagaggaaacctcatcttctaaactgctggtgaaagccgaggaactggaaaaaccgaaagaaaccgagaaggtgaagataacgaaggtatttgactttgctggcgaagaggtgcgtgttaccaaagaagtggatgcaacaagcaaggaggccaagtcttttttcaaacagaacgagaaggaaaaaccacaggccaacgttccaagtgcgctgccctctctgccggcaggcagtggattgaaacgctccagcggcatgagcagtctactgggcaagattggcgcgaagaaacagaagatgagcacccttgaaaaatcgaagttagattgggaatcatttaaggaagaggaggggattggcgaggagctcgctatccataatagagggaaagaggggtatattgagcgaaaagccttcctggaccgggttgatcaccggcagttcgaaattgagagagacttacgactgtccaaaatgaagccatag

SEQ ID NO: 163931 - DNA, 900 bp, Artificial Sequence
  derived and/or modified sequence
atggaggagtttgacagcgaggacttcagcaccagcgaggaggatgaggactatgtgcccagcggcggggagtacagtgaagatgatgtgaatgagctggtgaaggaggatgaggtggatggagaggagcagacccagaagacccagggcaagaagaggaaggcccagagcatcccagccaggaagaggcggcagggcggcctgagcctggaggaggaggaggaggaggatgccaacagcgagagcgagggcagcagcagcgaggaggaggatgatgctgctgagcaggagaagggcatcggctctgaagatgccaggaagaagaaggaggatgagctgtgggccagcttcctgaatgatgtgggccccaagagcaaggtgccccccagcacccaggtgaagaagggggaggagacagaggagaccagcagcagcaagctgctggtgaaggccgaggagctggagaagcccaaggagacagagaaggtgaagatcaccaaggtgtttgattttgctggggaggaggtgcgggtgaccaaggaggtggatgccaccagcaaggaggccaagagcttcttcaagcagaatgagaaggagaagccccaggccaacgtgcccagcgccctgcccagcctgcctgctggcagcggcctgaagaggagcagcggcatgagcagcctgctgggcaagattggagccaagaagcagaagatgagcaccctggagaagagcaagctggactgggagagcttcaaggaggaggagggcattggagaggagctggccatccacaacagaggcaaggagggctacatcgagaggaaggccttcctggacagagtggaccaccggcagtttgaaattgaaagagacctgcggctgagcaagatgaagccctag

SEQ ID NO: 163932 - DNA, 900 bp, Artificial Sequence
  derived and/or modified sequence
atggaggagttcgacagcgaggacttcagcaccagcgaggaggacgaggactatgtgcccagcggcggtgagtactccgaagacgatgtcaatgaattggtcaaagaggacgaagtggatggcgaggagcagacgcagaaaacccagggaaagaaaagaaaggcgcagagcatccccgcccgtaaaaggcgccaaggcgggctgagtctggaggaagaggaagaagaggatgccaactccgagtcggagggctcatcctccgaagaggaggatgacgcagccgaacaggaaaagggtatcgggtctgaagacgcacgcaaaaagaaagaagacgaactctgggcctcttttcttaacgatgtgggtcccaaatcgaaagtgccacctagtacccaagtgaagaagggtgaggaaacagaggaaactagttcatccaagctgctcgtaaaggcagaagaactggagaagcctaaggaaacagaaaaggtgaagatcaccaaggtgttcgacttcgctggtgaggaggttagagttaccaaagaggttgacgcgacctcaaaagaggcaaagtctttctttaagcagaatgagaaagagaagccacaggctaatgtcccctctgcactgccctctctgcccgctggatccggtctcaagcggtcctcgggcatgtcctccctcttgggcaaaattggcgctaaaaagcagaaaatgtccacactcgaaaaaagcaagctggattgggagagcttcaaggaagaagaagggattggggaagaattagcaatccacaaccggggaaaagagggttacatcgaaaggaaagcctttctcgatcgcgtggaccaccgtcaattcgagatcgaacgcgatctgcgcttgagtaaaatgaaaccatag

SEQ ID NO: 163933 - DNA, 900 bp, Artificial Sequence
  derived and/or modified sequence
atggaggagttcgactcagaagatttttcaacctcggaagaggacgaggattacgtgccgagtggcggagagtattcagaagacgacgtgaacgaactggtcaaggaggatgaagtcgacggggaagagcagacccagaaaacacaggggaaaaagcgtaaggcacagtctatccccgcacggaagaggaggcaggggggactgagtctggaagaggaagaggaagaggatgccaattctgaatcggaagggagttcttctgaggaggaggacgacgcagccgagcaggagaaggggataggaagtgaggatgccagaaagaagaaagaggatgaactctgggccagctttttaaacgatgtggggccaaaatctaaggtccctccgtctactcaggtgaaaaaaggcgaggagactgaagagacaagttcctctaagcttctggtgaaagctgaggaactagagaaacccaaagagacagagaaggtcaagattacaaaggtcttcgattttgccggagaagaggtccgagtcacaaaggaagtcgatgccacgtctaaagaggcgaaatccttttttaaacagaatgagaaggagaaacctcaggccaatgtgcccagcgcgctgccgagccttcccgcaggaagcggcttgaagcgtagtagcggaatgtcgagcttgctggggaagatcggtgccaaaaagcagaagatgtctacgctagagaaatctaagttggattgggaatccttcaaagaagaagagggcattggagaggaacttgccatccataatagagggaaggagggctacatcgagaggaaggcgttcctcgacagggtggatcacagacagtttgagattgaacgggatctccggctcagcaaaatgaaaccatag

SEQ ID NO: 163934 - DNA, 1275 bp, Artificial Sequence
  derived and/or modified sequence
gtgcaaagcgctgtcgggggccgccctagctgccgtcgccgccgccggggctctatggtctctccctagagctttgccgttggaggcggctgctgcggtcttgtgagtttgaccagcgtcgagcggcagcaacatggaggaattcgactccgaagacttctctacgtcggaggaggacgaggactacgtgccgtcgggtggagagtatagtgaagatgatgtaaatgaattagtgaaggaagatgaagtggatggtgaagagcagacacagaaaacccaagggaaaaaaagaaaggcccagagcattccagccaggaagagaagacaaggtggcctctcattagaagaagaggaagaggaggatgccaattcagaatctgagggaagcagtagtgaggaggaagatgacgctgcagagcaggaaaaaggcattggatcagaggatgccaggaaaaagaaggaggacgaactctgggccagcttcctcaatgatgtgggaccaaaatcaaaagtgcccccaagtacacaagttaagaaaggagaggagactgaagagacaagttcaagtaaattgttggtaaaagcagaagagctagagaaacctaaagaaacagaaaaagttaaaatcaccaaggtgtttgattttgctggtgaagaagtaagggtaactaaggaagtggatgctacatctaaagaggccaaatccttcttcaagcagaatgagaaagaaaaaccacaggctaatgttccttcagctctgccatcactccctgccgggtcagggttaaaaagatcaagtggcatgagcagccttttggggaaaattggtgccaagaagcagaaaatgagcacccttgagaagtccaaactggactgggagagcttcaaggaggaagaggggattggtgaagaactggccatccataatcgagggaaagaggggtacattgaacggaaagccttccttgaccgagtggatcacaggcagtttgaaattgagcgagatctcaggctgagcaaaatgaaaccttgatgttacgggctaaatcaagagcagcttaatcctgtttacaatgtgagctttttgtgcgtctgtgaaatgttttacagtgtttctcatcatctgtttcccagcaaggtcttttttttttctacattgaagttctgtctatgtatcttaatcacaaatggtttcattcactttacttttaaaaatttgtccttaaatgaataaataaaataaaagttggtcctgtgagaggataatgaagatga

SEQ ID NO: 163935 - DNA, 900 bp, Artificial Sequence
  derived and/or modified sequence
atggaggagttcgacagcgaggacttcagcaccagcgaggaggacgaggactacgtgcccagcggcggcgagtacagcgaggacgacgtgaacgagctggtgaaggaggacgaggtggacggcgaggagcagacccagaagacccagggcaagaagagaaaggcccagagcatccccgccagaaagagaagacagggcggcctgagcctggaggaggaggaggaggaggacgccaacagcgagagcgagggcagcagcagcgaggaggaggacgacgccgccgagcaggagaagggcatcggcagcgaggacgccagaaagaagaaggaggacgagctgtgggccagcttcctgaacgacgtgggccccaagagcaaggtgccccccagcacccaggtgaagaagggcgaggagaccgaggagaccagcagcagcaagctgctggtgaaggccgaggagctggagaagcccaaggagaccgagaaggtgaagatcaccaaggtgttcgacttcgccggcgaggaggtgagagtgaccaaggaggtggacgccaccagcaaggaggccaagagcttcttcaagcagaacgagaaggagaagccccaggccaacgtgcccagcgccctgcccagcctgcccgccggcagcggcctgaagagaagcagcggcatgagcagcctgctgggcaagatcggcgccaagaagcagaagatgagcaccctggagaagagcaagctggactgggagagcttcaaggaggaggagggcatcggcgaggagctggccatccacaacagaggcaaggagggctacatcgagagaaaggccttcctggacagagtggaccacagacagttcgagatcgagagagacctgagactgagcaagatgaagccctag

SEQ ID NO: 163936 - protein, 128 aa, Artificial Sequence
  derived and/or modified sequence
MFDVTSRVTYKNVPNWHRDLVRVCENIPIVLCGNKVDIKDRKVKAKSIVFHRKKNLQYYDISAKSNYNFEKPFLWLARKLIGDPNLEFVAMPALAPPEVVMDPALAAQYEHDLEVAQTTALPDEDDDL

SEQ ID NO: 163937 - protein, 233 aa, Artificial Sequence
  derived and/or modified sequence
MAAQGEPQVQFKLVLVGDGGTGKTTFVKRHLTGEFEKKYVATLGVEVHPLVFHTNRGPIKFNVWDTAGQEKFGGLRDGYYIQEMGIHHVAHAGLELMSSAQCAIIMFDVTSRVTYKNVPNWHRDLVRVCENIPIVLCGNKVDIKDRKVKAKSIVFHRKKNLQYYDISAKSNYNFEKPFLWLARKLIGDPNLEFVAMPALAPPEVVMDPALAAQYEHDLEVAQTTALPDEDDDL

SEQ ID NO: 163938 - protein, 216 aa, Artificial Sequence
  derived and/or modified sequence
MAAQGEPQVQFKLVLVGDGGTGKTTFVKRHLTGEFEKKYVATLGVEVHPLVFHTNRGPIKFNVWDTAGQEKFGGLRDGYYIQAQCAIIMFDVTSRVTYKNVPNWHRDLVRVCENIPIVLCGNKVDIKDRKVKAKSIVFHRKKNLQYYDISAKSNYNFEKPFLWLARKLIGDPNLEFVAMPALAPPEVVMDPALAAQYEHDLEVAQTTALPDEDDDL

SEQ ID NO: 163939 - protein, 234 aa, Artificial Sequence
  derived and/or modified sequence
RRRRLRLRRLNCASAIFPASVGRARRRFWKLVLVGDGGTGKTTFVKRHLTGEFEKKYVATLGVEVHPLVFHTNRGPIKFNVWDTAGQEKFGGLRDGYYIQAQCAIIMFDVTSRVTYKNVPNWHRDLVRVCENIPIVLCGNKVDIKDRKVKAKSIVFHRKKNLQYYDISAKSNYNFEKPFLWLARKLIGDPNLEFVAMPALAPPEVVMDPALAAQYEHDLEVAQTTALPDEDDDL

SEQ ID NO: 163940 - DNA, 702 bp, Artificial Sequence
  derived and/or modified sequence
atggccgctcagggggagcctcaggtacagtttaaactagtcttggtaggggacggtggaaccggtaagacaaccttcgtaaagagacaccttactggggagttcgagaaaaagtacgtggctaccttaggcgtcgaagtgcaccctctagtcttccacacaaataggggcccaattaaatttaatgtgtgggatacagctggccaggagaagtttggcgggctacgggacggttactacatccaggagatgggtattcatcatgtagcccatgctgggttggagctgatgagcagtgctcaatgtgcgattattatgttcgacgttactagtcgcgtgacatacaagaatgtcccaaactggcacagggatctcgttcgcgtctgtgaaaacatccccatcgtgctatgtgggaataaggtggatataaaagatagaaaggtgaaagcaaaatccattgtgttccaccgcaagaagaatctccagtattatgatatttcagccaagtcaaactataactttgaaaaacctttcctgtggctggctcgcaaactcatcggggaccccaatctcgagttcgtcgcaatgcccgcccttgctcccccggaggtggtaatggatcccgccctggccgcacaatatgagcatgacctggaagtcgctcagaccaccgctctgcccgacgaggacgatgatctttag

SEQ ID NO: 163941 - DNA, 651 bp, Artificial Sequence
  derived and/or modified sequence
atggccgcccagggggagccgcaggttcaatttaagctcgttctggttggcgatggcggtacgggcaagacgacctttgtaaagcgccacttgacgggagagtttgaaaagaagtatgtggctacacttggggtggaggtgcatcccctcgtgtttcataccaacaggggcccaattaaatttaacgtttgggacacggccggacaggagaagttcggaggccttagggatggatactacattcaggcccaatgcgccatcatcatgttcgatgtgacgagtcgagtaacttataagaacgtgccgaactggcacagagacctcgtgcgtgtatgcgaaaacatccctatcgtgctgtgtggcaataaggtggacatcaaagaccgcaaagtgaaggccaaaagtatagtcttccacagaaagaagaacctgcagtattacgatatttccgccaaaagcaactacaacttcgagaagccatttctttggctggcccgaaagttgataggcgaccccaacttggagtttgtggcgatgccggctttagcacccccggaggtcgtgatggacccagccttagccgcgcagtacgaacacgatctcgaggtggcacagactacagctctccctgacgaggacgacgacctctag

SEQ ID NO: 163942 - DNA, 705 bp, Artificial Sequence
  derived and/or modified sequence
cggagacgtagactgcgcctcaggcgcctgaattgtgcctcagccatcttcccggcctctgtggggcgcgcccggaggagattttggaagctggtacttgtgggcgacggcggaacagggaagaccacgtttgttaagagacacttgacaggggagtttgagaagaaatacgttgccacactgggagtggaagttcaccccctcgtgtttcacaccaatcgcggccctatcaagttcaatgtttgggacacagctggccaggaaaaattcggcgggctgcgcgatggttactatattcaggcacaatgtgcaatcataatgttcgacgtgacctccagggtgacttataagaacgtccccaattggcaccgcgatttggtcagggtgtgtgaaaatatccctatcgttttatgcggcaataaggtagacatcaaagatcgaaaagtgaaagcaaagtctatcgtgttccaccgaaagaaaaaccttcagtactacgacatctcagctaaaagcaattacaattttgagaaaccctttctgtggctggctaggaagttaatcggagacccgaacctagagtttgttgccatgcccgccctcgctccaccagaagtggtcatggatccagctttggcagcacagtacgaacacgatctcgaagtcgcccaaacaactgccctgcccgatgaggatgacgacttgtag

SEQ ID NO: 163943 - DNA, 651 bp, Artificial Sequence
  derived and/or modified sequence
atggcagctcagggagagccgcaagtgcaattcaaactggtactcgttggggacggaggaacaggaaaaaccacattcgttaagaggcacctcaccggcgagttcgagaagaaatacgtggccaccctgggagtggaagtgcatcccctcgtgtttcatactaatagagggcctatcaagtttaatgtgtgggacaccgcagggcaggagaagttcggaggtctgcgcgacggttactacatccaagctcaatgcgccattataatgtttgacgtgacaagccgcgtgacctacaagaatgtgcctaactggcaccgagacctcgtcagggtgtgcgagaacattccgattgtcctctgcggcaacaaggttgatattaaggaccggaaagtgaaggctaaatcaatagtttttcaccgcaagaaaaatctgcagtactatgacatcagcgcgaagtccaattacaactttgaaaaaccgtttctatggctggcccgaaaacttattggcgaccccaacttggaatttgtcgccatgccagcattggcacccccggaagtggtcatggatcccgcactcgccgcccagtacgagcacgatctcgaagtggcccagactacggctcttcccgacgaagacgacgatctgtag

SEQ ID NO: 163944 - DNA, 702 bp, Artificial Sequence
  derived and/or modified sequence
atggccgcccagggcgagccccaggtgcagttcaagctggtgctggtgggagatggcggcaccgggaagaccacctttgtgaagaggcacctgaccggggagtttgagaagaagtatgtggccaccctgggcgtggaggtgcaccccctggtgttccacaccaacagaggccccatcaagttcaacgtgtgggacacagctggccaggagaagtttggaggcctgagagatggctactacatccaggagatgggcatccaccacgtggcccacgccggcctggagctgatgagcagcgcccagtgtgccatcatcatgtttgatgtgaccagccgggtgacctacaagaatgtgcccaactggcaccgggacctggtgcgggtgtgtgagaacatccccatcgtgctgtgtggcaacaaggtggacatcaaggacaggaaggtgaaggccaagagcatcgtgttccacaggaagaagaacctgcagtactatgacatcagcgccaagagcaactacaactttgagaagcccttcctgtggctggccaggaagctgattggagaccccaacctggagtttgtggccatgcctgccctggcccctcctgaggtggtgatggaccctgccctggccgcccagtatgaacatgacctggaggtggcccagaccacagccctgcctgatgaagatgatgacctgtag

SEQ ID NO: 163945 - DNA, 651 bp, Artificial Sequence
  derived and/or modified sequence
atggccgcccagggcgagccccaggtgcagttcaagctggtgctggtgggagatggcggcaccgggaagaccacctttgtgaagaggcacctgaccggggagtttgagaagaagtatgtggccaccctgggcgtggaggtgcaccccctggtgttccacaccaacagaggccccatcaagttcaacgtgtgggacacagctggccaggagaagtttggaggcctgagagatggctactacatccaggcccagtgtgccatcatcatgtttgatgtgaccagccgggtgacctacaagaatgtgcccaactggcaccgggacctggtgcgggtgtgtgagaacatccccatcgtgctgtgtggcaacaaggtggacatcaaggacaggaaggtgaaggccaagagcatcgtgttccacaggaagaagaacctgcagtactatgacatcagcgccaagagcaactacaactttgagaagcccttcctgtggctggccaggaagctgattggagaccccaacctggagtttgtggccatgcctgccctggcccctcctgaggtggtgatggaccctgccctggccgcccagtatgaacatgacctggaggtggcccagaccacagccctgcctgatgaagatgatgacctgtag

SEQ ID NO: 163946 - DNA, 705 bp, Artificial Sequence
  derived and/or modified sequence
agaagaagaaggctgcggctgcggcggctgaactgtgccagcgccatcttccctgcctctgtgggccgggcccggcggcgcttctggaagctggtgctggtgggagatggcggcaccgggaagaccacctttgtgaagaggcacctgaccggggagtttgagaagaagtatgtggccaccctgggcgtggaggtgcaccccctggtgttccacaccaacagaggccccatcaagttcaacgtgtgggacacagctggccaggagaagtttggaggcctgagagatggctactacatccaggcccagtgtgccatcatcatgtttgatgtgaccagccgggtgacctacaagaatgtgcccaactggcaccgggacctggtgcgggtgtgtgagaacatccccatcgtgctgtgtggcaacaaggtggacatcaaggacaggaaggtgaaggccaagagcatcgtgttccacaggaagaagaacctgcagtactatgacatcagcgccaagagcaactacaactttgagaagcccttcctgtggctggccaggaagctgattggagaccccaacctggagtttgtggccatgcctgccctggcccctcctgaggtggtgatggaccctgccctggccgcccagtatgaacatgacctggaggtggcccagaccacagccctgcctgatgaagatgatgacctgtag

SEQ ID NO: 163947 - DNA, 702 bp, Artificial Sequence
  derived and/or modified sequence
atggccgcccagggcgagccccaggtgcagttcaagctggtgctggtgggagatgggggcactggcaagaccaccttcgttaagcggcacctgactggcgaatttgagaagaagtatgtcgcaaccctgggcgtggaagtgcaccccctcgtttttcacactaatcggggccccatcaagtttaacgtgtgggataccgccggccaggaaaaatttgggggcctcagagacggatactacatccaggaaatgggcattcatcatgtggcccacgcaggattggagctgatgtctagtgcccagtgtgccatcattatgtttgacgtgacctcccgcgttacctacaaaaacgttcctaattggcaccgggacttagtgcgtgtctgtgagaatatccccatcgtgctgtgcggcaacaaggtcgatatcaaggatagaaaggtgaaagccaaaagcatagttttccataggaagaaaaacttgcagtattacgacatttctgcaaagtccaactacaacttcgagaagccttttctgtggcttgctcggaaactgattggggatccgaaccttgaatttgtggcaatgcctgccctagccccacctgaggtggtgatggaccccgccctggcggcccagtacgagcatgatctggaggtcgcacaaactaccgcccttcccgatgaggacgacgacctctag

SEQ ID NO: 163948 - DNA, 651 bp, Artificial Sequence
  derived and/or modified sequence
atggccgcccagggcgagccccaggtgcagttcaagctggtgctggtgggtgatggcggaaccggaaaaaccacttttgttaaaaggcacctcacaggggagttcgagaagaaatatgtggccacacttggggtggaagtgcatcctctggtattccatactaaccggggccccatcaaattcaacgtgtgggacacggccggccaggagaaattcggggggttacgagacggatactatattcaggcccagtgcgcaattattatgttcgatgttacctcccgcgtgacctacaaaaacgtgccgaattggcacagggaccttgtgcgggtgtgtgagaacattccaattgtcctgtgtgggaataaggtggatatcaaggatagaaaggttaaagccaaatcaatagttttccaccgcaagaaaaaccttcagtactacgacattagtgcaaagagcaattacaacttcgagaagccatttctctggctcgcgcgtaaattgatcggcgatcccaacctggaattcgtcgccatgcctgctctggctccacctgaggtagtgatggatcctgccctcgctgctcagtacgaacacgacctcgaagtcgcccagacaacagcccttccagatgaggacgacgacttgtag

SEQ ID NO: 163949 - DNA, 705 bp, Artificial Sequence
  derived and/or modified sequence
cggcggcggcggctgcggctgcggcggctgaactgcgccagcgccattttccccgcctcggtgggaagagctagacgccgattttggaaactggttcttgtgggtgatgggggaaccggaaagacaacctttgtgaagcgccacttgaccggggagtttgagaaaaaatacgtagccaccctcggagtagaggtgcaccccttggtgttccacacgaatcgggggccgatcaaatttaatgtctgggacactgccggacaggaaaagttcgggggactgcgggacggttactatatccaggcccagtgcgccattataatgttcgacgtcaccagccgcgtcacttacaaaaatgtgcccaattggcatcgagatctggtaagggtgtgcgagaacattcccatagtgctctgcggcaacaaagtcgacatcaaagaccgcaaagtgaaagcaaagagcatcgtcttccacaggaaaaaaaatttgcagtactatgacatcagtgctaaaagtaattacaatttcgaaaagccgttcttgtggctcgctcgcaagttgataggagaccccaacctggaatttgtggccatgcccgcacttgccccccctgaagttgtaatggaccctgctctggccgctcagtacgagcacgacctcgaggtggcacagactactgcgctcccagatgaagatgacgacctgtag

SEQ ID NO: 163950 - DNA, 651 bp, Artificial Sequence
  derived and/or modified sequence
atggccgcccagggcgagccccaggtgcagttcaagctggtgctggtgggcgatggtgggacgggcaagaccaccttcgtgaagaggcacctcacaggcgagttcgaaaagaagtatgtcgccactctaggagtcgaggtacaccccctggttttccacaccaacagaggccccatcaagttcaatgtctgggataccgctggacaggagaagtttggcggtctgcgggacgggtactatattcaggcacagtgcgccatcatcatgtttgacgtcacctctagggtgacatataagaacgtgcccaattggcatcgcgatttagttcgggtatgtgagaatattccaattgttttgtgtgggaataaagtagatatcaaggataggaaggttaaggccaaatcaatcgttttccaccgcaagaagaacctgcagtactacgatattagcgcaaagtcaaattataactttgagaagcctttcctgtggctggctcggaagctgattggagatcccaacctggagttcgtggccatgccggcactagcaccacctgaggtggtgatggaccctgcactggcagcgcagtatgagcacgacctggaggtggcacagaccacagcattgccggatgaagatgacgacctgtag

SEQ ID NO: 163951 - DNA, 702 bp, Artificial Sequence
  derived and/or modified sequence
atggctgcacagggagaaccccaggtgcagttcaagttggttctcgtgggtgacgggggaacaggcaagaccacctttgtgaaacggcaccttactggcgagttcgaaaagaaatatgtcgctacactgggagtcgaggtacaccctcttgtattccacacaaaccggggaccaattaagttcaatgtctgggataccgctgggcaggagaagttcggaggcctgagggatgggtattacattcaggaaatgggcatccatcacgttgctcatgctggacttgaactgatgagctcagcacaatgtgccataattatgttcgacgtaacgtccagggttacgtacaagaatgtcccaaattggcaccgtgatctagtgcgggtgtgtgagaacatccctatcgtcttgtgcggcaacaaagttgacattaaggaccggaaagttaaagccaagtcgattgtctttcaccggaaaaaaaatcttcaatactatgacatctctgcaaaaagtaactacaattttgaaaaacctttcctctggctagccagaaagctcatcggggatcctaacttggaattcgtagctatgccggcactcgcacctccagaagtcgtgatggaccctgcccttgcagcacagtatgaacacgacttggaagtggcccagacgaccgcccttccagatgaggatgacgacttatag

SEQ ID NO: 163952 - DNA, 651 bp, Artificial Sequence
  derived and/or modified sequence
atggccgcacagggggagcctcaagtccaattcaagctggtactggttggtgacggtggcaccggcaagacgacctttgtgaaacggcatctgaccggcgagtttgagaaaaaatatgtagccactctcggtgtcgaggtgcacccactggtttttcatacaaaccggggaccgatcaaattcaatgtgtgggacacagctggccaggaaaagtttggaggcctgagggatggttactacatacaggcacagtgcgccattatcatgttcgatgtaacttcccgagtaacttataaaaacgttccaaactggcacagggaccttgtacgggtatgtgagaacatacccattgtcttgtgtggaaacaaggtggacattaaggaccgcaaagtgaaggctaaaagtatagtgttccacaggaaaaaaaacctgcagtattatgacatatctgccaagagcaattataactttgaaaaaccgtttctgtggctagctaggaaactgattggagatcccaacctcgagttcgtcgctatgccagcactggcccctccagaggtggtcatggatccagcccttgccgctcagtatgaacacgacctggaagtcgctcagactacggccctgcccgatgaggatgatgacttatag

SEQ ID NO: 163953 - DNA, 705 bp, Artificial Sequence
  derived and/or modified sequence
cgaagaaggcgcttaaggttgcgtcgcctcaattgcgcgtccgccatcttccccgctagtgtgggccgtgcacgtaggaggttttggaagctcgtcttggtgggagacggcggaactgggaagacgacctttgttaagcgccacctaaccggcgaatttgagaaaaagtacgtagcaaccctaggggtcgaagtgcaccccctggtattccatactaaccgcggacctattaaattcaacgtgtgggacaccgctggccaggagaaattcggcggtcttcgtgacggatactatatacaggctcagtgcgcaattatcatgttcgacgttacctcacgggtgacgtataaaaatgtgcccaattggcacagagacctggtgcgcgtctgtgagaatatccctatcgtgctgtgtggaaacaaagtggatatcaaggatcggaaagtgaaggcgaaaagtattgtcttccataggaagaaaaatctccagtattacgacatatccgccaagtcaaactataactttgaaaagcctttcctctggctggccagaaaattaattggcgatcccaatctggaattcgtggccatgccagccctcgctcccccagaggtcgtcatggaccccgctttagccgcacagtatgaacatgatctcgaagttgcccagacaactgctttgcctgacgaagatgacgatctgtag

SEQ ID NO: 163954 - DNA, 651 bp, Artificial Sequence
  derived and/or modified sequence
atggcagcccagggggagccccaggtgcagttcaagttggttctggttggagacggtgggaccgggaagaccacctttgtcaagagacaccttacaggtgagttcgaaaaaaagtatgtggctactctgggcgtcgaggtgcacccactggttttccacactaatcggggtcccatcaagttcaacgtttgggacactgctgggcaggagaagttcggcggactccgcgacggatactatatccaggcccaatgcgccatcattatgtttgatgttacatcacgagtgacatacaaaaatgtgcccaattggcatcgcgatctggtacgcgtctgtgagaacattcccatcgtgctgtgtgggaacaaggtggacatcaaagatcggaaggttaaagcaaagtccatcgtgtttcatcggaagaaaaatctgcaatactatgatatctccgctaagagcaattacaactttgaaaaacccttcctctggttagctagaaagcttatcggtgaccctaacctagagtttgttgcaatgcctgccctggctccaccagaggttgttatggatccagctctggcagctcagtatgagcacgacctggaagttgcacagacaaccgctctgcccgatgaggacgacgacctgtag

SEQ ID NO: 163955 - DNA, 993 bp, Artificial Sequence
  derived and/or modified sequence
gcttccgccatctttccagcctcagtcggacgggcgcggagacgcttctggaagcttgtattggttggtgatggtggtactggaaaaacgaccttcgtgaaacgtcatttgactggtgaatttgagaagaagtatgtagccaccttgggtgttgaggttcatcccctagtgttccacaccaacagaggacctattaagttcaatgtatgggacacagccggccaggagaaattcggtggactgagagatggctattatatccaagcccagtgtgccatcataatgtttgatgtaacatcgagagttacttacaagaatgtgcctaactggcatagagatctggtacgagtgtgtgaaaacatccccattgtgttgtgtggcaacaaagtggatattaaggacaggaaagtgaaggcgaaatccattgtcttccaccgaaagaagaatcttcagtactacgacatttctgccaaaagtaactacaactttgaaaagcccttcctctggcttgctaggaagctcattggagaccctaacttggaatttgttgccatgcctgctctcgccccaccagaagttgtcatggacccagctttggcagcacagtatgagcacgacttagaggttgctcagacaactgctctcccggatgaggatgatgacctgtgagaatgaagctggagcccagcgtcagaagtctagttttataggcagctgtcctgtgatgtcagcggtgcagcgtgtgtgccacctcattattatctagctaagcggaacatgtgcttcatctgtgggatgctgaaggagatgagtgggcttcggagtgaatgtggcagtttaaaaaataacttcattgtttggacctgcatatttagctgttttggaacgcagttgattccttgagtttcatatataagactgctgcagtcacatcacaatattcagtggtgaaatcttgtttgttactgtcattcccattccttttcgtttaga

SEQ ID NO: 163956 - DNA, 780 bp, Artificial Sequence
  derived and/or modified sequence
agtcggacgggcgcggagacgcttctggaaggaacgccgcgatggctgcgcagggagagccccaggtccagttcaaacttgtattggttggtgatggtggtactggaaaaacgaccttcgtgaaacgtcatttgactggtgaatttgagaagaagtatgtagccaccttgggtgttgaggttcatcccctagtgttccacaccaacagaggacctattaagttcaatgtatgggacacagccggccaggagaaattcggtggactgagagatggctattatatccaagagatggggattcaccatgttgcccatgctggtctggaactcatgagctcagcccagtgtgccatcataatgtttgatgtaacatcgagagttacttacaagaatgtgcctaactggcatagagatctggtacgagtgtgtgaaaacatccccattgtgttgtgtggcaacaaagtggatattaaggacaggaaagtgaaggcgaaatccattgtcttccaccgaaagaagaatcttcagtactacgacatttctgccaaaagtaactacaactttgaaaagcccttcctctggcttgctaggaagctcattggagaccctaacttggaatttgttgccatgcctgctctcgccccaccagaagttgtcatggacccagctttggcagcacagtatgagcacgacttagaggttgctcagacaactgctctcccggatgaggatgatgacctgtgagaatgaagctggagcccagcgtcagaagtctagtttt

SEQ ID NO: 163957 - DNA, 1530 bp, Artificial Sequence
  derived and/or modified sequence
tgcgcttccgccatctttccagcctcagtcggacgggcgcggagacgcttctggaaggtatcgcgacccggcgggcccggcacggccgggcggggacaggggtggcggcggcgggataggggtcggagccggggccagggccggggcgggtggcggacccaggggcagcgggcggctgagtaggtgggtggtgcgggcccggccgggccggggcaggagacgggcgtggggtcggcgctagcccccgcgaacccccgtttcatcctccgctctcatccccgtcccggtcccagtcccgttcccatccctacacctccggccgccgttccccgggccccgccgccccggatgccggccccgcccgccgccttcccgctcccaggcctggccgccatggcgccgcgggcgggaggcctttgtggggcgggcacgtggggcgctgggggcgcgggagcggggccgccatgggctgcggggccgcgcgagcgctcgcctccgtcctctgcctccgcaggaacgccgcgatggctgcgcagggagagccccaggtccagttcaaacttgtattggttggtgatggtggtactggaaaaacgaccttcgtgaaacgtcatttgactggtgaatttgagaagaagtatgtagccaccttgggtgttgaggttcatcccctagtgttccacaccaacagaggacctattaagttcaatgtatgggacacagccggccaggagaaattcggtggactgagagatggctattatatccaagcccagtgtgccatcataatgtttgatgtaacatcgagagttacttacaagaatgtgcctaactggcatagagatctggtacgagtgtgtgaaaacatccccattgtgttgtgtggcaacaaagtggatattaaggacaggaaagtgaaggcgaaatccattgtcttccaccgaaagaagaatcttcagtactacgacatttctgccaaaagtaactacaactttgaaaagcccttcctctggcttgctaggaagctcattggagaccctaacttggaatttgttgccatgcctgctctcgccccaccagaagttgtcatggacccagctttggcagcacagtatgagcacgacttagaggttgctcagacaactgctctcccggatgaggatgatgacctgtgagaatgaagctggagcccagcgtcagaagtctagttttataggcagctgtcctgtgatgtcagcggtgcagcgtgtgtgccacctcattattatctagctaagcggaacatgtgcttcatctgtgggatgctgaaggagatgagtgggcttcggagtgaatgtggcagtttaaaaaataacttcattgtttggacctgcatatttagctgttttggaacgcagttgattccttgagtttcatatataagactgctgcagtcacatcacaatattcagtggtgaaatcttgtttgttactgtcattcccattccttttcgtttagaatcagaataaagttgtatttcaaatatctaa

SEQ ID NO: 163958 - DNA, 2455 bp, Artificial Sequence
  derived and/or modified sequence
cgccggcgtcggctgcgtctccggcgtttgaattgcgcttccgccatctttccagcctcagtcggacgggcgcggagacgcttctggaagcttgtattggttggtgatggtggtactggaaaaacgaccttcgtgaaacgtcatttgactggtgaatttgagaagaagtatgtagccaccttgggtgttgaggttcatcccctagtgttccacaccaacagaggacctattaagttcaatgtatgggacacagccggccaggagaaattcggtggactgagagatggctattatatccaagcccagtgtgccatcataatgtttgatgtaacatcgagagttacttacaagaatgtgcctaactggcatagagatctggtacgagtgtgtgaaaacatccccattgtgttgtgtggcaacaaagtggatattaaggacaggaaagtgaaggcgaaatccattgtcttccaccgaaagaagaatcttcagtactacgacatttctgccaaaagtaactacaactttgaaaagcccttcctctggcttgctaggaagctcattggagaccctaacttggaatttgttgccatgcctgctctcgccccaccagaagttgtcatggacccagctttggcagcacagtatgagcacgacttagaggttgctcagacaactgctctcccggatgaggatgatgacctgtgagaatgaagctggagcccagcgtcagaagtctagttttataggcagctgtcctgtgatgtcagcggtgcagcgtgtgtgccacctcattattatctagctaagcggaacatgtgcttcatctgtgggatgctgaaggagatgagtgggcttcggagtgaatgtggcagtttaaaaaataacttcattgtttggacctgcatatttagctgttttggaacgcagttgattccttgagtttcatatataagactgctgcagtcacatcacaatattcagtggtgaaatcttgtttgttactgtcattcccattccttttcgtttagaatcagaataaagttgtatttcaaatatctaagcaagtgaactcatcccttgtttataaatagcatttggaaaccactaaagtagggaagttttatgccatgttaatatttgaattgccttgcttttatcacttaatttgaaatctattgggttaatttctccctatgtttatttttgtacatttgagccatgtcacacaaactgatgatgacaggtcagcagtattctatttggttagaagggttacatggtgtaaatattagtgcagttaagctaaagcagtgtttgctccaccttcatattggctaggtagggtcacctagggaagcacttgctcaaaatctgtgacctgtcagaataaaaatgtggtttgtacatatcaaatagatattttaagggtaatattttcttttatggcaaaagtaatcatgttttaatgtagaacctcaaacaggatggaacatcagtggatggcaggaggttgggaattcttgctgttaaaaataattacaaattttgcacttttttgtttgaatgttagatgcttagtgtgaagttgatacgcaaggaaaatggtccatgtttacccacagttttcaggtactcctagactttaaagatgtcttgaacatttaagttcttcagcagttcacactacaccgtttttttgtttttttttcccccccgggagggtttttttgtagggcagcacagcagagcaggacatggatgaaatactaggaatatgcacagtggggcagtgtgggggcttctcagtaatggagaacagttggtgaaacttttttttttttttaactaagcatttaatttatcttgcatattttccacatttaaaaatgaattaggtctattaggataattaggagtttgatcccatcaacactattcttgtagcagttaggaatcttgagctatttttttctcatacgattactatagtccagtttaccaaagttttctttagatgtctgataatcttgagatgattgcttaccttaaaaggtatagaaaggatcacttaaatatatggaaaaatgaaataagggtgaagctgaataaagttctacttactgtattaactggcaacagttgagtttcttaagatctgaattgctgtgtatgttacgctgtattcagaaccagtttctaaccagcctgtgagatgggaagttttttccccataattgggatgaaacctttcattcaggtattttgaattgaaggtgtatgtgttgtttgtaaccttgtggagattgcaagtggtgttgacattctggatcttctatgtaacagttgaaatttggaagtgacgtcacttacctgtctaacgtggtgtgggagagaatttacaagtcctttattgaaagaataattgttgcaaaatatattgcttctactttgcctg

SEQ ID NO: 163959 - DNA, 1475 bp, Artificial Sequence
  derived and/or modified sequence
gaattgcgcttccgccatctttccagcctcagtcggacgggcgcggagacgcttctggaagcttgtattggttggtgatggtggtactggaaaaacgaccttcgtgaaacgtcatttgactggtgaatttgagaagaaccaccttgggtgttgaggttcatcccctagtgttccacaccaacagaggacctattaagttcaatgtatgggacacagccggccaggagaaattcggtggactgagagatggctattatatccaagcccagtgtgccatcataatgtttgatgtaacatcgagagttacttacaagaatgtgcctaactggcatagagatctggtacgagtgtgtgaaaacatccccattgtgttgtgtggcaacaaagtggatattaaggacaggaaagtgaaggcgaaatccattgtcttccaccgaaagaagaatcttcagtactacgacatttctgccaaaagtaactacaactttgaaaagcccttcctctggcttgctaggaagctcattggagaccctaacttggaatttgttgccatgcctgctctcgccccaccagaagttgtcatggacccagctttggcagcacagtatgagcacgacttagaggttgctcagacaactgctctcccggatgaggatgatgacctgtgagaatgaagctggagcccagcgtcagaagtctagttttataggcagctgtcctgtgatgtcagcggtgcagcgtgtgtgccacctcattattatctagctaagcggaacatgtgcttcatctgtgggatgctgaaggagatgagtgggcttcggagtgaatgtggcagtttaaaaaataacttcattgtttggacctgcatatttagctgttttggaacgcagttgattccttgagtttcatatataagactgctgcagtcacatcacaatattcagtggtgaaatcttgtttgttactgtcattcccattccttttcgtttagaatcagaataaagttgtatttcaaatatctaagcaagtgaactcatcccttgtttataaatagcatttggaaaccactaaagtagggaagttttatgccatgttaatatttgaattgccttgcttttatcacttaatttgaaatctattgggttaatttctccctatgtttatttttgtacatttgagccatgtcacacaaactgatgatgacaggtcagcagtattctatttggttagaagggttacatggtgtaaatattagtgcagttaagctaaagcagtgtttgctccaccttcatattggctaggtagggtcacctagggaagcacttgctcaaaatctgtgacctgtcagaataaaaatgtggtttgtacatatcaaatagatattttaagggtaatattttcttttatggcaaaagtaatcatgttttaatgtagaacctcaaacaggatggaacatcagtggatggcaggaggtt

SEQ ID NO: 163960 - DNA, 2661 bp, Artificial Sequence
  derived and/or modified sequence
accgcgcctcccgccccaccctaagcgcagcgaccgcccgagcggccgaccgaaccgcgttgcgtgcgtgcgcgcacgcgcgggccacgtgggcgggcgccgcgccgttgccccgccccttgcaaccccgccccgcgccggccccgcccctgctctcgcgccggcgtcggctgcgtctccggcgtttgaattgcgcttccgccatctttccagcctcagtcggacgggcgcggagacgcttctggaaggaacgccgcgatggctgcgcagggagagccccaggtccagttcaaacttgtattggttggtgatggtggtactggaaaaacgaccttcgtgaaacgtcatttgactggtgaatttgagaagaagtatgtagccaccttgggtgttgaggttcatcccctagtgttccacaccaacagaggacctattaagttcaatgtatgggacacagccggccaggagaaattcggtggactgagagatggctattatatccaagcccagtgtgccatcataatgtttgatgtaacatcgagagttacttacaagaatgtgcctaactggcatagagatctggtacgagtgtgtgaaaacatccccattgtgttgtgtggcaacaaagtggatattaaggacaggaaagtgaaggcgaaatccattgtcttccaccgaaagaagaatcttcagtactacgacatttctgccaaaagtaactacaactttgaaaagcccttcctctggcttgctaggaagctcattggagaccctaacttggaatttgttgccatgcctgctctcgccccaccagaagttgtcatggacccagctttggcagcacagtatgagcacgacttagaggttgctcagacaactgctctcccggatgaggatgatgacctgtgagaatgaagctggagcccagcgtcagaagtctagttttataggcagctgtcctgtgatgtcagcggtgcagcgtgtgtgccacctcattattatctagctaagcggaacatgtgcttcatctgtgggatgctgaaggagatgagtgggcttcggagtgaatgtggcagtttaaaaaataacttcattgtttggacctgcatatttagctgttttggaacgcagttgattccttgagtttcatatataagactgctgcagtcacatcacaatattcagtggtgaaatcttgtttgttactgtcattcccattccttttcgtttagaatcagaataaagttgtatttcaaatatctaagcaagtgaactcatcccttgtttataaatagcatttggaaaccactaaagtagggaagttttatgccatgttaatatttgaattgccttgcttttatcacttaatttgaaatctattgggttaatttctccctatgtttatttttgtacatttgagccatgtcacacaaactgatgatgacaggtcagcagtattctatttggttagaagggttacatggtgtaaatattagtgcagttaagctaaagcagtgtttgctccaccttcatattggctaggtagggtcacctagggaagcacttgctcaaaatctgtgacctgtcagaataaaaatgtggtttgtacatatcaaatagatattttaagggtaatattttcttttatggcaaaagtaatcatgttttaatgtagaacctcaaacaggatggaacatcagtggatggcaggaggttgggaattcttgctgttaaaaataattacaaattttgcacttttttgtttgaatgttagatgcttagtgtgaagttgatacgcaaggaaaatggtccatgtttacccacagttttcaggtactcctagactttaaagatgtcttgaacatttaagttcttcagcagttcacactacaccgtttttttgtttttttttcccccccgggagggtttttttgtagggcagcacagcagagcaggacatggatgaaatactaggaatatgcacagtggggcagtgtgggggcttctcagtaatggagaacagttggtgaaacttttttttttttttaactaagcatttaatttatcttgcatattttccacatttaaaaatgaattaggtctattaggataattaggagtttgatcccatcaacactattcttgtagcagttaggaatcttgagctatttttttctcatacgattactatagtccagtttaccaaagttttctttagatgtctgataatcttgagatgattgcttaccttaaaaggtatagaaaggatcacttaaatatatggaaaaatgaaataagggtgaagctgaataaagttctacttactgtattaactggcaacagttgagtttcttaagatctgaattgctgtgtatgttacgctgtattcagaaccagtttctaaccagcctgtgagatgggaagttttttccccataattgggatgaaacctttcattcaggtattttgaattgaaggtgtatgtgttgtttgtaaccttgtggagattgcaagtggtgttgacattctggatcttctatgtaacagttgaaatttggaagtgacgtcacttacctgtctaacgtggtgtgggagagaatttacaagtcctttattgaaagaataattgttgcaaaatatattgcttctactttgcctgga

SEQ ID NO: 163961 - DNA, 702 bp, Artificial Sequence
  derived and/or modified sequence
atggccgcccagggcgagccccaggtgcagttcaagctggtgctggtgggcgacggcggcaccggcaagaccaccttcgtgaagagacacctgaccggcgagttcgagaagaagtacgtggccaccctgggcgtggaggtgcaccccctggtgttccacaccaacagaggccccatcaagttcaacgtgtgggacaccgccggccaggagaagttcggcggcctgagagacggctactacatccaggagatgggcatccaccacgtggcccacgccggcctggagctgatgagcagcgcccagtgcgccatcatcatgttcgacgtgaccagcagagtgacctacaagaacgtgcccaactggcacagagacctggtgagagtgtgcgagaacatccccatcgtgctgtgcggcaacaaggtggacatcaaggacagaaaggtgaaggccaagagcatcgtgttccacagaaagaagaacctgcagtactacgacatcagcgccaagagcaactacaacttcgagaagcccttcctgtggctggccagaaagctgatcggcgaccccaacctggagttcgtggccatgcccgccctggccccccccgaggtggtgatggaccccgccctggccgcccagtacgagcacgacctggaggtggcccagaccaccgccctgcccgacgaggacgacgacctgtag

SEQ ID NO: 163962 - DNA, 651 bp, Artificial Sequence
  derived and/or modified sequence
atggccgcccagggcgagccccaggtgcagttcaagctggtgctggtgggcgacggcggcaccggcaagaccaccttcgtgaagagacacctgaccggcgagttcgagaagaagtacgtggccaccctgggcgtggaggtgcaccccctggtgttccacaccaacagaggccccatcaagttcaacgtgtgggacaccgccggccaggagaagttcggcggcctgagagacggctactacatccaggcccagtgcgccatcatcatgttcgacgtgaccagcagagtgacctacaagaacgtgcccaactggcacagagacctggtgagagtgtgcgagaacatccccatcgtgctgtgcggcaacaaggtggacatcaaggacagaaaggtgaaggccaagagcatcgtgttccacagaaagaagaacctgcagtactacgacatcagcgccaagagcaactacaacttcgagaagcccttcctgtggctggccagaaagctgatcggcgaccccaacctggagttcgtggccatgcccgccctggccccccccgaggtggtgatggaccccgccctggccgcccagtacgagcacgacctggaggtggcccagaccaccgccctgcccgacgaggacgacgacctgtag

SEQ ID NO: 163963 - DNA, 705 bp, Artificial Sequence
  derived and/or modified sequence
agaagaagaagactgagactgagaagactgaactgcgccagcgccatcttccccgccagcgtgggcagagccagaagaagattctggaagctggtgctggtgggcgacggcggcaccggcaagaccaccttcgtgaagagacacctgaccggcgagttcgagaagaagtacgtggccaccctgggcgtggaggtgcaccccctggtgttccacaccaacagaggccccatcaagttcaacgtgtgggacaccgccggccaggagaagttcggcggcctgagagacggctactacatccaggcccagtgcgccatcatcatgttcgacgtgaccagcagagtgacctacaagaacgtgcccaactggcacagagacctggtgagagtgtgcgagaacatccccatcgtgctgtgcggcaacaaggtggacatcaaggacagaaaggtgaaggccaagagcatcgtgttccacagaaagaagaacctgcagtactacgacatcagcgccaagagcaactacaacttcgagaagcccttcctgtggctggccagaaagctgatcggcgaccccaacctggagttcgtggccatgcccgccctggccccccccgaggtggtgatggaccccgccctggccgcccagtacgagcacgacctggaggtggcccagaccaccgccctgcccgacgaggacgacgacctgtag

SEQ ID NO: 163964 - protein, 209 aa, Artificial Sequence
  derived and/or modified sequence
MEGGGGSGNKTTGGLAGFFGAGGAGYSHADLAGVPLTGMNPLSPYLNVDPRYLVQDTDEFILPTGANKTRGRFELAFFTIGGCCMTGAAFGAMNGLRLGLKETQNMAWSKPRNVQILNMVTRQGALWANTLGSLALLYSAFGVIIEKTRGAEDDLNTVAAGTMTGMLYKCTGGLRGIARGGLTGLTLTSLYALYNNWEHMKGSLLQQSL

SEQ ID NO: 163965 - protein, 161 aa, Artificial Sequence
  derived and/or modified sequence
MEGGGGSGNKTTGGLAGFFGAGGAGYSHADLAGVPLTGMNPLSPYLNVDPRYLVQDTDEFILPTGANKTRGRFELAFFTIGGCCMTALLYSAFGVIIEKTRGAEDDLNTVAAGTMTGMLYKCTGGLRGIARGGLTGLTLTSLYALYNNWEHMKGSLLQQSL

SEQ ID NO: 163966 - protein, 172 aa, Artificial Sequence
  derived and/or modified sequence
MEGGGGSGNKTTGGLAGFFGAGGAGYSHADLAGVPLTGMNPLSPYLNVDPRYLVQDTDEFILPTGANKTRGRFELAFFTIGGCCMTGALWANTLGSLALLYSAFGVIIEKTRGAEDDLNTVAAGTMTGMLYKCTGGLRGIARGGLTGLTLTSLYALYNNWEHMKGSLLQQSL

SEQ ID NO: 163967 - protein, 126 aa, Artificial Sequence
  derived and/or modified sequence
MTGAAFGAMNGLRLGLKETQNMAWSKPRNVQILNMVTRQGALWANTLGSLALLYSAFGVIIEKTRGAEDDLNTVAAGTMTGMLYKCTASASQSARIADGLIFTEFCSVARLQGSGTILAHYNLHLP

SEQ ID NO: 163968 - protein, 107 aa, Artificial Sequence
  derived and/or modified sequence
  misc_feature (1)..(1): Xaa can be any naturally occurring amino acid
XGGSGNKTTGGLAGFFGAGGAGYSHADLAGVPPLLYSAFGVIIEKTRGAEDDLNTVAAGTMTGMLYKCTGGLRGIARGGLTGLTLTSLYALYNNWEHMKGSLLQQSL

SEQ ID NO: 163969 - DNA, 630 bp, Artificial Sequence
  derived and/or modified sequence
atggagggcggcggcggcagcggcaacaagaccaccggcggcctggccggcttcttcggcgccggcggcgccggctacagccacgccgacctggccggcgtgcccctgaccggcatgaaccccctgagcccctacctgaacgtggaccccagatacctggtgcaggacaccgacgagttcatcctgcccaccggcgccaacaagaccagaggcagattcgagctggccttcttcaccatcggcggctgctgcatgaccggcgccgccttcggcgccatgaacggcctgagactgggcctgaaggagacccagaacatggcctggagcaagcccagaaacgtgcagatcctgaacatggtgaccagacagggcgccctgtgggccaacaccctgggcagcctggccctgctgtacagcgccttcggcgtgatcatcgagaagaccagaggcgccgaggacgacctgaacaccgtggccgccggcaccatgaccggcatgctgtacaagtgcaccggcggcctgagaggcatcgccagaggcggcctgaccggcctgaccctgaccagcctgtacgccctgtacaacaactgggagcacatgaagggcagcctgctgcagcagagcctgtag

SEQ ID NO: 163970 - DNA, 486 bp, Artificial Sequence
  derived and/or modified sequence
atggagggcggcggcggcagcggcaacaagaccaccggcggcctggccggcttcttcggcgccggcggcgccggctacagccacgccgacctggccggcgtgcccctgaccggcatgaaccccctgagcccctacctgaacgtggaccccagatacctggtgcaggacaccgacgagttcatcctgcccaccggcgccaacaagaccagaggcagattcgagctggccttcttcaccatcggcggctgctgcatgaccgccctgctgtacagcgccttcggcgtgatcatcgagaagaccagaggcgccgaggacgacctgaacaccgtggccgccggcaccatgaccggcatgctgtacaagtgcaccggcggcctgagaggcatcgccagaggcggcctgaccggcctgaccctgaccagcctgtacgccctgtacaacaactgggagcacatgaagggcagcctgctgcagcagagcctgtag

SEQ ID NO: 163971 - DNA, 519 bp, Artificial Sequence
  derived and/or modified sequence
atggagggcggcggcggcagcggcaacaagaccaccggcggcctggccggcttcttcggcgccggcggcgccggctacagccacgccgacctggccggcgtgcccctgaccggcatgaaccccctgagcccctacctgaacgtggaccccagatacctggtgcaggacaccgacgagttcatcctgcccaccggcgccaacaagaccagaggcagattcgagctggccttcttcaccatcggcggctgctgcatgaccggcgccctgtgggccaacaccctgggcagcctggccctgctgtacagcgccttcggcgtgatcatcgagaagaccagaggcgccgaggacgacctgaacaccgtggccgccggcaccatgaccggcatgctgtacaagtgcaccggcggcctgagaggcatcgccagaggcggcctgaccggcctgaccctgaccagcctgtacgccctgtacaacaactgggagcacatgaagggcagcctgctgcagcagagcctgtag

SEQ ID NO: 163972 - DNA, 381 bp, Artificial Sequence
  derived and/or modified sequence
atgaccggcgccgccttcggcgccatgaacggcctgagactgggcctgaaggagacccagaacatggcctggagcaagcccagaaacgtgcagatcctgaacatggtgaccagacagggcgccctgtgggccaacaccctgggcagcctggccctgctgtacagcgccttcggcgtgatcatcgagaagaccagaggcgccgaggacgacctgaacaccgtggccgccggcaccatgaccggcatgctgtacaagtgcaccgccagcgccagccagagcgccagaatcgccgacggcctgatcttcaccgagttctgcagcgtggccagactgcagggcagcggcaccatcctggcccactacaacctgcacctgccctag

SEQ ID NO: 163973 - DNA, 324 bp, Artificial Sequence
  derived and/or modified sequence
tgaggcggcagcggcaacaagaccaccggcggcctggccggcttcttcggcgccggcggcgccggctacagccacgccgacctggccggcgtgccccccctgctgtacagcgccttcggcgtgatcatcgagaagaccagaggcgccgaggacgacctgaacaccgtggccgccggcaccatgaccggcatgctgtacaagtgcaccggcggcctgagaggcatcgccagaggcggcctgaccggcctgaccctgaccagcctgtacgccctgtacaacaactgggagcacatgaagggcagcctgctgcagcagagcctgtag

SEQ ID NO: 163974 - DNA, 630 bp, Artificial Sequence
  derived and/or modified sequence
atggaaggcggtggcggcagcggcaataagactactgggggccttgccgggttctttggtgccggcggagctggctattctcacgcagacttagctggcgtgccactgaccggcatgaatccactttcgccctacttgaatgtagacccgagatatctggtccaggacacagatgaattcatcctgcctacaggcgccaacaaaacccgcggtcgctttgagctggccttttttaccattggcggatgctgcatgaccggagcagcctttggggctatgaacggtctgcggctggggctcaaggagacccagaatatggcctggtcaaagccacggaacgtccagattctcaatatggtcactcggcagggcgcgctctgggccaacactttgggttccttggcgcttctgtactcagcttttggtgtgatcattgagaagacacggggcgccgaagacgatttaaacacggtggcggcgggaacaatgacagggatgctatataaatgcacaggcggattgcggggcatcgcaagaggtggcctgacagggctgaccctcaccagcctgtacgccctctacaacaattgggagcacatgaaaggtagcctgctccagcagagcctatag

SEQ ID NO: 163975 - DNA, 486 bp, Artificial Sequence
  derived and/or modified sequence
atggaaggtggcggcggtagcgggaataagaccaccggcggtctggcgggctttttcggagctggaggagccggatattcacatgccgacctcgctggtgtgcccttgaccgggatgaacccactcagcccttatctgaacgtggatcctaggtacctggtccaggataccgacgagtttatcctcccgacaggcgccaacaagacccgcggtaggttcgagcttgcgtttttcaccatcggaggatgctgcatgactgccctcttgtattctgcttttggcgtgatcattgaaaaaacccgcggggccgaggatgacctgaatacagtcgccgctggaacgatgaccggcatgttgtacaaatgtacaggcggtttaagaggtatcgccagggggggcctgacggggctgactctcacctcactgtatgctctctacaataactgggaacacatgaagggcagcctgctgcagcagagcctgtag

SEQ ID NO: 163976 - DNA, 519 bp, Artificial Sequence
  derived and/or modified sequence
atggaaggcggagggggaagcggcaataaaacaactggtggtctcgccggcttctttggagccggtggtgcgggatattcccacgctgatctcgctggggtgcctcttaccggcatgaaccccttaagtccttatctcaatgtggatcctcggtacctggttcaagatacagatgagttcatcttgccaaccggagccaacaagaccagagggaggtttgaacttgcatttttcacaatcggggggtgttgcatgaccggggccctgtgggctaacaccttgggctcattagcactcctatacagcgcattcggcgtgatcatagaaaagacccgaggcgcagaagacgatctgaatacagttgccgctgggaccatgaccggcatgctgtacaaatgtactgggggattgagaggaatagcgcgaggcggactgactggcctgaccctaacgagcctctatgcgctgtataataattgggagcatatgaagggcagcctcttacagcagtctctctag

SEQ ID NO: 163977 - DNA, 381 bp, Artificial Sequence
  derived and/or modified sequence
atgacgggagccgcattcggcgccatgaacggcttacgcttgggcctgaaagagacacagaacatggcctggagcaaacctagaaatgtgcaaatcctgaatatggtgacgcggcagggagctctctgggcaaatacactcggcagccttgccctcctctattcagcattcggcgtgatcatagaaaaaaccaggggagcagaggacgatctcaataccgtcgccgcgggaacaatgaccggaatgctgtacaaatgtaccgcaagtgccagtcagtccgccaggatagccgacggcctgatttttaccgagttttgtagcgtcgcgaggctgcagggttccgggactattcttgcccattacaatctacatctcccgtag

SEQ ID NO: 163978 - DNA, 324 bp, Artificial Sequence
  derived and/or modified sequence
taaggaggtagtgggaataagacaacaggtggcctggccggatttttcggagctggtggagccggatatagccacgctgatctggcgggcgtgccccctctgctgtactcagctttcggtgtcattatcgagaaaacccggggggcagaggatgatctgaacaccgtagccgctggaactatgacgggcatgttatataagtgtacaggcggattgagagggatcgccagaggcggactcaccggcctaacattgaccagcctgtacgctctgtataacaactgggaacacatgaaaggaagtttactgcagcagtcgctctag

SEQ ID NO: 163979 - DNA, 630 bp, Artificial Sequence
  derived and/or modified sequence
atggagggcggcggcggcagcggcaacaagaccaccggcggcctggccggcttctttggagctggaggagctggctacagccatgctgacctggccggcgtgcccctgaccggcatgaaccccctgagcccctacctgaatgtggacccccgctacctggtgcaggacacagatgagttcatcctgcccaccggggccaacaagacccggggccgctttgagctggccttcttcaccatcggcggctgctgcatgaccggggccgccttcggggccatgaatggcctgcggctgggcctgaaggagacccagaacatggcctggagcaagcccagaaatgtgcagatcctgaacatggtgacccggcagggcgccctgtgggccaacaccctgggcagcctggccctgctgtacagcgcctttggagtcatcatcgagaagaccagaggagcagaagatgacctgaacacagtggccgccggcaccatgacaggcatgctgtacaagtgcacaggaggcctgcggggcatcgcccggggcggcctgaccggcctgaccctgaccagcctgtatgccctgtacaacaactgggagcacatgaagggcagcctgctgcagcagagcctgtag

SEQ ID NO: 163980 - DNA, 486 bp, Artificial Sequence
  derived and/or modified sequence
atggagggcggcggcggcagcggcaacaagaccaccggcggcctggccggcttctttggagctggaggagctggctacagccatgctgacctggccggcgtgcccctgaccggcatgaaccccctgagcccctacctgaatgtggacccccgctacctggtgcaggacacagatgagttcatcctgcccaccggggccaacaagacccggggccgctttgagctggccttcttcaccatcggcggctgctgcatgacagccctgctgtacagcgcctttggagtcatcatcgagaagaccagaggagcagaagatgacctgaacacagtggccgccggcaccatgacaggcatgctgtacaagtgcacaggaggcctgcggggcatcgcccggggcggcctgaccggcctgaccctgaccagcctgtatgccctgtacaacaactgggagcacatgaagggcagcctgctgcagcagagcctgtag

SEQ ID NO: 163981 - DNA, 519 bp, Artificial Sequence
  derived and/or modified sequence
atggagggcggcggcggcagcggcaacaagaccaccggcggcctggccggcttctttggagctggaggagctggctacagccatgctgacctggccggcgtgcccctgaccggcatgaaccccctgagcccctacctgaatgtggacccccgctacctggtgcaggacacagatgagttcatcctgcccaccggggccaacaagacccggggccgctttgagctggccttcttcaccatcggcggctgctgcatgaccggggccctgtgggccaacaccctgggcagcctggccctgctgtacagcgccttcggggtcatcatcgagaagaccagaggagcagaagatgacctgaacacagtggccgccggcaccatgacaggcatgctgtacaagtgcaccggcggcctgcggggcatcgcccggggcggcctgaccggcctgaccctgaccagcctgtatgccctgtacaacaactgggagcacatgaagggcagcctgctgcagcagagcctgtag

SEQ ID NO: 163982 - DNA, 381 bp, Artificial Sequence
  derived and/or modified sequence
atgaccggggccgccttcggggccatgaatggcctgcggctgggcctgaaggagacccagaacatggcctggagcaagcccagaaatgtgcagatcctgaacatggtgacccggcagggcgccctgtgggccaacaccctgggcagcctggccctgctgtacagcgcctttggagtcatcatcgagaagaccagaggagcagaagatgacctgaacacagtggccgccggcaccatgacaggcatgctgtacaagtgcacagccagcgccagccagagcgccagaattgctgatggcctcatcttcacagagttctgcagcgtggcccggctgcagggcagcggcaccatcctggcccactacaacctgcacctgccctag

SEQ ID NO: 163983 - DNA, 324 bp, Artificial Sequence
  derived and/or modified sequence
tgaggaggcagcggcaacaagaccactggaggcctggccggcttcttcggggccggcggggccggctacagccacgccgacctggccggcgtgccccccctgctgtacagcgcctttggagtcatcatcgagaagaccagaggagcagaagatgacctgaacacagtggccgccggcaccatgacaggcatgctgtacaagtgcacaggaggcctgcggggcatcgcccggggcggcctgaccggcctgaccctgaccagcctgtatgccctgtacaacaactgggagcacatgaagggcagcctgctgcagcagagcctgtag

SEQ ID NO: 163984 - DNA, 630 bp, Artificial Sequence
  derived and/or modified sequence
atggagggcggcggcggcagcggcaacaagaccaccggcggcctggccggtttcttcggtgctggcggtgccggctactcccacgctgacctggccggcgtgccgctgacagggatgaaccccctgtcgccatatctgaatgtagacccccggtatctggtacaggatacggacgaattcatcttacctaccggcgccaacaagaccagaggcaggttcgagctcgccttctttactattggaggttgctgcatgacaggagcagcctttggagcgatgaacggacttcgcttgggcttgaaggagactcaaaacatggcttggtccaaaccaaggaatgtgcagattctaaatatggtgaccaggcagggcgccctgtgggctaatacgctgggtagcttagccctcctgtacagcgcctttggcgttattatagaaaaaaccagaggggccgaagacgaccttaacacagtggccgctgggactatgacaggcatgctgtataagtgtacgggcggattaagaggcatagcccggggtggattgacaggccttacactcacttccctatacgcactgtataataattgggagcacatgaagggtagcctgctgcagcagagtctgtag

SEQ ID NO: 163985 - DNA, 486 bp, Artificial Sequence
  derived and/or modified sequence
atggagggcggcggcggcagcggcaacaagaccaccggcggcctggcgggctttttcggtgctggcggtgccggttattctcatgccgacctcgcgggggtgccattaacagggatgaaccctctctcaccctatttaaacgttgatccccgatacctcgtacaagacacagacgagttcatcctgcccactggcgctaataaaacacgggggagattcgaactcgcctttttcactattggcggatgctgcatgactgcgttactgtacagtgcattcggcgtcataatcgagaagacccgaggagcggaggatgacctgaacacggtagctgctgggactatgacgggcatgctatacaagtgtacaggtggtcttcgtgggatagcgcgaggtggtcttacggggttgactctaacaagcttatacgccttatataacaactgggaacatatgaaaggatctctgctgcaacagtctctctag

SEQ ID NO: 163986 - DNA, 519 bp, Artificial Sequence
  derived and/or modified sequence
atggagggcggcggcggcagcggcaacaagaccaccggcggcctggccgggttctttggagcaggtggtgcaggatacagtcatgctgacctggctggcgtgcctctaacagggatgaaccctctctcaccctacctgaatgtagatccccgatacctggtccaggacactgacgaattcatcctgcctaccggcgccaataaaacaagaggtagatttgagctggccttcttcacaatcgggggatgctgcatgacaggagccctgtgggccaacaccctgggaagcctggcccttctgtattccgcattcggcgtcataatcgagaagactcgaggcgctgaggatgacctcaatactgtagccgctggcactatgacgggaatgttatataaatgtaccggcgggcttaggggcattgcacgagggggtttgaccgggctgaccctaacttctttatatgcgctctacaataactgggaacacatgaagggctcgctcctgcagcaaagcctgtag

SEQ ID NO: 163987 - DNA, 381 bp, Artificial Sequence
  derived and/or modified sequence
atgaccggcgccgccttcggcgccatgaacggcctgcggctgggcctaaaagaaacccagaacatggcttggtcgaagccccgcaatgtacagattctgaacatggttaccaggcagggcgctctttgggcaaacacactagggtcactcgcgctgctctactcagcttttggtgtcattatcgagaagacacgtggcgcagaggatgatctaaacaccgtggcagctggcactatgacaggaatgttatacaagtgcaccgcatctgcatcgcaaagcgcccgcattgctgacggactgatttttaccgaattctgctcagtggctcggctgcaaggttcgggaactatcctggcccactataacttacacctgccttag

SEQ ID NO: 163988 - DNA, 324 bp, Artificial Sequence
  derived and/or modified sequence
tgaggcggcagcggcaacaagaccaccggcggcctggccggcttctttggggctggaggcgcaggctattcccacgctgatcttgcgggggtgcccccactgctgtattcagcttttggcgtcattattgagaaaactcggggagcagaagacgaccttaacacagtggcggcaggaaccatgacagggatgttatacaagtgcacgggaggactacgggggatcgccaggggggggctcactggcttaactctgactagcctgtatgctctgtacaacaattgggaacatatgaagggcagtctgctacagcaaagcctctag

SEQ ID NO: 163989 - DNA, 630 bp, Artificial Sequence
  derived and/or modified sequence
atggagggcggaggaggatcaggaaacaaaacgactggaggactggcagggtttttcggagcaggtggcgctggctactcccatgccgacctggcgggagtcccactgaccggaatgaatccgctctccccttacctgaatgtggacccgagatacctagtccaagatacagacgagttcatcctgccaactggagcaaataagacgagaggacgtttcgaactggctttcttcacgattgggggatgttgtatgacaggcgctgcattcggcgctatgaatgggttgaggctgggactgaaggagacacagaacatggcttggtcgaaaccaagaaacgtgcagattctgaatatggtgacccgtcagggggcactgtgggccaacacacttgggtctctggccttgctctactcggcgttcggagtgattatagagaagactagaggcgcagaggatgatctcaacactgttgccgcaggaacaatgaccggcatgctgtacaagtgcacaggcggtttgcgcggaatcgcgagaggaggccttactgggctgactctgacttctctgtacgctctctacaacaactgggagcatatgaagggatcactactgcaacagagcctgtag

SEQ ID NO: 163990 - DNA, 486 bp, Artificial Sequence
  derived and/or modified sequence
atggaaggcggagggggatctgggaacaagactaccggagggctggctggcttctttggcgctggcggagctgggtattcccatgctgacttggcaggcgttccgctgacagggatgaatcctctgtccccttatttaaacgtagatcccaggtacctagtacaagatactgacgagttcattctccccacaggcgcaaacaaaacacgagggagatttgaactggcgttctttaccatcggcggatgctgcatgaccgcgctgttgtacagcgcttttggcgttattatcgaaaaaacaagaggcgctgaggacgaccttaataccgtggcggctggcaccatgaccggcatgctgtataagtgtactgggggactcagaggtatcgccagaggaggtcttacgggattgacactcacatcactatatgccctgtataacaattgggaacacatgaagggctctctcctgcagcagagcctgtag

SEQ ID NO: 163991 - DNA, 519 bp, Artificial Sequence
  derived and/or modified sequence
atggaaggtgggggaggctccggtaataaaactacgggcggtctcgccggatttttcggagctggtggggcagggtatagccatgcagatttagcaggcgtgcctctaactgggatgaatcccctgagcccgtacctgaatgtcgacccgcgttacttagtccaggacactgacgaattcatcttacctacaggggctaataaaactcggggacggtttgaattggccttctttaccataggcggttgctgtatgaccggagccctgtgggccaataccctgggcagcctggccctgctctacagcgcctttggtgtgattatcgagaaaacccgcggtgccgaggacgatcttaatactgttgccgctgggacgatgaccggcatgctttataagtgcacaggaggcttgagaggcatagctaggggtggacttactggactgactttgacctccctgtatgcattatacaacaattgggaacacatgaaaggctcccttctgcagcagagtctctag

SEQ ID NO: 163992 - DNA, 381 bp, Artificial Sequence
  derived and/or modified sequence
atgactggcgctgcattcggcgcaatgaatggcctgaggcttggccttaaggaaacccaaaacatggcttggagcaagcctaggaacgtgcagattctaaatatggtgaccaggcaaggggctctgtgggccaatacattaggtagcctggcactcctttactcagcgttcggagtcatcattgagaaaacgagaggtgcagaggacgatctgaatactgttgcagctgggaccatgacaggcatgctctacaagtgtactgcgtcagcaagccaaagcgcacgaatagctgatgggctgatatttacagagttctgctcagtcgcccgattacaggggtccgggactattcttgcacattataacttacacctgccatag

SEQ ID NO: 163993 - DNA, 324 bp, Artificial Sequence
  derived and/or modified sequence
tagggcggatccgggaacaaaactaccggcggactcgcagggttctttggggctggcggagccggatactctcacgctgacctggcgggagtgcctccccttctgtacagcgccttcggcgtaatcatcgagaaaaccaggggtgctgaagacgatctaaacactgtcgccgctgggaccatgacagggatgctttacaaatgcaccggcggtctgaggggcatcgctagaggaggcttgacgggtctcacactgacttctctctacgccttatataataattgggagcatatgaagggtagcctgttgcagcaaagcctgtag

SEQ ID NO: 163994 - DNA, 1178 bp, Artificial Sequence
  derived and/or modified sequence
gaaggtcagcgtgtgaagtaggcgctggcaacgcggggttacccgctgttattgaggagtaacggcccagcggaccacccaggcttgaggcagcggcgggaaccactcggtttgctgcgataccatggaaggaggcgggggaagcggcaacaaaaccacagggggattggccggctttttcggagccggcggagcaggttactcgcacgcggatttggctggcgtcccgctaactggtatgaaccctctgtctccttatttaaatgtggatccacgatacctcgtgcaggatacagatgagtttattttacctaccggagctaataaaacccggggcagatttgagctggccttctttacgattggaggatgttgcatgacaggggctgcgtttggtgcaatgaatggtcttcggctaggattgaaggaaacccagaacatggcctggtccaaaccaagaaatgtacagattttgaatatggtgactaggcaaggggcactttgggctaatactctaggttctctggctttgctctatagtgcatttggtgtcatcattgagaaaacacgaggtgcagaagatgaccttaacacagtagcagctggaaccatgacaggcatgttgtataaatgtacaggtggtcttcgagggatagcacgaggtggtctgacaggactaacacttaccagcctctatgcactatataataactgggagcacatgaaaggctccttgctccaacagtcactctgaagattttgccaactcatgaatggaggacacttcagtagtcatctagatccttttataagacagtttggagttattctctctcttctacctacaattagtttgaaaaattggagattttgatttgctgtgatgaaaatcctggatggctgaccaagactggcacttgttccagccattagtgagttgaagccaaagccctttggtgactcactgagtaccatggttctgttctcctctggagatcttgcacgtatctgttttcctcccccatgaactagaaaaccacttactcccagaattcaggtcgtgcttgttagtactatatcaccaagtccattcatttaatgatccaaaactgtaatgttgcactgtattccaaataaagggtaaaaacagaaccaaagttataactccaacacacaaa

SEQ ID NO: 163995 - DNA, 1022 bp, Artificial Sequence
  derived and/or modified sequence
aggtcagcgtgtgaagtaggcgctggcaacgcggggttacccgctgttattgaggagtaacggcccagcggaccacccaggcttgaggcagcggcgggaaccactcggtttgctgcgataccatggaaggaggcgggggaagcggcaacaaaaccacagggggattggccggctttttcggagccggcggagcaggttactcgcacgcggatttggctggcgtcccgctaactggtatgaaccctctgtctccttatttaaatgtggatccacgatacctcgtgcaggatacagatgagtttattttacctaccggagctaataaaacccggggcagatttgagctggccttctttacgattggaggatgttgcatgacagctttgctctatagtgcatttggtgtcatcattgagaaaacacgaggtgcagaagatgaccttaacacagtagcagctggaaccatgacaggcatgttgtataaatgtacaggtggtcttcgagggatagcacgaggtggtctgacaggactaacacttaccagcctctatgcactatataataactgggagcacatgaaaggctccttgctccaacagtcactctgaagattttgccaactcatgaatggaggacacttcagtagtcatctagatccttttataagacagtttggagttattctctctcttctacctacaattagtttgaaaaattggagattttgatttgctgtgatgaaaatcctggatggctgaccaagactggcacttgttccagccattagtgagttgaagccaaagccctttggtgactcactgagtaccatggttctgttctcctctggagatcttgcacgtatctgttttcctcccccatgaactagaaaaccacttactcccagaattcaggtcgtgcttgttagtactatatcaccaagtccattcatttaatgatccaaaactgtaatgttgcactgtattccaaataaagggtaaaaacagaaccaaagttataactcc

SEQ ID NO: 163996 - DNA, 848 bp, Artificial Sequence
  derived and/or modified sequence
aggcgctggcaacgcggggttacccgctgttattgaggagtaacggcccagcggaccacccaggcttgaggcagcggcgggaaccactcggtttgctgcgataccatggaaggaggcgggggaagcggcaacaaaaccacagggggattggccggctttttcggagccggcggagcaggttactcgcacgcggatttggctggcgtcccgctaactggtatgaaccctctgtctccttatttaaatgtggatccacgatacctcgtgcaggatacagatgagtttattttacctaccggagctaataaaacccggggcagatttgagctggccttctttacgattggaggatgttgcatgacaggggcactttgggctaatactctaggttctctggctttgctctatagtgcatttggtgtcatcattgagaaaacacgaggtgcagaagatgaccttaacacagtagcagctggaaccatgacaggcatgttgtataaatgtacaggtggtcttcgagggatagcacgaggtggtctgacaggactaacacttaccagcctctatgcactatataataactgggagcacatgaaaggctccttgctccaacagtcactctgaagattttgccaactcatgaatggaggacacttcagtagtcatctagatccttttataagacagtttggagttattctctctcttctacctacaattagtttgaaaaattggagattttgatttgctgtgatgaaaatcctggatggctgaccaagactggcacttgttccagccattagtgagttgaagccaaagccctttggtgactcactgagtaccatggt

SEQ ID NO: 163997 - DNA, 752 bp, Artificial Sequence
  derived and/or modified sequence
aggtcagcgtgtgaagtaggcgctggcaacgcggggttacccgctgttattgaggagtaacggcccagcggaccacccaggcttgaggcagcggcgggaaccactcggtttgctgcgataccatggaaggaggcgggggaagcggcaacaaaaccacagggggattggccggctttttcggagccggcggagcaggttactcgcacgcggatttggctggcgtcccgctaactggtatgaaccctctgtctccttatttaaatgtggatccacgatacctcgtgcaggatacagatgagtttattttacctaccggagctaataaaacccggggcagatttgagctggccttctttacgattggaggatgttgcatgacaggggctgcgtttggtgcaatgaatggtcttcggctaggattgaaggaaacccagaacatggcctggtccaaaccaagaaatgtacagattttgaatatggtgactaggcaaggggcactttgggctaatactctaggttctctggctttgctctatagtgcatttggtgtcatcattgagaaaacacgaggtgcagaagatgaccttaacacagtagcagctggaaccatgacaggcatgttgtataaatgtacagcctcagcctcccaaagtgctaggattgcagatggtcttatttttacggagttttgctctgtcgccaggctgcagggcagtggcacaatcttggctcattacaacctccacctcccg

SEQ ID NO: 163998 - DNA, 746 bp, Artificial Sequence
  derived and/or modified sequence
cgggggaagcggcaacaaaaccacagggggattggccggctttttcggagccggcggagcaggttactcgcacgcggatttggctggcgtcccgcctttgctctatagtgcatttggtgtcatcattgagaaaacacgaggtgcagaagatgaccttaacacagtagcagctggaaccatgacaggcatgttgtataaatgtacaggtggtcttcgagggatagcacgaggtggtctgacaggactaacacttaccagcctctatgcactatataataactgggagcacatgaaaggctccttgctccaacagtcactctgaagattttgccaactcatgaatggaggacacttcagtagtcatctagatccttttataagacagtttggagttattctctctcttctacctacaattagtttgaaaaattggagattttgatttgctgtgatgaaaatcctggatggctgaccaagactggcacttgttccagccattagtgagttgaagccaaagccctttggtgactcactgagtaccatggttctgttctcctctggagatcttgcacgtatctgttttcctcccccatgaactagaaaaccacttactcccagaattcaggtcgtgcttgttagtactatatcaccaagtccattcatttaatgatccaaaactgtaatgttgcactgtattccaaataaagggtaaaaacagaaccaaagttataactccaacacacaaa

SEQ ID NO: 163999 - protein, 669 aa, Artificial Sequence
  derived and/or modified sequence
MKIFVGNVDGADTTPEELAALFAPYGTVMSCAVMKQFAFVHMRENAGALRAIEALHGHELRPGRALVVEMSRPRPLNTWKIFVGNVSAACTSQELRSLFERRGRVIECDVVKDYAFVHMEKEADAKAAIAQLNGKEVKGKRINVELSTKGQKKGPGLAVQSGDKTKKPGAGDTAFPGTGGFSATFDYQQAFGNSTGGFDGQARQPTPPFFGRDRSPLRRSPPRASYVAPLTAQPATYRAQPSVSLGAAYRAQPSASLGVGYRTQPMTAQAASYRAQPSVSLGAPYRGQLASPSSQSAAASSLGPYGGAQPSASALSSYGGQAAAASSLNSYGAQGSSLASYGNQPSSYGAQAASSYGVRAAASSYNTQGAASSLGSYGAQAASYGAQSAASSLAYGAQAASYNAQPSASYNAQSAPYAAQQAASYSSQPAAYVAQPATAAAYASQPAAYAAQATTPMAGSYGAQPVVQTQLNSYGAQASMGLSGSYGAQSAAAATGSYGAAAAYGAQPSATLAAPYRTQSSASLAASYAAQQHPQAAASYRGQPGNAYDGAGQPSAAYLSMSQGAVANANSTPPPYERTRLSPPRASYDDPYKKAVAMSKRYGSDRRLAELSDYRRLSESQLSFRRSPTKSSLDYRRLPDAHSDYARYSGSYNDYLRAAQMHSGYQRRM

SEQ ID NO: 164000 - DNA, 2828 bp, Artificial Sequence
  derived and/or modified sequence
attggctaggccagggcgcctgcgcggcggggttctcggtcgccagccattcctgaggaggactgccggtcgttcggacgtcttgcctgtcgctggaggagaggtccgggctctccaggaaggtggctgcggcgacaaaatgaagatattcgtgggcaacgtcgacggggcggatacgactccggaggagctggcagccctctttgcgccctacggcacggtcatgagctgcgccgtcatgaaacagttcgccttcgtgcacatgcgcgagaacgcgggcgcgctgcgcgccatcgaagccctgcacggccacgagctgcggccggggcgcgcgctcgtggtggagatgtcgcgcccaaggcctcttaatacttggaagattttcgtgggcaatgtgtcggctgcatgcacgagccaggaactgcgcagcctcttcgagcgccgcggacgcgtcatcgagtgtgacgtggtgaaagactacgcgtttgttcacatggagaaggaagcagatgccaaagccgcaatcgcgcagctcaacggcaaagaagtgaagggcaagcgcatcaacgtggaactctccaccaagggtcagaagaaggggcctggcctggctgtccagtctggggacaagaccaagaaaccaggggctggggatacggccttccctggaactggtggcttctctgccaccttcgactaccagcaggcttttggcaacagcactggtggctttgatgggcaagcccgtcagcccacaccacccttctttggtcgcgaccgcagccctctgcgccgttcacctccccgagcctcttatgtggctcctctgacggcccagccagctacctaccgggcccagccgtccgtgtcactgggagctgcctacagggcccagccttctgcctctttgggtgttggctatcggactcagcccatgacagcccaggcagcctcttaccgcgctcagccctctgtctcccttggggcaccatacaggggccagctggctagtcctagctcccagtctgctgcagcttcttcactcggcccatatggtggagcccagccctcagcctcggccctttcctcctatgggggtcaggcagctgcagcttcttcgctcaactcctatggggctcagggttcctcccttgcctcctatggtaaccagccatcctcttacggcgcccaggctgcctcttcctatggggttcgtgcagctgcttcttcctacaacacccagggagcagcttcctccttaggctcctacggggctcaggcagcctcctatggggcccagtctgcagcctcctcactagcttatggagcccaggcagcttcatataatgcccagccctcggcctcttacaatgcccagtctgccccatatgctgcacagcaggctgcttcctactcttcccaacctgctgcctatgtggcacagccagccacagctgctgcctatgccagccagccagcagcctacgccgcacaagccactaccccaatggctggctcctatggggcccagccggttgtgcagacccagctgaatagttacggggcccaagcatcaatgggcctttcaggctcctatggggctcagtcggctgctgcggccactggctcctatggtgccgcagcagcctacggggcccaaccttctgccaccctggcagctccttaccgcactcagtcatcagcctcattggctgcttcctatgctgcccagcagcatccccaggctgctgcctcctaccgcggccagccaggcaatgcctacgatggggcaggtcagccgtctgcagcctacctgtccatgtcccagggggccgttgccaacgccaacagcaccccgccgccctatgagcgtacccgcctctccccaccccgggccagctacgacgatccctacaaaaaggctgtcgccatgtcgaaaaggtatggttccgaccggcgtttagccgagctctctgattaccgccgtttatcagagtcgcagctttcgttccgccgctcgccgacaaagtcctcgctggattaccgtcgcctgcccgatgcccattccgattacgcacgctattcgggctcctataatgattacctgcgggcggctcagatgcactctggctaccagcgccgcatgtagggccatcctgggatggggcaccacagggagggagggagaaaagaggtgggtagggttacagatccaggttataactactctggcccatacctttcctggttgtggtttttcatgccctctaccatgtgggccttccccaggagatgatcctgttaagtgttcggcagtaacctactttgttccttcgcctcagcagcaaatcttgctactggctctagatctgcggtttcccctctaccctgcctcccgtctccccagaatgggaatttcttttatgtttttatttttttcctggctcccttttatttttgtgcgcgatatttaaggtcgtctggatggggaagcaacctgcagctgaggtcgccggcgcctttttctttttagatgggaaggaggccaggaaagggtcagcttaaccatttcctatgtgccaagctgtgccagcagtccagggtaccctgactgtccctctgtagactgttgagactgagttcctgttgggacagtcagttggtatgtatccaagtccctgctgaccactaatgttctagctgatggtgagcggcacagtcccacttccccatctccccaagtaggtggtgttagaaaaccttaattttttttcccttttgtatggactacaaataaaacttggggcaatttgcagtttggaaacctg

SEQ ID NO: 164001 - DNA, 2010 bp, Artificial Sequence
  derived and/or modified sequence
atgaaaattttcgttgggaacgtcgatggtgctgatacgacgcctgaagagctggctgcattgttcgccccctacgggaccgtgatgagttgcgccgttatgaaacagtttgccttcgtacacatgcgtgagaatgccggagcacttcgcgctatcgaagcgctgcatgggcacgaattgaggcccgggcgcgccctagtggtagagatgtcaagaccccgacccttgaacacatggaagatatttgtgggaaatgtgtcagccgcgtgtaccagccaagagctacggtcactcttcgagcggagaggacgcgtcattgaatgtgatgtggtgaaggactacgctttcgttcatatggaaaaagaggctgacgcaaaggctgctatcgcccagctcaacggtaaagaagtaaaaggcaaacgtattaacgtcgaattatcaacaaaaggacagaagaaaggtcctgggctagccgtacagagcggtgataagactaaaaagcccggggctggcgacactgcattccctgggactgggggcttctcagctacatttgactaccagcaggcgttcgggaattcaacaggtggatttgacggccaagccagacaacctaccccaccatttttcggccgagaccggagccctctgcgccggagtcctccccgggcctcttacgttgctcccctaaccgcccagcccgccacatatcgggcccaaccatctgtgtctcttggggcagcgtacagagcccagcctagcgcctcgttgggtgtggggtaccggacgcaaccaatgacagcacaggccgccagctaccgggcccagccttcagttagtctgggggccccatatcgcggacagctggcaagtccgagcagtcagagtgcggctgccagttcactgggaccctatggtggagcgcagccctcagcctccgctctaagttcttatggcggtcaggccgctgccgcgtcatctcttaattcctacggggcccaaggaagttcactggcctcatatggtaaccagccaagctcctatggggcccaggctgccagctcttatggcgtgagggcagccgcatcttcctacaacacccagggcgccgcttcatctctgggttcctacggagcccaagctgcaagctacggcgcccagagtgctgcaagcagtctggcctatggggcgcaagcggctagttacaacgctcaacctagtgcgtcatacaatgctcagtccgctccctatgcggcccagcaggccgcttcctacagttcccagccggctgcttatgtggctcaacctgccacagccgccgcatacgcctcccagcctgctgcctacgcggctcaggccaccacacccatggccggatcttatggtgctcagccagtcgtgcagactcagctgaatagctatggagcccaggcttctatgggactttcaggaagctatggggcacaatccgcagccgccgcgactggctcttatggtgccgccgccgcctatggggcgcaaccttccgccactctggcggcaccttatcggacacagtctagcgcctcgttagccgcttcctatgccgcccagcagcacccacaggccgcggcaagctataggggtcagcccggcaacgcatatgacggtgctggccagccttccgctgcatatttgagcatgagtcagggggccgtggccaacgccaacagcacgccacccccctacgaacgcactcgactgtcaccaccaagggcaagttatgacgatccctacaaaaaagccgttgcaatgagcaaaagatatggcagcgaccgtcgcctcgctgaattgagcgattacagaagactcagcgagtcccagctttcttttcgtcgcagccctaccaagtcttcactcgactacaggcgtctgcccgacgctcacagcgactacgcccgctactccggctcttataacgactacttaagggcagctcagatgcattccggataccagaggcgtatgtag

SEQ ID NO: 164002 - DNA, 2010 bp, Artificial Sequence
  derived and/or modified sequence
atgaagatctttgtgggcaatgtggatggagctgacaccaccccagaggagctggccgccctgtttgccccctatggaacagtgatgagctgtgctgtgatgaagcagtttgcctttgtgcacatgagagaaaatgctggggccctgcgggccatcgaggccctgcacggccacgagctgcggcccggccgggccctggtggtggagatgagccggccccggcccctgaacacctggaagatctttgtgggcaatgtgtctgctgcctgcaccagccaggagctgcggagcctgtttgaaagaagaggccgggtgattgaatgtgatgtggtgaaggactatgcctttgtgcacatggagaaggaggctgatgccaaggccgccatcgcccagctgaatggcaaggaggtgaagggcaagaggatcaacgtggagctgagcaccaagggccagaagaagggccctggcctggccgtgcagagcggggacaagaccaagaagccaggggccggggacacagccttccctggcaccggcggcttcagcgccacctttgactaccagcaggcctttggaaacagcactggaggctttgatggccaggcccggcagcccaccccacccttcttcggccgggacaggagccccctgcggcgcagccccccccgggccagctatgtggcccccctgacagcccagcctgccacctaccgggcccagcccagcgtgtccctgggcgccgcctaccgggcccagcccagcgccagcctgggcgtgggctaccgcacccagcccatgacagcccaggccgccagctaccgggcccagcccagcgtgtccctgggcgccccctaccggggccagctggccagccccagcagccagagcgctgctgccagcagcctgggcccctatggaggagcccagcccagcgccagcgccctgagcagctatggaggccaggccgccgccgccagcagcctgaacagctatggagcccagggcagcagcctggccagctatggcaaccagcccagcagctatggagcccaggccgccagcagctatggagtgcgggctgctgccagcagctacaacacccagggcgccgccagcagcctgggcagctatggagcccaggccgccagctatggagcccagagcgctgccagcagcctggcctatggagcccaggccgccagctacaatgcccagcccagcgccagctacaatgcccagagcgccccctatgctgcccagcaggccgccagctacagcagccagcctgctgcctacgtggcccagcctgccacagctgctgcctatgccagccagcctgctgcctatgctgcccaggccaccacccccatggccggcagctatggagcccagcctgtggtgcagacccagctgaacagctatggagcccaggcctccatgggcctgagcggcagctatggagcccagagcgctgctgctgccaccggcagctatggagctgctgctgcctacggggcccagcccagcgccaccctggccgccccctaccgcacccagagcagcgccagcctggccgccagctatgctgcccagcagcacccccaggccgccgccagctaccggggccagcctggaaatgcctatgatggagctggccagcccagcgctgcctacctgtccatgagccagggcgctgtggccaatgccaacagcaccccaccaccctatgaaagaacccggctgagccccccccgggccagctatgatgacccctacaagaaggctgtggccatgagcaagagatatggcagtgaccggcggctggccgagctgagtgactacagaaggctgtctgagagccagctgtccttcagaagaagccccaccaagagcagcctggactaccgccgcctgcctgatgcccacagcgactatgcccgctacagcggcagctacaatgactacctgcgggccgcccagatgcacagcggctaccagaggaggatgtag

SEQ ID NO: 164003 - DNA, 2010 bp, Artificial Sequence
  derived and/or modified sequence
atgaagatcttcgtgggcaacgtggacggcgccgacaccacccccgaggagctggccgcgctcttcgctccctacggcaccgtcatgagctgtgctgtcatgaagcagtttgccttcgtgcatatgagggagaacgccggcgctctgagagctatcgaggctctacatggccatgaactccggcccggcagggctttggtcgtcgaaatgagccgaccacgcccattgaacacatggaaaatttttgtcggaaacgtctccgcagcctgtacctcacaggagctccggtccctgtttgaaagacgcggccgggtcatcgagtgcgatgttgtgaaggattatgcttttgtgcacatggagaaagaggcagacgcaaaagctgcaattgcccagcttaatgggaaagaagtcaaaggcaagagaatcaatgtagagctgagtaccaaagggcagaaaaagggacctggtctggcagtgcagagtggggacaagacaaaaaaaccaggagcaggtgataccgcgttcccagggaccggaggtttttccgcaacattcgattaccagcaggcctttgggaattctacagggggctttgatgggcaggcaagacagcccactcctccgttctttgggcgcgacagatcccctctgagaagatctcccccacgcgcaagctatgtggccccgctcactgctcagccggctacctacagggctcagccttcagtgtcattgggcgctgcctacagggctcagccctctgcttctctgggtgtgggatacaggacgcagcccatgaccgcccaggcggcatcgtacagagctcagccaagtgtgtctctgggggcaccctacaggggccagctggctagcccaagctcacaaagcgcggctgctagttccctgggcccctacggtggcgcccagccaagcgcctccgctctctcttcttacggcggccaggctgcagccgctagctcattaaactcatacggcgcccagggcagctctttggcctcttacgggaaccagccctctagttacggggcccaggccgcttcaagctatggagtaagggccgctgccagctcatacaacacacagggggccgcaagctccctcggctcatacggcgcgcaggctgccagttacggagctcagtctgctgcctcatcactggcctacggggcccaagcagcatcttataatgctcagccatccgcctcctacaacgcccagtctgcaccttatgcagcacagcaggctgcttcatacagcagtcaacctgccgcatatgttgcacagcctgcaacggccgcagcatacgcgtcccagcccgccgcttatgccgcccaggccaccacaccaatggctgggagctacggcgcccaaccagtggtacaaactcaattaaattcctatggcgctcaggcttcaatgggattatctggaagttacggggcacaaagcgccgctgctgcaacaggtagttatggtgctgcagccgcttatggggcccagccctccgctactctggccgccccctaccgcacacaatctagcgccagcctcgccgccagctacgccgcccagcaacaccctcaggcagcggcctcttaccgcggacagcctggcaatgcctatgacggcgccggacagccttcagcagcttacctctcaatgagccagggggccgtagcgaacgctaactcgacccctcccccttacgaaagaacaaggctcagtcctccacgcgcttcatatgacgacccttacaaaaaagccgtcgccatgtcaaagaggtatggttcagaccgtaggctggcagaactaagtgactaccggcgtttatctgaatctcagctgtccttccgaaggtctccaacgaagagcagcctggattacaggaggttgcctgacgcccacagcgactatgcccgttattccgggtcatataatgattacctgagagctgctcagatgcacagcggctaccagcggcgcatgtag

SEQ ID NO: 164004 - DNA, 2010 bp, Artificial Sequence
  derived and/or modified sequence
atgaagatctttgttggaaacgtagatggcgctgacaccactccagaagaactcgccgctttatttgcaccttatggaaccgtgatgagttgcgccgttatgaaacaatttgcatttgtgcatatgagggagaacgccggagccctgcgtgccatcgaagctctccatgggcacgaactccgcccaggccgagccctcgtggtggaaatgtctcgccctagaccgctcaacacttggaagatcttcgtgggcaacgtgtctgctgcctgcactagccaagagctgcgctctcttttcgagcgaagggggagggttatcgagtgtgacgtggtcaaggactatgccttcgtgcacatggaaaaagaagccgatgccaaggcagctattgcacagctgaacggtaaagaagtgaagggaaaacggatcaatgttgaactttccactaagggtcagaagaagggaccagggttagccgtgcagagcggcgacaagaccaaaaagcctggggcaggagacaccgcgtttcctggtacaggtggattctcggctacgttcgattaccagcaggcattcggtaactcaaccggaggtttcgatggtcaggccaggcagcctacacctcccttcttcgggcgagaccggtctcccctgagacgttccccccctcgcgcaagctatgtagctccgttgactgcacagccagccacatacagagcccagccttctgtatctttgggcgcagcttatagggcccaacccagcgcgtctcttggagttggttaccggactcagccaatgaccgcgcaggctgcctcctacagggctcaaccgtcagtctctcttggggcaccataccgcggtcaattggcctccccttcaagccagagcgctgctgcttcttccttgggtccttatggtggagcccaaccaagcgccagcgccctcagcagttatggtggtcaagcggctgctgcctcatccctcaactcctacggggctcagggctcgagcctggcaagctacggcaatcagccctcctcctatggcgcacaggctgcaagcagttacggcgtgagggccgctgctagcagctataatactcaaggggctgcctcttcactaggcagttacggggctcaggccgcatcatacggcgctcaatcggccgcaagctctctggcttacggagcacaagcggcatcatacaatgcccagccttctgcgagttacaatgcgcaaagcgctccatatgcagcacaacaggcagccagctacagcagtcagcccgctgcctatgtggcacaacccgctacagccgctgcctacgccagtcagccagccgcatatgctgctcaggccacaactccaatggcgggatcatatggcgcacagccagtagtccagacccagctgaatagttatggtgcacaagccagcatgggattgagtggttcctacggtgctcagtctgctgccgcagccactggttcctacggagctgccgctgcatacggcgcacagccttcagccaccttggccgcaccgtaccgcacccagtccagcgcatccctggctgcttcctatgctgcccaacagcatcctcaggccgctgcatcatacagagggcagcctgggaatgcttacgacggagcagggcaaccatcagcagcttatctcagtatgtcccagggcgcagtggcaaatgccaacagcacacccccaccatatgagcggactcggcttagccctccgagagcttcatacgacgatccatacaaaaaagccgtcgcaatgtctaaaagatacggtagtgaccggagactggcagagctttctgattatcggcgtctctccgagagccagttgtccttccgtcgcagccctaccaagagtagtttggactataggagactcccagatgcacattccgattacgctcgctactcaggttcctataacgactacctccgggctgcccagatgcattctggttatcagcgcagaatgtag

SEQ ID NO: 164005 - DNA, 2010 bp, Artificial Sequence
  derived and/or modified sequence
atgaagatcttcgtgggcaacgtggacggcgccgacaccacccccgaggagctggccgccctgttcgccccctacggcaccgtgatgagctgcgccgtgatgaagcagttcgccttcgtgcacatgagagagaacgccggcgccctgagagccatcgaggccctgcacggccacgagctgagacccggcagagccctggtggtggagatgagcagacccagacccctgaacacctggaagatcttcgtgggcaacgtgagcgccgcctgcaccagccaggagctgagaagcctgttcgagagaagaggcagagtgatcgagtgcgacgtggtgaaggactacgccttcgtgcacatggagaaggaggccgacgccaaggccgccatcgcccagctgaacggcaaggaggtgaagggcaagagaatcaacgtggagctgagcaccaagggccagaagaagggccccggcctggccgtgcagagcggcgacaagaccaagaagcccggcgccggcgacaccgccttccccggcaccggcggcttcagcgccaccttcgactaccagcaggccttcggcaacagcaccggcggcttcgacggccaggccagacagcccaccccccccttcttcggcagagacagaagccccctgagaagaagcccccccagagccagctacgtggcccccctgaccgcccagcccgccacctacagagcccagcccagcgtgagcctgggcgccgcctacagagcccagcccagcgccagcctgggcgtgggctacagaacccagcccatgaccgcccaggccgccagctacagagcccagcccagcgtgagcctgggcgccccctacagaggccagctggccagccccagcagccagagcgccgccgccagcagcctgggcccctacggcggcgcccagcccagcgccagcgccctgagcagctacggcggccaggccgccgccgccagcagcctgaacagctacggcgcccagggcagcagcctggccagctacggcaaccagcccagcagctacggcgcccaggccgccagcagctacggcgtgagagccgccgccagcagctacaacacccagggcgccgccagcagcctgggcagctacggcgcccaggccgccagctacggcgcccagagcgccgccagcagcctggcctacggcgcccaggccgccagctacaacgcccagcccagcgccagctacaacgcccagagcgccccctacgccgcccagcaggccgccagctacagcagccagcccgccgcctacgtggcccagcccgccaccgccgccgcctacgccagccagcccgccgcctacgccgcccaggccaccacccccatggccggcagctacggcgcccagcccgtggtgcagacccagctgaacagctacggcgcccaggccagcatgggcctgagcggcagctacggcgcccagagcgccgccgccgccaccggcagctacggcgccgccgccgcctacggcgcccagcccagcgccaccctggccgccccctacagaacccagagcagcgccagcctggccgccagctacgccgcccagcagcacccccaggccgccgccagctacagaggccagcccggcaacgcctacgacggcgccggccagcccagcgccgcctacctgagcatgagccagggcgccgtggccaacgccaacagcaccccccccccctacgagagaaccagactgagcccccccagagccagctacgacgacccctacaagaaggccgtggccatgagcaagagatacggcagcgacagaagactggccgagctgagcgactacagaagactgagcgagagccagctgagcttcagaagaagccccaccaagagcagcctggactacagaagactgcccgacgcccacagcgactacgccagatacagcggcagctacaacgactacctgagagccgcccagatgcacagcggctaccagagaagaatgtag

SEQ ID NO: 164006 - protein, 448 aa, Artificial Sequence
  derived and/or modified sequence
MPGIKRILTVTILALCLPSPGNAQAQCTNGFDLDRQSGQCLDIDECRTIPEACRGDMMCVNQNGGYLCIPRTNPVYRGPYSNPYSTPYSGPYPAAAPPLSAPNYPTISRPLICRFGYQMDESNQCVDVDECATDSHQCNPTQICINTEGGYTCSCTDGYWLLEGQCLDIDECRYGYCQQLCANVPGSYSCTCNPGFTLNEDGRSCQDVNECATENPCVQTCVNTYGSFICRCDPGYELEEDGVHCSDMDECSFSEFLCQHECVNQPGTYFCSCPPGYILLDDNRSCQDINECEHRNHTCNLQQTCYNLQGGFKCIDPIRCEEPYLRISDNRCMCPAENPGCRDQPFTILYRDMDVVSGRSVPADIFQMQATTRYPGAYYIFQIKSGNEGREFYMRQTGPISATLVMTRPIKGPREIQLDLEMITVNTVINFRGSSVIRLRIYVSQYPF

SEQ ID NO: 164007 - DNA, 2123 bp, Artificial Sequence
  derived and/or modified sequence
gccacgcagcgcgggcgtgcacgcccctccccgccgggccgcgctgccagccccgccccgcccctgggtgggaaggtcaaggggcccgggccctcccagcccccgcacccctgcgcgcgcccgcccctcgccttctgcccgggcgctcgcagccgagcgcggccggggaagggctctcctcccagcgccgagcactgggccctggcagacgccccaagattgttgtgaggagtctagccagttggtgagcgctgtaatctgaaccagctgtgtccagactgaggccccatttgcattgtttaacatacttagaaaatgaagtgttcatttttaacattcctcctccaattggtttaatgctgaattactgaagagggctaagcaaaaccaggtgcttgcgctgagggctctgcagtggctgggaggaccccggcgctctccccgtgtcctctccacgactcgctcggcccctctggaataaaacacccgcgagccccgagggcccagaggaggccgacgtgcccgagctcctccgggggtcccgcccgcgagctttcttctcgccttcgcatctcctcctcgcgcgtcttggacatgccaggaataaaaaggatactcactgttaccattctggctctctgtcttccaagccctgggaatgcacaggcacagtgcacgaatggctttgacctggatcgccagtcaggacagtgtttagatattgatgaatgccgaaccatccccgaggcctgccgaggagacatgatgtgtgttaaccaaaatggcgggtatttatgcattccccggacaaaccctgtgtatcgagggccctactcgaacccctactcgaccccctactcaggtccgtacccagcagctgccccaccactctcagctccaaactatcccacgatctccaggcctcttatatgccgctttggataccagatggatgaaagcaaccaatgtgtggatgtggacgagtgtgcaacagattcccaccagtgcaaccccacccagatctgcatcaatactgaaggcgggtacacctgctcctgcaccgacggatattggcttctggaaggccagtgcttagacattgatgaatgtcgctatggttactgccagcagctctgtgcgaatgttcctggatcctattcttgtacatgcaaccctggttttaccctcaatgaggatggaaggtcttgccaagatgtgaacgagtgtgccaccgagaacccctgcgtgcaaacctgcgtcaacacctacggctctttcatctgccgctgtgacccaggatatgaacttgaggaagatggcgttcattgcagtgatatggacgagtgcagcttctctgagttcctctgccaacatgagtgtgtgaaccagcccggcacatacttctgctcctgccctccaggctacatcctgctggatgacaaccgaagctgccaagacatcaacgaatgtgagcacaggaaccacacgtgcaacctgcagcagacgtgctacaatttacaagggggcttcaaatgcattgaccccatccgctgtgaggagccttatctgaggatcagtgataaccgctgtatgtgtcctgctgagaaccctggctgcagagaccagccctttaccatcttgtaccgggacatggacgtggtgtcaggacgctccgttcccgctgacatcttccaaatgcaagccacgacccgctaccctggggcctattacattttccagatcaaatctgggaatgagggcagagaattttacatgcggcaaacgggccccatcagtgccaccctggtgatgacacgccccatcaaagggccccgggaaatccagctggacttggaaatgatcactgtcaacactgtcatcaacttcagaggcagctccgtgatccgactgcggatatatgtgtcgcagtacccattctgagcctcgggctggagcctccgacgctgcctctcattggcaccaagggacaggagaagagaggaaataacagagagaatgagagcgacacagacgttaggcatttcctgctgaacgtttccccgaagagtcagccccgacttcctgactctcacctgtactattgcagacctgtcaccctgcag

SEQ ID NO: 164008 - DNA, 547 bp, Artificial Sequence
  derived and/or modified sequence
ccttcttcgggaagatcgcgactctcccgtcgctcgccccaagcctctgcttcagggctaagcaaaaccaggtgcttgcgctgagggctctgcagtggctgggaggaccccggcgctctccccgtgtcctctccacgactcgctcggcccctctggaataaaacacccgcgagccccgagggcccagaggaggccgacgtgcccgagctcctccgggggtcccgcccgcgagctttcttctcgccttcgcatctcctcctcgcgcgtcttggacatgccaggaataaaaaggatactcactgttaccattctggctctctgtcttccaagccctgggaatgcacaggcacagtgcacgaatggctttgacctggatcgccagtcaggacagtgtttagatattgatgaatgccgaaccatccccgaggcctgccgaggagacatgatgtgtgttaaccaaaatggcgggtatttatgcattccccggacaaaccctgtgtatcgagggccctactcgaacccctactcgaccccctactcaggtccg

SEQ ID NO: 164009 - DNA, 1347 bp, Artificial Sequence
  derived and/or modified sequence
atgccaggaataaaacggatattgacagtgactatcctagcactgtgtctgccttcccctggcaatgcgcaggctcagtgtaccaatggattcgatcttgatcggcagtctggacagtgcttggacatcgatgagtgtcggaccatcccagaggcttgtcggggcgacatgatgtgtgtgaaccagaacggaggttatttatgcattccaagaaccaatccggtgtaccgggggccgtactctaacccctattctacaccttactccggtccttaccccgcggcggctccgccactgtccgctcccaactacccaactatctcccgcccactcatatgtcggtttggataccagatggacgaatcgaatcagtgtgtggacgtcgacgaatgcgccacggatagtcaccagtgcaacccgacccaaatatgcattaataccgaaggaggatacacctgctcttgcaccgatgggtactggttgcttgaaggacagtgtttggacatcgacgagtgtagatacggatattgccagcagctttgcgctaacgtacccggctcttactcctgtacctgtaacccggggtttacactgaatgaggatggtcgtagttgtcaggacgtgaacgaatgtgctacagagaatccgtgcgtgcagacatgtgtgaacacttacggcagtttcatatgcagatgtgaccctggatatgaactggaagaggatggcgtacattgttcagacatggacgagtgcagcttcagcgaattcctgtgccagcacgagtgcgttaatcagcctgggacgtacttctgtagctgtcctcccggatatattctgttggacgataaccgatcatgccaggacattaatgaatgtgagcatcgaaatcatacttgcaaccttcagcaaacctgctataacctgcagggtggcttcaaatgtatcgatccgatacggtgcgaagaaccctacttacgaatttccgataatagatgcatgtgccccgccgaaaacccaggatgccgggaccaaccattcacaatactgtaccgggatatggatgtggtgtccggccgttcagtccccgccgatattttccagatgcaggccactactaggtaccctggtgcctactatatttttcagattaagagtgggaatgaaggccgggaattctatatgcgccagaccggcccaatcagcgccactcttgtcatgactagacctatcaaaggtccgcgggagatccaactggacctggagatgatcacggtcaataccgtcattaacttccgcggtagttcagtgattaggctgcgaatctatgtgtcacagtaccctttttag

SEQ ID NO: 164010 - DNA, 276 bp, Artificial Sequence
  derived and/or modified sequence
atgcctgggattaagcgcattctgaccgtcacgatcctggccctctgtttgccttccccaggaaacgctcaggctcaatgcaccaacggctttgatctggataggcagagcggacagtgtttggacatcgacgagtgtcgcactatccccgaagcatgccgtggcgacatgatgtgcgtgaaccagaatggcgggtacctgtgtatcccccgaaccaaccccgtatatcgtggaccgtactccaatccctattcaactccttactccgggccttag

SEQ ID NO: 164011 - DNA, 1347 bp, Artificial Sequence
  derived and/or modified sequence
atgcctggcatcaagaggatcctgactgtgaccatcctggccctgtgcctgcccagccctggaaatgcccaggcccagtgcaccaatggatttgacctggaccggcagagcggccagtgcctggacattgatgaatgtaggaccatccctgaggcctgccgcggggacatgatgtgtgtgaaccagaatggaggctacctgtgcatccccaggaccaaccctgtgtaccggggcccctacagcaacccctacagcaccccctacagcggcccctacccagctgctgccccacccctgagcgcccccaactaccccaccatcagccggcccctcatctgccgcttcggctaccagatggatgagagcaaccagtgtgtggatgtggatgaatgtgccacagacagccaccagtgcaaccccacccagatctgcatcaacacagaaggaggctacacctgcagctgcacagatggctactggctgctggagggccagtgcctggacattgatgaatgtagatatggctactgccagcagctgtgtgccaacgtgcccggcagctacagctgcacctgcaaccctggcttcaccctgaatgaagatggccgcagctgccaggatgtgaatgaatgtgccacagagaacccctgtgtgcagacctgtgtgaacacctacggcagcttcatctgccgctgtgaccccggctatgagctggaggaggatggagtgcactgcagcgacatggatgagtgcagcttcagcgagttcctgtgccagcatgaatgtgtgaaccagcccggcacctacttctgcagctgccccccaggctacatcctgctggatgacaacagaagctgccaggacatcaatgaatgtgagcacaggaaccacacctgcaacctgcagcagacctgctacaacctgcagggcggcttcaagtgcatcgaccccatccgctgtgaggagccctacctgcgcatcagtgacaaccgctgcatgtgcccagcagaaaatcctggctgccgggaccagcccttcaccatcctgtacagagacatggatgtggtgtctggccgctctgtgcctgctgacatcttccagatgcaggccaccacccgctacccaggggcctactacatcttccagatcaagtctggaaatgaaggccgggagttctacatgaggcagacaggccccatcagcgccaccctggtgatgacccggcccatcaagggcccccgggagatccagctggacctggagatgatcaccgtgaacacagtcatcaacttccggggcagcagcgtcatccggctgcgcatctacgtgtcccagtaccccttctag

SEQ ID NO: 164012 - DNA, 276 bp, Artificial Sequence
  derived and/or modified sequence
atgcctggcatcaagaggatcctgactgtgaccatcctggccctgtgcctgcccagccctggaaatgcccaggcccagtgcaccaatggatttgacctggaccggcagagcggccagtgcctggacattgatgaatgtaggaccatccctgaggcctgccgcggggacatgatgtgtgtgaaccagaatggaggctacctgtgcatccccaggaccaaccctgtgtaccggggcccctacagcaacccctacagcaccccctacagcggcccctag

SEQ ID NO: 164013 - DNA, 1347 bp, Artificial Sequence
  derived and/or modified sequence
atgcccggcatcaagcggatcctgaccgtgaccatcctggccctgtgtctgcccagtccgggcaacgcacaagctcagtgcacgaatggattcgacctcgatagacaatctggccagtgtctagacatcgatgaatgtcgaaccattcctgaagcctgtcggggagatatgatgtgtgtcaaccagaacgggggctacctctgcattccaagaacaaacccagtctatcgaggcccttatagcaatccatactcaacaccgtactccggcccgtatcctgccgcagccccgccactttctgcgccaaattatcctacgatcagtcgacctctgatctgtcgatttggctatcaaatggacgaatcaaatcagtgcgtggacgttgacgagtgcgccaccgattctcatcagtgcaaccccactcagatatgcatcaacacggaggggggctacacttgctcctgcaccgacggatactggttgttggaaggccagtgcttggacatcgatgagtgcaggtacggatactgtcagcagttgtgtgccaacgtccctggctcttactcctgtacatgtaacccaggtttcacactcaacgaagatgggagatcatgccaggacgtgaacgaatgcgcaaccgagaatccatgtgttcagacctgcgtcaacacatatggctctttcatttgccgctgtgacccaggctacgagttggaagaggacggcgtacactgtagtgacatggatgaatgcagcttctctgaatttctctgtcagcatgagtgcgtgaatcagcccggaacctacttctgcagctgcccacctggctatatcctactggatgataaccggagttgccaggatattaacgaatgcgagcaccggaatcacacatgcaatttgcaacagacctgttataatcttcagggtggatttaagtgcattgaccctattagatgcgaagagccctacctgagaatcagcgacaacagatgtatgtgtcctgcagaaaacccaggttgccgcgatcaaccgtttacaatcctttacagagacatggacgtggtgagcggtcggtccgtgcctgcggatatattccaaatgcaggccacgacaagataccctggtgcctattacatcttccaaattaagtccggtaacgagggaagagagttctatatgcgccagaccggacctatttccgctacattggtgatgacccgccctattaagggacctcgcgaaatacagcttgacttagagatgatcaccgtcaataccgttatcaacttcagagggtcgagtgtgataagacttagaatctacgtttcacaatatccattttag

SEQ ID NO: 164014 - DNA, 276 bp, Artificial Sequence
  derived and/or modified sequence
atgcccggcatcaagcggatcctgaccgtgaccatcctggccctgtgcttgccctctcccggaaacgctcaagcacagtgcacaaacggattcgaccttgatcggcaaagcggccagtgcctcgacattgacgaatgccgcactattcctgaagcatgccgtggggatatgatgtgcgttaatcagaatgggggatacctgtgcattccgaggaccaacccggtgtatcggggaccatactctaacccctactcaacaccttattctggcccctag

SEQ ID NO: 164015 - DNA, 1347 bp, Artificial Sequence
  derived and/or modified sequence
atgcctggcatcaaacgtatactgaccgttaccatcctggccctctgtctgccaagccccggaaatgcacaagcccaatgcactaacggctttgatcttgaccggcagtctgggcaatgtctggacattgatgagtgcagaaccattccagaggcatgtcggggtgatatgatgtgcgtgaatcagaacgggggatacctgtgtattccccgtactaatcccgtttaccggggtccctattccaatccatatagcactccttactctgggccttatccagccgctgcgccacccctctccgcgccaaactaccccacaatttctcgcccactcatttgccggtttgggtaccaaatggacgaaagcaaccagtgcgttgatgtggatgagtgtgcaaccgattctcaccagtgtaatccaactcagatttgcatcaatactgagggaggatacacgtgttcctgcacagatggctactggctgctggagggccagtgccttgatattgatgagtgtagatatgggtactgccagcagctctgtgcaaatgttccagggagttacagctgcacatgcaatccaggctttaccctgaacgaagatggcagatcgtgccaggatgtcaatgaatgtgccacggaaaatccttgcgtgcagacctgcgttaacacatatggcagcttcatatgcaggtgcgatcctggatacgaactcgaggaggacggagtgcattgttctgacatggacgagtgttcctttagtgaattcctgtgtcagcatgagtgcgtaaaccaacctggcacgtatttctgcagctgccccccaggctacattctgttagacgacaaccgcagctgtcaagacattaatgaatgtgaacatcgtaatcatacatgcaacttacaacaaacttgctacaatctgcaaggcggatttaaatgcatagacccaatccgttgtgaagagccttacctcaggatttctgacaacagatgcatgtgcccagctgaaaacccaggttgcagggaccaaccctttaccattctgtaccgcgacatggacgtggtctcaggcaggagtgttcccgcagatattttccagatgcaggctactacacgctaccctggcgcttattacatctttcagattaagtccggtaacgaaggcagagaattttacatgagacagaccgggccaatctctgccaccctggtgatgacccgacctattaaggggccaagagaaatacagttggacctggagatgatcacagtcaacacggtgattaattttagggggagttcagtcatccgcctccggatttacgtgtcacaatatcctttctag

SEQ ID NO: 164016 - DNA, 276 bp, Artificial Sequence
  derived and/or modified sequence
atgcccggaatcaagcgaatcttaacggttactattctagccctctgtctgccgagtccaggcaacgctcaggcccaatgtaccaacggcttcgacctcgacagacaaagcggacagtgcctagacatcgacgaatgccggactattccagaggcatgccgaggtgacatgatgtgcgtcaaccagaatggaggctacttgtgtataccgaggactaatcctgtttacagaggcccatactccaatccttactcaactccatatagtggcccatag

SEQ ID NO: 164017 - DNA, 1347 bp, Artificial Sequence
  derived and/or modified sequence
atgcccggcatcaagagaatcctgaccgtgaccatcctggccctgtgcctgcccagccccggcaacgcccaggcccagtgcaccaacggcttcgacctggacagacagagcggccagtgcctggacatcgacgagtgcagaaccatccccgaggcctgcagaggcgacatgatgtgcgtgaaccagaacggcggctacctgtgcatccccagaaccaaccccgtgtacagaggcccctacagcaacccctacagcaccccctacagcggcccctaccccgccgccgccccccccctgagcgcccccaactaccccaccatcagcagacccctgatctgcagattcggctaccagatggacgagagcaaccagtgcgtggacgtggacgagtgcgccaccgacagccaccagtgcaaccccacccagatctgcatcaacaccgagggcggctacacctgcagctgcaccgacggctactggctgctggagggccagtgcctggacatcgacgagtgcagatacggctactgccagcagctgtgcgccaacgtgcccggcagctacagctgcacctgcaaccccggcttcaccctgaacgaggacggcagaagctgccaggacgtgaacgagtgcgccaccgagaacccctgcgtgcagacctgcgtgaacacctacggcagcttcatctgcagatgcgaccccggctacgagctggaggaggacggcgtgcactgcagcgacatggacgagtgcagcttcagcgagttcctgtgccagcacgagtgcgtgaaccagcccggcacctacttctgcagctgcccccccggctacatcctgctggacgacaacagaagctgccaggacatcaacgagtgcgagcacagaaaccacacctgcaacctgcagcagacctgctacaacctgcagggcggcttcaagtgcatcgaccccatcagatgcgaggagccctacctgagaatcagcgacaacagatgcatgtgccccgccgagaaccccggctgcagagaccagcccttcaccatcctgtacagagacatggacgtggtgagcggcagaagcgtgcccgccgacatcttccagatgcaggccaccaccagataccccggcgcctactacatcttccagatcaagagcggcaacgagggcagagagttctacatgagacagaccggccccatcagcgccaccctggtgatgaccagacccatcaagggccccagagagatccagctggacctggagatgatcaccgtgaacaccgtgatcaacttcagaggcagcagcgtgatcagactgagaatctacgtgagccagtaccccttctag

SEQ ID NO: 164018 - DNA, 276 bp, Artificial Sequence
  derived and/or modified sequence
atgcccggcatcaagagaatcctgaccgtgaccatcctggccctgtgcctgcccagccccggcaacgcccaggcccagtgcaccaacggcttcgacctggacagacagagcggccagtgcctggacatcgacgagtgcagaaccatccccgaggcctgcagaggcgacatgatgtgcgtgaaccagaacggcggctacctgtgcatccccagaaccaaccccgtgtacagaggcccctacagcaacccctacagcaccccctacagcggcccctag

SEQ ID NO: 164019 - protein, 230 aa, Artificial Sequence
  derived and/or modified sequence
MCGNNMSTPLPAIVPAARKATAAVIFLHGLGDTGHGWAEAFAGIRSSHIKYICPHAPVRPVTLNMNVAMPSWFDIIGLSPDSQEDESGIKQAAENIKALIDQEVKNGIPSNRIILGGFSQGGALSLYTALTTQQKLAGVTALSCWLPLRASFPQGPIGGANRDISILQCHGDCDPLVPLMFGSLTVEKLKTLVNPANVTFKTYEGMMHSSCQQEMMDVKQFIDKLLPPID

SEQ ID NO: 164020 - DNA, 693 bp, Artificial Sequence
  derived and/or modified sequence
atgtgcggcaataatatgtcaacgcccctccccgccattgtgccagccgcaagaaaggctactgccgctgttattttcttgcatggtctgggggatacaggccacggatgggccgaagctttcgccggcatacggtcctcacatattaaatatatctgcccccatgccccagtgcgccctgtaacactgaacatgaacgtggctatgccgagttggttcgacattattgggttatctccagatagccaggaggacgaatctggtatcaaacaggctgctgaaaatatcaaagccctgatcgatcaggaagtgaagaacggaatcccttctaaccggattattttggggggcttttcccaggggggcgcgctgagtctgtataccgcactgaccacccaacaaaagctggctggcgtgaccgctctatcttgctggctgccactccgggccagtttcccccaaggcccgattggcggtgctaatagagacatcagcattctccagtgccacggcgactgcgaccctttagttccgctgatgtttggtagtctgaccgtcgagaaactgaagacactcgtgaatcccgcgaatgtaacttttaaaacttacgaaggtatgatgcactcttcttgtcagcaggagatgatggatgttaagcagttcatagataaactgttgcctccaattgactag

SEQ ID NO: 164021 - DNA, 693 bp, Artificial Sequence
  derived and/or modified sequence
atgtgtggcaacaacatgagcacccccctgcctgccatcgtgcctgctgccaggaaggccacagctgctgtgatcttcctgcacggcctgggggacaccggccacggctgggccgaggcctttgctggcatccgcagcagccacatcaagtacatctgcccccacgcccctgtgcggcctgtgaccctgaacatgaatgtggccatgcccagctggtttgacatcatcggcctgagcccagacagccaggaggatgaaagtggcatcaagcaggccgctgagaacatcaaggccctgattgaccaggaggtgaagaatggcatccccagcaaccgcatcatcctgggcggcttcagccagggcggggccctgagcctgtacacagccctgaccacccagcagaagctggccggcgtgacagccctgagctgctggctgcccctgcgggccagcttcccccagggccccatcggcggggccaacagagacatcagcatcctgcagtgccacggggactgtgaccccctggtgcccctgatgtttggcagcctgactgtggagaagctgaagaccctggtgaacccagccaacgtgaccttcaagacctatgagggcatgatgcacagcagctgccagcaggagatgatggatgtgaagcagttcatcgacaagctgctgccccccattgattag

SEQ ID NO: 164022 - DNA, 2574 bp, Artificial Sequence
  derived and/or modified sequence
cggcgggcgaggggcagggcagggcggaccctggacgcgcgggcgcgcgcggaaggtagcgcggggccgcgttggcgcgcacgcgcctgagcgtgcgcccggtggggccggccgggactcgccgctcgcacgcccttgggccgcggccgggcgcccgctcttccttccgcttgcgctgtgagctgaggcggtgtatgtgcggcaataacatgtcaaccccgctgcccgccatcgtgcccgccgcccggaaggccaccgctgcggtgattttcctgcatggattgggagatactgggcacggatgggcagaagcctttgcaggtatcagaagttcacatatcaaatatatctgcccgcatgcgcctgttaggcctgttacattaaatatgaacgtggctatgccttcatggtttgatattattgggctttcaccagattcacaggaggatgaatctgggattaaacaggcagcagaaaatataaaagctttgattgatcaagaagtgaagaatggcattccttctaacagaattattttgggagggttttctcagggaggagctttatctttatatactgcccttaccacacagcagaaactggcaggtgtcactgcactcagttgctggcttccacttcgggcttcctttccacagggtcctatcggtggtgctaatagagatatttctattctccagtgccacggggattgtgaccctttggttcccctgatgtttggttctcttacggtggaaaaactaaaaacattggtgaatccagccaatgtgacctttaaaacctatgaaggtatgatgcacagttcgtgtcaacaggaaatgatggatgtcaagcaattcattgataaactcctacctccaattgattgacgtcactaagaggccttgtgtagaagtacaccagcatcattgtagtagagtgtaaaccttttcccatgcccagtcttcaaatttctaatgttttgcagtgttaaaatgttttgcaaatacatgccaataacacagatcaaataatatctcctcatgagaaatttatgatcttttaagtttctatacatgtattcttataagacgacccaggatctactatattagaatagatgaagcaggtagcttcttttttctcaaatgtaattcagcaaaataatacagtactgccaccagattttttattacatcatttgaaaattagcagtatgcttaatgaaaatttgttcaggtataaatgagcagttaagatataaacaatttatgcatgctgtgacttagtctatggatttattccaaaattgcttagtcaccatgcagtgtctgtatttttatatatgtgttcatatatacataatgattataatacataataagaatgaggtggtattacattattcctaataatagggataatgctgtttattgtcaagaaaaagtaaaatcgttctcttcaattaatggcccttttattttgggaccaggcttttattttccctgatattatttctatttaatactcttttctctcaagaaaaaaaaaaaagtttgttttttctttattgtccttcatagcaggccaagtattgcctctctgcaatagacagctactgtcaatacatgctgtaatttgacattctgggtcacagatataaggtatttaaaatctatttatgctttatagagaaaccagacattaaaacttcatgcactacttatttcgaattactgtaccttatccaaatttacacctagctattaggatcttcaacccaggtaacaggaataattctgtggtttcatttttctgtaaacaactgaaagaataattagatcatattctagtatgttctgaaatatctttaagactgatcttaaaaactaacttctaagatgatttcatcttctcatagtatagagtttactttgtacacgtttgaaaccaactactgtagaagatgaggaatctattgtaattttttgctttattttcatctgccagtggacttatttgaaattttcactttagtcaaattattttttgtattagtttttgatgcagacataaaaatagcaatcattttaaattgtcaaaatttccagattactggtaaaaattatttgaaaacaaacttatgggtaataaaggctagtcagaaccctataccataaagtgtagttaccatacagattaatatgtagcaaaaatgtatgcttgatatttctcaactgtgttaatttttctgctgtattccagctgaccaaaacaatattaagaatgcatctttataaatgggtgctaattgataatggaaataatttagtaatggactatacaggatgttaataatgaagccatatgtttatgtctggatttaaaaattttaaacaatcatttactatgtcatttttctttaccttgaagaacataaactgttatttcacttctacaaatcagcaagatattatttatggcaagaaatattccattgaaatattgtgctgtaacatgggaaagtgtaaatgtttttcatggtttctatcaatgtgaaataaaatttaattctga

SEQ ID NO: 164023 - DNA, 693 bp, Artificial Sequence
  derived and/or modified sequence
atgtgcggcaacaacatgagcacccccctgcccgccatcgtgcccgccgcaagaaaggcaacggctgcagtgattttcctacacgggctgggtgacacaggacacggatgggcagaggcatttgcgggcatcaggagttcacacattaagtacatttgtccccacgcacccgtgaggcctgtgaccctaaacatgaatgtggctatgccctcatggttcgacataatcgggctctcacccgattcccaagaggatgagtccggaatcaaacaggccgccgaaaacatcaaggcactgatcgatcaagaagtgaaaaatggcattccttccaacaggatcatcctcggcggcttctcacagggaggggcactgtccctctacactgccctgaccacacagcagaagttggccggagtaacagcattgagttgctggctgcccctgcgcgccagctttccccagggtccgattgggggagctaacagggacatttccatcctccagtgccacggagattgcgatcccctggtgcctctgatgttcggcagcctgacagtggaaaagctgaaaaccctggtgaatcctgcgaatgtcacatttaaaacctatgaaggaatgatgcatagtagctgccaacaggagatgatggacgtaaagcagtttatcgacaagctactgcctccgatagattag

SEQ ID NO: 164024 - DNA, 693 bp, Artificial Sequence
  derived and/or modified sequence
atgtgcgggaacaacatgagtacccctttgcctgcaattgtgccggctgctcggaaggccaccgccgctgtgatctttcttcatggactgggagacactggacacgggtgggctgaagcatttgccggtattagaagctcgcatataaagtacatctgccctcatgcccctgtcagacccgtgacactcaacatgaacgttgccatgccaagctggttcgacatcatcggtctcagtccggatagtcaagaggatgagagtggcataaagcaagcagcagagaatataaaagccctgatagatcaggaggtgaagaatggcatcccatctaacagaataatcctgggcggattttctcagggaggggctctctccctatataccgcgctgacgacacaacaaaagcttgccggtgtgactgctttgtcatgctggttgccactgcgggctagcttcccccaggggcctatcggtggcgcaaatcgggacatatcgatcctgcagtgccacggtgattgcgatccactcgtccccctaatgtttggatccctgactgtggagaagctgaaaaccctcgttaacccagccaacgtgaccttcaaaacttatgagggcatgatgcacagctcatgtcagcaggagatgatggatgttaagcagtttatcgacaaattacttcctcctatagactag

SEQ ID NO: 164025 - DNA, 693 bp, Artificial Sequence
  derived and/or modified sequence
atgtgcggcaacaacatgagcacccccctgcccgccatcgtgcccgccgccagaaaggccaccgccgccgtgatcttcctgcacggcctgggcgacaccggccacggctgggccgaggccttcgccggcatcagaagcagccacatcaagtacatctgcccccacgcccccgtgagacccgtgaccctgaacatgaacgtggccatgcccagctggttcgacatcatcggcctgagccccgacagccaggaggacgagagcggcatcaagcaggccgccgagaacatcaaggccctgatcgaccaggaggtgaagaacggcatccccagcaacagaatcatcctgggcggcttcagccagggcggcgccctgagcctgtacaccgccctgaccacccagcagaagctggccggcgtgaccgccctgagctgctggctgcccctgagagccagcttcccccagggccccatcggcggcgccaacagagacatcagcatcctgcagtgccacggcgactgcgaccccctggtgcccctgatgttcggcagcctgaccgtggagaagctgaagaccctggtgaaccccgccaacgtgaccttcaagacctacgagggcatgatgcacagcagctgccagcaggagatgatggacgtgaagcagttcatcgacaagctgctgccccccatcgactag

SEQ ID NO: 164026 - protein, 244 aa, Artificial Sequence
  derived and/or modified sequence
MAAPSDGFKPRERSGGEQAQDWDALPPKRPRLGAGNKIGGRRLIVVLEGASLETVKVGKTYELLNCDKHKSILLKNGRDPGEARPDITHQSLLMLMDSPLNRAGLLQVYIHTQKNVLIEVNPQTRIPRTFDRFCGLMVQLLHKLSVRAADGPQKLLKVIKNPVSDHFPVGCMKVGTSFSIPVVSDVRELVPSSDPIVFVVGAFAHGKVSVEYTEKMVSISNYPLSAALTCAKLTTAFEEVWGVI

SEQ ID NO: 164027 - DNA, 735 bp, Artificial Sequence
  derived and/or modified sequence
atggccgcccccagcgacggcttcaagcccagagagagaagcggcggcgagcaggcccaggactgggacgccctgccccccaagagacccagactgggcgccggcaacaagatcggcggcagaagactgatcgtggtgctggagggcgccagcctggagaccgtgaaggtgggcaagacctacgagctgctgaactgcgacaagcacaagagcatcctgctgaagaacggcagagaccccggcgaggccagacccgacatcacccaccagagcctgctgatgctgatggacagccccctgaacagagccggcctgctgcaggtgtacatccacacccagaagaacgtgctgatcgaggtgaacccccagaccagaatccccagaaccttcgacagattctgcggcctgatggtgcagctgctgcacaagctgagcgtgagagccgccgacggcccccagaagctgctgaaggtgatcaagaaccccgtgagcgaccacttccccgtgggctgcatgaaggtgggcaccagcttcagcatccccgtggtgagcgacgtgagagagctggtgcccagcagcgaccccatcgtgttcgtggtgggcgccttcgcccacggcaaggtgagcgtggagtacaccgagaagatggtgagcatcagcaactaccccctgagcgccgccctgacctgcgccaagctgaccaccgccttcgaggaggtgtggggcgtgatctag

SEQ ID NO: 164028 - DNA, 735 bp, Artificial Sequence
  derived and/or modified sequence
atggcagcaccgtctgatgggttcaagcccagggagcgctcgggcggcgagcaggcccaggattgggacgcgctgccacctaagcgcccacggctgggcgcaggcaataagattggcggccggaggttgatcgttgtcctggagggtgccagtctcgagactgtcaaagtgggcaaaacgtatgagctcttaaattgtgataaacacaaatcaatcttgctgaaaaacgggcgtgatcccggagaagctcggcccgacataacccaccagtccctgctgatgttgatggactcccctcttaatcgagcaggtctcttacaggtgtacattcatacacagaagaacgtcttaatcgaggtcaatccacagaccaggattcctcgtaccttcgatcggttctgcgggctgatggtccaactgttgcacaaactctctgtaagggcggccgatggccctcagaaactgctgaaggtaatcaagaaccctgtttctgaccatttccctgtggggtgtatgaaagtgggaacctccttttctatccctgtggtctctgacgtccgtgagctagttcccagtagcgaccctatagtgttcgtagtgggtgccttcgcgcatgggaaggtctcggtcgagtatactgagaaaatggtgtccatctccaattaccccctcagcgcagcactgacttgtgcaaaactgaccaccgcattcgaggaagtttggggagttatatag

SEQ ID NO: 164029 - DNA, 735 bp, Artificial Sequence
  derived and/or modified sequence
atggccgcccccagtgatggcttcaagccccgggagaggtctggaggagagcaggcccaggactgggatgccctgccccccaagaggccccggctgggcgccggcaacaagattggaggaagaagactcatcgtggtgctggagggcgccagcctggagaccgtgaaggtgggcaagacctatgagctgctgaactgtgacaagcacaagagcatcctgctgaagaatggccgggaccccggggaggcccggccagacatcacccaccagagcctgctgatgctgatggacagccccctgaacagagctggcctgctgcaggtgtacatccacacccagaagaatgtgctgattgaggtgaacccccagacccgcatccccaggacctttgaccgcttctgtggcctgatggtgcagctgctgcacaagctgtctgtgcgggctgctgatggcccccagaagctgctgaaggtgatcaagaaccctgtgtctgaccacttccctgtgggctgcatgaaggtgggcaccagcttcagcatccctgtggtgtctgatgtgcgggagctggtgcccagcagtgaccccatcgtgtttgtggtgggcgcctttgcccacggcaaggtgtctgtggagtacacagagaagatggtgtccatcagcaactaccccctgtctgctgccctgacctgtgccaagctgaccacagcctttgaggaggtgtggggcgtcatctag

SEQ ID NO: 164030 - DNA, 735 bp, Artificial Sequence
  derived and/or modified sequence
atggccgcccccagcgacggcttcaagccccgggagcggagcggcggcgagcaagctcaggattgggacgctctgcctcctaaaaggcctcgattgggtgccggcaataagatcggggggaggaggctcattgtggtgctggaaggcgcatccctggaaaccgtcaaagtgggtaaaacatatgaactccttaattgtgacaagcataagtcgatcttgttgaaaaatgggcgcgaccccggcgaagcccggccggacatcacacaccagtcgctcctgatgttgatggatagcccccttaatagagcaggattgctgcaagtatacatccacacgcaaaagaacgttctgattgaggtcaatcctcagacacggatccctcgcacattcgacagattctgcgggctaatggtccagctgctccacaagctcagcgtcagggcagctgatggacctcagaagctattaaaggtgattaaaaaccccgtgtccgaccatttccctgtcggctgcatgaaggtgggaacctccttttccatcccagttgtgtcagacgtgcgcgaactcgtaccgtcttccgatcccatcgttttcgtggtgggcgcatttgcccatgggaaagtttccgttgagtatacagaaaagatggtcagtatctccaattatcccctgagtgcagccctgacctgcgccaagctgacaaccgcctttgaggaagtgtggggggtgatctag

SEQ ID NO: 164031 - DNA, 735 bp, Artificial Sequence
  derived and/or modified sequence
atggccgcaccaagcgacggctttaagcccagagagcgatctggtggggagcaggctcaggactgggacgcattgccaccaaagcggccacgtttgggcgctggaaataagattggtggacgcaggctgatcgtcgtccttgagggggcaagcctggagactgtgaaagttggtaagacttatgaattgctgaactgcgataaacacaaatcgatactccttaaaaatggacgcgaccctggggaagcgagacccgacattacacatcaatcactgctgatgctgatggattctccactgaatagagctggcctgctccaggtgtacattcatactcagaagaatgtgctgatcgaggtgaatccacaaacccgcatacccagaacatttgatcgtttctgcggcttgatggtgcagctgctgcataagctttctgtgcgcgcagcagatggccctcagaaactcctgaaagtgattaagaaccctgtatcagatcatttccccgtcggatgtatgaaagtaggaacctccttcagcatacccgttgtgtcagatgtgagagagcttgtgccctccagcgatcccatcgttttcgtcgtgggtgcttttgcccatggaaaagtgtcagtggagtacaccgaaaaaatggtgtctatcagtaattaccctctgtccgcggctctgacttgtgctaagctgaccactgcctttgaggaggtttggggcgttatttag

SEQ ID NO: 164032 - DNA, 1072 bp, Artificial Sequence
  derived and/or modified sequence
ctcccagggagggcagcgcaagacagcaagtcatctccatttcctggcccactttcaaaatggcagccggaaggaaatttgtgattagaagccgcgctgttcttatttaagagcgttagcgcaacttccggtattgttgcaagatggccgcgcccagtgatggattcaagcctcgtgaacgaagcggtggggagcaggcacaggactgggatgctctgccacccaagcggccccgactaggggcaggaaacaagatcggaggccgtaggcttattgtggtgctggaaggggccagtctggagacagtcaaggtagggaagacatatgagctactcaactgtgacaagcacaagtctatattgttgaagaatggacgggaccctggggaagcgcggccagatatcacccaccagagtttgctgatgctgatggatagtcccctgaaccgagctggcttgctacaggtttatatccatacacagaagaatgttctgattgaagtgaatccccagacccgaattcccagaacctttgaccgcttttgtggcctcatggttcaacttttacacaagctcagtgttcgagcagctgatggcccccagaagcttttgaaggtaattaagaatccagtatcagatcactttccagttggatgtatgaaagttggcacttctttttccatcccggttgtcagtgatgtgcgtgagctggtgcccagcagtgatcctattgtttttgtggtaggggcctttgcccatggcaaggtcagtgtggagtatacagagaagatggtgtccatcagtaactaccccctttctgctgccctcacctgtgcaaaacttaccacagcctttgaggaagtatggggggtcatttgacagtagtagaacctgttctgaaaccagaaactgttgatgtcacatcctttgaccctggtctgagctgactgctggaagatgatctttctgcactgagactgtggagtttggggaagccaaggctgtacatttgctatttgtttatcctatgaatactgttcttgcaaacctggttgttttggggttcctaaagt

SEQ ID NO: 164033 - protein, 250 aa, Artificial Sequence
  derived and/or modified sequence
MTLSPLLLFLPPLLLLLDVPTAAVQASPLQALDFFGNGPPVNYKTGNLYLRGPLKKSNAPLVNVTLYYEALCGGCRAFLIRELFPTWLLVMEILNVTLVPYGNAQEQNVSGRWEFKCQHGEEECKFNKVEACVLDELDMELAFLTIVCMEEFEDMERSLPLCLQLYAPGLSPDTIMECAMGDRGMQLMHANAQRTDALQPPHEYVPWVTVNGKPLEDQTQLLTLVCQLYQGKKPDVCPSSTSSLRSVCFK

SEQ ID NO: 164034 - DNA, 753 bp, Artificial Sequence
  derived and/or modified sequence
atgaccctctccccgttgctgttgttcttgccaccgctcctgctgttgttggacgtccccactgcagccgtacaagctagccccctgcaagcattagacttcttcggaaatggcccccccgtgaactacaaaactgggaacttatacctgcgcggacctctgaagaaatccaacgctccacttgtaaacgtcaccctgtattacgaagctctgtgtggtggctgtagggcatttctgatccgagaactgtttccaacttggctgctcgttatggagattcttaatgtcaccctcgtgccatacggcaacgcccaggaacagaatgtgtccggtagatgggaattcaaatgtcagcatggggaggaggaatgcaagttcaacaaagtagaagcctgcgtcctcgatgaactcgatatggagttggcttttctgacaatagtgtgtatggaggagtttgaagatatggaacgttccttacccctgtgtctccagttatacgcccccgggctaagtcccgacactattatggagtgtgctatgggggatcggggcatgcagctgatgcacgccaatgcgcagcgcaccgacgccctgcagccaccacacgagtacgtgccatgggtgaccgttaacggcaaacctctggaggaccagacccagctgctgacgctcgtgtgccaactgtatcagggtaagaaaccagacgtgtgcccctcctctacttcaagcttgaggagcgtttgctttaaatag

SEQ ID NO: 164035 - DNA, 1032 bp, Artificial Sequence
  derived and/or modified sequence
ggaccgccgcctggttaaaggcgcttatttcccaggcagccgctgcagtcgccacacctttgcccctgctgcgatgaccctgtcgccacttctgctgttcctgccaccgctgctgctgctgctggacgtccccacggcggcggtgcaggcgtcccctctgcaagcgttagacttctttgggaatgggccaccagttaactacaagacaggcaatctatacctgcgggggcccctgaagaagtccaatgcaccgcttgtcaatgtgaccctctactatgaagcactgtgcggtggctgccgagccttcctgatccgggagctcttcccaacatggctgttggtcatggagatcctcaatgtcacgctggtgccctacggaaacgcacaggaacaaaatgtcagtggcaggtgggagttcaagtgccagcatggagaagaggagtgcaaattcaacaaggtggaggcctgcgtgttggatgaacttgacatggagctagccttcctgaccattgtctgcatggaagagtttgaggacatggagagaagtctgccactatgcctgcagctctacgccccagggctgtcgccagacactatcatggagtgtgcaatgggggaccgcggcatgcagctcatgcacgccaacgcccagcggacagatgctctccagccaccacacgagtatgtgccctgggtcaccgtcaatgggaaacccttggaagatcagacccagctccttacccttgtctgccagttgtaccagggcaagaagccggatgtctgcccttcctcaaccagctccctcaggagtgtttgcttcaagtgatggccggtgagctgcggagagctcatggaaggcgagtgggaacccggctgcctgcctttttttctgatccagaccctcggcacctgctacttaccaactggaaaattttatgcatcccatgaagcccagatacacaaaattccaccccatgatcaagaatcctgctccactaagaatggtgctaaagtaaaactagtttaataagc

SEQ ID NO: 164036 - DNA, 753 bp, Artificial Sequence
  derived and/or modified sequence
atgaccctgagccccctgctgctcttcctgccccccctgctgctgctgctggatgtgcccacagctgctgtgcaggccagccccctgcaggccctggacttctttggaaatggacctcctgtgaactacaagacaggcaacctgtacctgcggggccccctgaagaagagcaatgcccccctggtgaatgtgaccctgtactatgaggccctgtgtggcggctgccgggccttcctgatccgggagctgttccccacctggctgctggtgatggagatcctgaatgtgaccctggtgccctatggaaatgcccaggagcagaatgtgtctggccgctgggagttcaagtgccagcacggggaggaggagtgcaagttcaacaaggtggaggcctgtgtgctggatgagctggacatggagctggccttcctgaccatcgtgtgcatggaggagtttgaggacatggagaggagcctgcccctgtgcctgcagctgtatgcccctggcctgagcccagacaccatcatggagtgtgccatgggagaccggggcatgcagctgatgcacgccaatgcccagaggacagatgccctgcagccccctcatgaatatgtgccctgggtgacagtgaatggcaagcccctggaggaccagacccagctgctgaccctggtgtgccagctgtaccagggcaagaagccagatgtgtgccccagcagcaccagcagcctgcggtctgtgtgcttcaagtag

SEQ ID NO: 164037 - DNA, 753 bp, Artificial Sequence
  derived and/or modified sequence
atgaccctgagccccctgctgctgttcctgccccccctgctgctgctgcttgatgtgcctactgcggccgtacaggccagccctctgcaggctctggatttttttggtaatgggcccccagtgaattataagaccgggaatttgtatctgagagggccgctgaagaaatccaatgctcctttggtgaacgtgactctatactacgaagccctgtgcgggggttgtagagccttcttaattagggagctgttcccgacatggttattggtcatggagatacttaacgtgacgcttgtcccttacgggaatgcccaagagcagaacgtctccggcagatgggagtttaagtgccagcacggcgaggaggaatgcaagtttaacaaagttgaagcctgtgtgttggacgagctcgatatggaactcgcttttttgaccatagtgtgcatggaggagttcgaagatatggaaagaagcctgcctctgtgcctgcagttatatgcccccggcctgtcacccgacacaatcatggaatgtgcaatgggcgatcggggaatgcagctgatgcacgctaacgcccaacgaacagacgcgttgcagcctccacacgagtacgtaccttgggtcaccgtaaacgggaagcccctagaagatcagacacagcttttgacattagtctgccagctgtaccagggcaagaagccagacgtttgcccgtcttcaaccagctctcttcgctcagtttgctttaaatag

SEQ ID NO: 164038 - DNA, 753 bp, Artificial Sequence
  derived and/or modified sequence
atgacgctttccccactcctcctttttttgccaccacttctgttgctgctggacgtgcctaccgccgctgtccaggcctcacccctgcaggcactggacttctttggcaatggtcctcctgtcaactataagaccgggaatctatacctgaggggacctcttaagaaatctaatgcaccacttgtgaacgtgaccctgtactatgaagccttgtgcggcggatgcagggcatttctaattcgggaattgttcccgacatggctgcttgtgatggaaatcctcaacgtgaccctggtgccttacgggaatgctcaagagcagaacgtctctgggcgatgggagttcaagtgccagcacggcgaggaggagtgcaagtttaataaggtggaggcttgcgtattggacgaactggacatggagctggccttcctgactatagtgtgcatggaagagttcgaagacatggagcgctccctgcccttatgtttgcagttgtatgccccaggattatctccggatacaattatggagtgcgccatgggcgaccggggtatgcaacttatgcacgctaacgcacagcgtacagatgcactgcaaccaccccatgagtacgtgccttgggtcaccgtcaatgggaagccgctggaagaccagacacaactcctgacccttgtgtgccagctttaccagggaaagaagcccgacgtgtgtccttcgagcacgagctctctgagaagtgtctgcttcaaatag

SEQ ID NO: 164039 - DNA, 753 bp, Artificial Sequence
  derived and/or modified sequence
atgaccctgagccccctgctgctgttcctgccccccctgctgctgctgctggacgtgcccaccgccgccgtgcaggccagccccctgcaggccctggacttcttcggcaacggcccccccgtgaactacaagaccggcaacctgtacctgagaggccccctgaagaagagcaacgcccccctggtgaacgtgaccctgtactacgaggccctgtgcggcggctgcagagccttcctgatcagagagctgttccccacctggctgctggtgatggagatcctgaacgtgaccctggtgccctacggcaacgcccaggagcagaacgtgagcggcagatgggagttcaagtgccagcacggcgaggaggagtgcaagttcaacaaggtggaggcctgcgtgctggacgagctggacatggagctggccttcctgaccatcgtgtgcatggaggagttcgaggacatggagagaagcctgcccctgtgcctgcagctgtacgcccccggcctgagccccgacaccatcatggagtgcgccatgggcgacagaggcatgcagctgatgcacgccaacgcccagagaaccgacgccctgcagcccccccacgagtacgtgccctgggtgaccgtgaacggcaagcccctggaggaccagacccagctgctgaccctggtgtgccagctgtaccagggcaagaagcccgacgtgtgccccagcagcaccagcagcctgagaagcgtgtgcttcaagtag

SEQ ID NO: 164040 - DNA, 408 bp, Artificial Sequence
  derived and/or modified sequence
atgcccggtagatggcgttggcagcgggacatgcacccagcccgaaaactcctgtcacttttgtttctcatcctcatgggcaccgagctcacacaagtgctgccaacgaaccctgaggaatcttggcaggtttattcaagtgcccaggacagtgaggggcgatgtatctgcactgttgtggcgccccagcagacaatgtgttccagggacgctagaaccaagcagctgagacaactgttggagaaggtgcagaacatgtctcaatcaattgaagtccttgaccggcgcacgcaacgtgaccttcaatatgtcgaaaaaatggagaaccaaatgaaaggtcttgagagcaagtttaagcaggttgaggaaagccacaaacagcacctggcgcggcagtttaaaggatag

SEQ ID NO: 164041 - DNA, 408 bp, Artificial Sequence
  derived and/or modified sequence
atgcctggccgctggcgctggcagagggacatgcacccagccaggaagctgctgagcctgctcttcctgatcctgatgggcacagagctgacccaggtgctgcccaccaaccctgaggagagctggcaggtgtacagcagcgcccaggacagcgagggccgctgcatctgcaccgtggtggccccccagcagaccatgtgcagcagagatgcccggaccaagcagctgcggcagctgctggagaaggtgcagaacatgagccagagcattgaggtgctggacaggaggacccagagggacctgcagtatgtggagaagatggagaaccagatgaagggcctggagagcaagttcaagcaggtggaggagagccacaagcagcacctggcccggcagttcaagggctag

SEQ ID NO: 164042 - DNA, 408 bp, Artificial Sequence
  derived and/or modified sequence
atgcccggccggtggcggtggcagcgggacatgcaccccgcccggaagctgctctccctgctgtttcttatcttaatggggaccgaactgacacaggtgctccccacaaaccccgaggagagctggcaggtctatagttcggcacaggattccgaaggcagatgcatctgcacagttgtcgccccccagcagacaatgtgtagccgagacgcccgcactaagcaacttcggcagcttttggaaaaagtacagaacatgagtcagtctattgaggtcctagatcgcaggactcagcgtgacttgcagtatgtcgagaaaatggagaaccaaatgaagggtttggaaagcaagtttaaacaggtagaagagtctcataaacaacaccttgccaggcagttcaaggggtag

SEQ ID NO: 164043 - DNA, 1014 bp, Artificial Sequence
  derived and/or modified sequence
gcgcgggggagccattaggaggcgaggagagaggagggcgcagctcccgcccagcccagccctgcccagccctgcccggaggcagacgcgccggaaccgggacgcgataaatatgcagagcggaggcttcgcgcagcagagcccgcgcgccgcccgctccgggtgctgaatccaggcgtggggacacgagccaggcgccgccgccggagccagcggagccggggccagagccggagcgcgtccgcgtccacgcagccgccggccggccagcacccagggccctgcatgccaggtcgttggaggtggcagcgagacatgcacccggcccggaagctcctcagcctcctcttcctcatcctgatgggcactgaactcactcaagtgctgcccaccaaccctgaggagagctggcaggtgtacagctctgcccaggacagcgagggcaggtgtatctgcacagtggtcgctccacagcagaccatgtgttcacgggatgcccgcacaaaacagctgaggcagctactggagaaggtgcagaacatgtctcaatccatagaggtcttggacaggcggacccagagagacttgcagtacgtggagaagatggagaaccaaatgaaaggactggagtccaagttcaaacaggtggaggagagtcataagcaacacctggccaggcagtttaagggctaacttaaaagagttttttcaatgctgcagtgactgaagaagcagtccactcccatgtaaccatgaaagagagccagagagctttttgcaccatgcatttttactattattttccaatacttagcaccatttcactaaggaaccttgaatacaaccaggatcctcctttgcatgcgactgtagctgcatttcatgaatagtttgaacccttgtcaatgcattttttgaaaaagaaagaaaaaaaaaacttcgtgtatgtgactcaaagcatgtaaccttaagatgttgcattctaaactgacaataaagacctttcccaaatat

SEQ ID NO: 164044 - DNA, 408 bp, Artificial Sequence
  derived and/or modified sequence
atgcctgggagatggaggtggcaacgggacatgcatcccgctcggaagctcttatccctgctgtttctgattctcatgggcacggagctaacccaggttttgcccactaacccagaagaaagctggcaggtgtactcctccgcccaggacagcgagggacgctgcatctgtacagtggtcgctccgcaacagacaatgtgctcaagagatgccaggacaaagcaactgaggcagcttctagagaaggtccagaatatgtctcaatcaattgaggtacttgacaggcggacccagagggacctgcagtacgttgaaaaaatggagaaccagatgaaaggactcgagagtaaatttaagcaggtggaagaatctcataagcagcacctggctcgccagttcaaggggtag

SEQ ID NO: 164045 - DNA, 408 bp, Artificial Sequence
  derived and/or modified sequence
atgccaggcagatggaggtggcagagagatatgcatcctgctaggaagttacttagcctattgtttctgatcctgatgggaactgaacttacccaggtactgcccaccaatcccgaagaatcatggcaggtctacagcagcgctcaagatagcgaaggcaggtgtatctgtacagtcgtagcacctcaacaaaccatgtgttctcgagacgccaggacaaagcaattgcgacagctgttagagaaggtacagaacatgagccagtcaatcgaagtactcgaccggcgaacccagcgggatctacaatatgttgaaaaaatggaaaatcagatgaagggcctggaaagtaagtttaaacaggtggaggagtcccacaaacagcacctcgctcggcagttcaaaggatag

SEQ ID NO: 164046 - DNA, 408 bp, Artificial Sequence
  derived and/or modified sequence
atgccaggcagatggaggtggcagagagatatgcatcctgctaggaagttacttagcctattgtttctgatcctgatgggaactgaacttacccaggtactgcccaccaatcccgaagaatcatggcaggtctacagcagcgctcaagatagcgaaggcaggtgtatctgtacagtcgtagcacctcaacaaaccatgtgttctcgagacgccaggacaaagcaattgcgacagctgttagagaaggtacagaacatgagccagtcaatcgaagtactcgaccggcgaacccagcgggatctacagtatgtggagaagatggagaaccagatgaaggggttagagagtaaattcaagcaggtcgaagagagtcacaagcaacacctggcgagacagtttaaagggtag

SEQ ID NO: 164047 - DNA, 408 bp, Artificial Sequence
  derived and/or modified sequence
atgcccggcagatggagatggcagagagacatgcaccccgccagaaagctgctgagcctgctgttcctgatcctgatgggcaccgagctgacccaggtgctgcccaccaaccccgaggagagctggcaggtgtacagcagcgcccaggacagcgagggcagatgcatctgcaccgtggtggccccccagcagaccatgtgcagcagagacgccagaaccaagcagctgagacagctgctggagaaggtgcagaacatgagccagagcatcgaggtgctggacagaagaacccagagagacctgcagtacgtggagaagatggagaaccagatgaagggcctggagagcaagttcaagcaggtggaggagagccacaagcagcacctggccagacagttcaagggctag

SEQ ID NO: 164048 - protein, 171 aa, Artificial Sequence
  derived and/or modified sequence
MEEYAREPCPWRIVDDCGGAFTMGTIGGGIFQAIKGFRNSPVGVNHRLRGSLTAIKTRAPQLGGSFAVWGGLFSMIDCSMVQVRGKEDPWNSITSGALTGAILAARNGPVAMVGSAAMGGILLALIEGAGILLTRFASAQFPNGPQFAEDPSQLPSTQLPSSPFGDYRQYQ

SEQ ID NO: 164049 - DNA, 516 bp, Artificial Sequence
  derived and/or modified sequence
atggaggagtacgccagagagccctgcccctggagaatcgtggacgactgcggcggcgccttcaccatgggcaccatcggcggcggcatcttccaggccatcaagggcttcagaaacagccccgtgggcgtgaaccacagactgagaggcagcctgaccgccatcaagaccagagccccccagctgggcggcagcttcgccgtgtggggcggcctgttcagcatgatcgactgcagcatggtgcaggtgagaggcaaggaggacccctggaacagcatcaccagcggcgccctgaccggcgccatcctggccgccagaaacggccccgtggccatggtgggcagcgccgccatgggcggcatcctgctggccctgatcgagggcgccggcatcctgctgaccagattcgccagcgcccagttccccaacggcccccagttcgccgaggaccccagccagctgcccagcacccagctgcccagcagccccttcggcgactacagacagtaccagtag

SEQ ID NO: 164050 - DNA, 516 bp, Artificial Sequence
  derived and/or modified sequence
atggaagaatacgccagagaaccatgcccgtggagaatagtggatgactgtggcggtgctttcacaatgggtaccattggcggcggaatctttcaggccataaagggctttcgaaactccccagtcggggtgaaccacaggttgcgcggaagtctaacagccatcaagacacgggccccgcagctcggaggatcttttgcagtgtggggcggactgtttagtatgattgactgcagcatggtccaggtacgagggaaagaggacccatggaatagcataacctctggcgcccttacaggcgcaatattggctgcccgtaacggccccgtggccatggtgggcagtgcagctatgggcggcatcctgctggccctcatagagggtgctggcattctgcttactaggttcgcctccgcacagttcccaaacggtcctcagttcgcagaggaccctagtcaattgcccagtacccagctgccctcctctcctttcggtgactatagacagtaccaatag

SEQ ID NO: 164051 - DNA, 516 bp, Artificial Sequence
  derived and/or modified sequence
atggaggagtatgcccgggagccctgcccctggagaattgtggatgactgtggcggggccttcaccatgggcaccatcggcggcggcatcttccaggccatcaagggcttcaggaacagccctgtgggcgtgaaccaccggctgcggggcagcctgacagccatcaagacccgggccccccagctgggcggcagctttgctgtgtggggcggcctcttctccatgattgactgcagcatggtgcaggtgcggggcaaggaggacccctggaacagcatcaccagcggggccctgactggagccatcctggccgccagaaatggacctgtggccatggtgggcagcgctgccatgggcggcatcctgctggccctgattgagggcgccggcatcctgctgaccaggtttgccagcgcccagttccccaacggcccccagtttgctgaggaccccagccagctgcccagcacccagctgcccagcagcccctttggagactaccggcagtaccagtag

SEQ ID NO: 164052 - DNA, 516 bp, Artificial Sequence
  derived and/or modified sequence
atggaggagtacgcccgggagccctgcccctggcggatcgtggacgattgtgggggtgccttcacaatgggtaccattggcggtgggattttccaggccataaagggcttcaggaacagccctgtgggagttaatcatcgactgaggggatctcttacagctatcaaaaccagggcgcctcagctcggcggcagcttcgcggtctggggagggctttttagcatgatcgattgttccatggtccaggtgagaggcaaggaagacccttggaacagcatcactagcggggcccttacaggcgcgatactggctgccagaaacggcccagtggcaatggtgggctctgctgccatggggggtattttactcgccttaattgagggagccggcattctccttacgcggtttgccagcgctcaattccccaacggacctcagttcgccgaagatccatcacagctgccttcaactcaactgccgtcctctcccttcggggactacagacagtaccaatag

SEQ ID NO: 164053 - DNA, 516 bp, Artificial Sequence
  derived and/or modified sequence
atggaagagtatgccagagaaccttgtccatggcgtattgtcgatgattgtggcggagctttcacaatggggactattggaggaggtatttttcaggcaataaagggatttagaaatagcccagtgggtgtgaatcacagactcagaggcagcctcacagcaatcaaaaccagagctcctcagctggggggatcattcgcggtgtggggaggattgttctcaatgatcgattgcagcatggttcaagtgcgtggtaaagaggacccgtggaattcaatcacctcgggagccctgacaggagccattcttgctgccaggaacggccctgtagcgatggtcggctcagctgctatgggcggaattctgctcgccttaattgaaggggctggaatccttctgacaaggtttgccagtgcccagtttccgaacggccctcagtttgctgaggacccctcacagctcccgagcacacagttgccttcctccccttttggggattaccgccagtaccagtag

SEQ ID NO: 164054 - DNA, 1659 bp, Artificial Sequence
  derived and/or modified sequence
agcttgcccggcatcactcgcggcattggagtcaagatggaggagtacgcgcgagagccttgcccatggcgaattgtggatgactgtggtggggcctttacgatgggtaccattggtggtggtatctttcaagcaatcaaaggttttcgcaattctccagtgggagtaaaccacagactacgagggagtttgacagctattaaaaccagggctccacagttaggaggtagctttgcagtttggggagggctgttttccatgattgactgtagtatggttcaagtcagaggaaaggaagatccctggaactccatcacaagtggtgccttaacgggagccatactggcagcaagaaatggaccagtggccatggttgggtcagccgcaatgggtggcattctcctagctttaattgaaggagctggtatcttgttgacaagatttgcctctgcacagtttcccaatggtcctcagtttgcagaagacccctcccagttgccttcaactcagttaccttcctcaccttttggagactatcgacaatatcagtaggacttctttcctaggatttctttaacagaacgagttgtggttcgagaaggatttcagaagatcaagttacagtctgtttttaaaaccataggtgggacagctatggccaataggctataaagagacatttagcacttttttctatttaaaggaacaagcggggaagggtgctaaaagataatacgtttatttattcacacttgaattgcatttgtgatcaaaataaatgtttaaatcgctaaaggaaaatacagtaagtgcttgaaagatgaaggaccaaaaggccaaaaaacagtgaaatatgatcatcatctccttgcggacttctctgcctggttttgtgtgttctgttattcaaacaataaaaagctggtggaacttactctttcttttaagataagttgtagacttcgatgtttcatgctcatgtacttcaaataatgcatgttttatagttagtccctcatcacttgaagtgacttctgagaattatgcagagtcaacatggatcatttcacagtgagatgctttatggattgaaggatatggtaaaatgtttatagtttactttgaaagtaaaatatactatgtcttggttttgaggatattggatacaaaactctcttcctttagggctactgagtcttgattcctgatcatcagaaatttcaccagaaacaacttgcttccaatatacccaattctatatgaagaattcatggagagtgtactggcactggaagagtttagtgtttcttgtatgcttgaaaataaagtatgtactgttttgaatgtgttccaagtcctctgcataaacgatgtattttggggtctggttgggcctggaaaatggatgagcacttcagaacaggtcattttcctgatattggaagtgacatgtggccctataggaggcatgatgttagttaattacacatttgcctacatctgtgggaaatggagaacaaagccatgtgggtactgtaaacacacgtttatcttttggcccaatgccatacatatggtaggcatttaattactgattgtgtttggataatttgggaattttcgactgtggtaaaatatacataaaataatacttattaa

SEQ ID NO: 164055 - protein, 713 aa, Artificial Sequence
  derived and/or modified sequence
MRLLVAPLLLAWVAGATAAVPVVPWHVPCPPQCACQIRPWYTPRSSYREATTVDCNDLFLTAVPPALPAGTQTLLLQSNSIVRVDQSELGYLANLTELDLSQNSFSDARDCDFHALPQLLSLHLEENQLTRLEDHSFAGLASLQELYLNHNQLYRIAPRAFSGLSNLLRLHLNSNLLRAIDSRWFEMLPNLEILMIGGNKVDAILDMNFRPLANLRSLVLAGMNLREISDYALEGLQSLESLSFYDNQLARVPRRALEQVPGLKFLDLNKNPLQRVGPGDFANMLHLKELGLNNMEELVSIDKFALVNLPELTKLDITNNPRLSFIHPRAFHHLPQMETLMLNNNALSALHQQTVESLPNLQEVGLHGNPIRCDCVIRWANATGTRVRFIEPQSTLCAEPPDLQRLPVREVPFREMTDHCLPLISPRSFPPSLQVASGESMVLHCRALAEPEPEIYWVTPAGLRLTPAHAGRRYRVYPEGTLELRRVTAEEAGLYTCVAQNLVGADTKTVSVVVGRALLQPGRDEGQGLELRVQETHPYHILLSWVTPPNTVSTNLTWSSASSLRGQGATALARLPRGTHSYNITRLLQATEYWACLQVAFADAHTQLACVWARTKEATSCHRALGDRPGLIAILALAVLLLAAGLAAHLGTGQPRKGVGGRRPLPPAWAFWGWSAPSVRVVSAPLVLPWNPGRKLPRSSEGETLLPPLSQNS

SEQ ID NO: 164056 - DNA, 2142 bp, Artificial Sequence
  derived and/or modified sequence
atgagactgctggtggcccccctgctgctggcctgggtggccggcgccaccgccgccgtgcccgtggtgccctggcacgtgccctgccccccccagtgcgcctgccagatcagaccctggtacacccccagaagcagctacagagaggccaccaccgtggactgcaacgacctgttcctgaccgccgtgccccccgccctgcccgccggcacccagaccctgctgctgcagagcaacagcatcgtgagagtggaccagagcgagctgggctacctggccaacctgaccgagctggacctgagccagaacagcttcagcgacgccagagactgcgacttccacgccctgccccagctgctgagcctgcacctggaggagaaccagctgaccagactggaggaccacagcttcgccggcctggccagcctgcaggagctgtacctgaaccacaaccagctgtacagaatcgcccccagagccttcagcggcctgagcaacctgctgagactgcacctgaacagcaacctgctgagagccatcgacagcagatggttcgagatgctgcccaacctggagatcctgatgatcggcggcaacaaggtggacgccatcctggacatgaacttcagacccctggccaacctgagaagcctggtgctggccggcatgaacctgagagagatcagcgactacgccctggagggcctgcagagcctggagagcctgagcttctacgacaaccagctggccagagtgcccagaagagccctggagcaggtgcccggcctgaagttcctggacctgaacaagaaccccctgcagagagtgggccccggcgacttcgccaacatgctgcacctgaaggagctgggcctgaacaacatggaggagctggtgagcatcgacaagttcgccctggtgaacctgcccgagctgaccaagctggacatcaccaacaaccccagactgagcttcatccaccccagagccttccaccacctgccccagatggagaccctgatgctgaacaacaacgccctgagcgccctgcaccagcagaccgtggagagcctgcccaacctgcaggaggtgggcctgcacggcaaccccatcagatgcgactgcgtgatcagatgggccaacgccaccggcaccagagtgagattcatcgagccccagagcaccctgtgcgccgagccccccgacctgcagagactgcccgtgagagaggtgcccttcagagagatgaccgaccactgcctgcccctgatcagccccagaagcttcccccccagcctgcaggtggccagcggcgagagcatggtgctgcactgcagagccctggccgagcccgagcccgagatctactgggtgacccccgccggcctgagactgacccccgcccacgccggcagaagatacagagtgtaccccgagggcaccctggagctgagaagagtgaccgccgaggaggccggcctgtacacctgcgtggcccagaacctggtgggcgccgacaccaagaccgtgagcgtggtggtgggcagagccctgctgcagcccggcagagacgagggccagggcctggagctgagagtgcaggagacccacccctaccacatcctgctgagctgggtgaccccccccaacaccgtgagcaccaacctgacctggagcagcgccagcagcctgagaggccagggcgccaccgccctggccagactgcccagaggcacccacagctacaacatcaccagactgctgcaggccaccgagtactgggcctgcctgcaggtggccttcgccgacgcccacacccagctggcctgcgtgtgggccagaaccaaggaggccaccagctgccacagagccctgggcgacagacccggcctgatcgccatcctggccctggccgtgctgctgctggccgccggcctggccgcccacctgggcaccggccagcccagaaagggcgtgggcggcagaagacccctgccccccgcctgggccttctggggctggagcgcccccagcgtgagagtggtgagcgcccccctggtgctgccctggaaccccggcagaaagctgcccagaagcagcgagggcgagaccctgctgccccccctgagccagaacagctag

SEQ ID NO: 164057 - DNA, 2142 bp, Artificial Sequence
  derived and/or modified sequence
atgcgcctgttggtcgcccctttgctgctcgcctgggtcgccggagctaccgcagccgtgccagttgtcccttggcacgtcccctgcccaccacagtgcgcctgccaaattaggccatggtacactccccggtcttcatacagggaggcaaccactgttgactgcaatgacttgttcctgaccgctgttccaccagcacttccggcaggaacccagactctgctgcttcagagtaactccatcgtgcgggtggaccaatcagaactgggctacttggcaaatctgaccgaactcgatctcagccagaattccttttccgatgcacgggactgcgacttccacgcattaccgcaattgctgtcgttacatctggaagagaaccaattaacccgcttggaggaccactcatttgccggactggcatccctgcaagaactctatctgaatcacaatcagctttaccgaatcgcgccccgcgcatttagcggcctcagtaatctgctgcgactccacctcaacagcaacctgttacgcgctatcgactcccggtggttcgaaatgctcccaaacctggagatcctcatgatcggcggtaataaagtggacgccatacttgatatgaacttccggcccttggcaaaccttcgctcattagtgctggcaggtatgaacctgcgcgagatcagtgattacgccctagagggcctccagtctcttgagagcctgagcttttacgacaatcagcttgcccgggtgccacgacgcgctcttgagcaggtaccaggcctcaaatttttggatctgaacaaaaatccactgcaaagagtcgggcccggcgatttcgcaaatatgcttcacctaaaggagcttggcctcaacaatatggaggagcttgtgtcgattgataagtttgccctggtcaatctccctgagcttaccaagctggatataactaataatcctcggctttcattcatccaccctcgggcttttcatcatttgccccagatggaaaccttgatgctcaataataacgccctatccgctctgcatcagcagaccgtggaaagcttgcctaacttacaggaggtcggcctgcatggcaacccaatccgctgcgattgcgtgatccgatgggccaatgctacaggtacacgcgtgcgctttatcgaaccacaaagtactctttgtgccgagccgcccgatctgcaacggcttcctgttagagaagtgccatttagagaaatgactgatcactgcctgcctttaatttctccccgatcattcccgcctagtctgcaggtcgctagcggggagagcatggtgttacattgccgggctctggccgagcccgaaccagagatttactgggtgacgcccgccggcctgcggcttacccccgcacacgctggccggaggtaccgtgtctatcctgaagggacactggaactgcgcagagtgaccgcggaagaggccgggttgtacacatgtgtcgcacaaaacctggtgggagccgatacaaagaccgtgtcagtagtagtggggagagccctgctccagccaggtagggatgagggtcagggtttggagcttagggtgcaagaaacacacccatatcacattctccttagctgggtcacaccacctaataccgtaagcaccaacctgacgtggtccagtgcgtcttcactgcgggggcagggtgctaccgcgctggcacgcctgcctcggggcacccattcctataatattacccgtctgttacaagccaccgagtactgggcttgcctgcaggtcgccttcgctgacgctcacactcagctcgcctgtgtgtgggcacggactaaggaagcgacttcctgtcatcgagcgctcggagataggcctgggctgatcgccatcctggcattagccgtactgttgctggccgctggcttggctgcccatctgggaaccggccagccgcgaaagggcgttggtggtaggcgacccctcccacccgcctgggccttctggggctggtcggcaccttcggtgcgcgtagtatccgcccccctcgtgttaccctggaaccccgggaggaagctaccccgaagctctgagggggagactttgcttcctcctctgtcccagaatagctag

SEQ ID NO: 164058 - DNA, 2142 bp, Artificial Sequence
  derived and/or modified sequence
atgagactactggttgctcctcttctccttgcgtgggtcgcaggggcaacggctgcagtacccgtggtcccttggcacgtcccatgccctccccagtgcgcctgccagatcaggccctggtatacaccaagatcgagttatcgggaggccactaccgtcgattgcaatgacctgttcctgacggcggttccaccagcacttccggccgggactcagacactgctgttgcagtcaaatagcatagtgcgcgtcgaccaatcggagctgggttacctggccaatcttactgagttagatctctcccagaactcgtttagtgacgcccgggattgtgatttccacgcgctgccccaactgttgagtctgcacctggaagagaatcaactgacacgcctcgaggaccactctttcgccgggctcgcttctctgcaggaattgtacctgaatcataatcagctatatcgcatagccccccgcgcattctctggtctgagtaacctgcttcgcttgcacctgaattctaatctcttaagagccattgattcaagatggtttgaaatgctgccaaacctggagatcctgatgatcggcggcaacaaagtggacgccattctcgacatgaactttcgacctctggccaacctgcgctcattggtcctggccggaatgaatctgagagagatatcggattacgcgcttgagggattacaaagcttggaaagtctttctttttatgacaatcagctagcccgagtgccccggagagcactcgagcaggtgcccggcctgaaatttcttgacctgaacaagaaccctttacaacgagttggaccaggggacttcgcaaacatgctgcacctcaaagagctgggcctgaataatatggaagaactcgtgagcatcgacaagtttgccttagtgaacttgcctgaactcaccaaactcgacattaccaataacccaagactgagttttatccaccccagagcttttcaccatctgcctcaaatggaaactttaatgttaaacaacaacgctctctccgctctgcatcaacaaaccgttgagagcctaccgaatctccaggaggtcggactgcacggtaatcctatccggtgcgattgcgtgatccgttgggctaatgctactgggactcgggtgaggttcatcgagcctcaatccaccctttgcgcagagccgcccgatttacaaagactgcccgttagggaggttccattccgagagatgactgatcattgccttccactgattagtcctagatcattccctccgagcttgcaagttgcctccggcgaatcaatggtgttacactgcagggccctggctgaacccgagccagagatctactgggtcacaccggctggtctccgactaacaccagcgcacgccggcagaaggtacagggtgtaccctgagggtaccctcgaactgagacgggtgaccgccgaagaggctggcctctacacttgcgtagctcagaacctagttggcgccgacaccaagaccgtttcggtcgtcgtcggaagagctctgctacagcctgggcgcgacgagggtcagggactggaactgagggtccaggaaacacatccataccatattcttctgtcttgggttactccacccaacaccgtgtccactaaccttacatggtcctccgccagtagcctgcgtggccaaggcgctaccgcgctcgcccgcctcccacgaggaacccattcttacaatatcacacggcttttacaggccaccgagtattgggcatgcctccaagtcgcctttgcagacgcccacacccagctggcttgcgtgtgggccagaaccaaggaggctacaagttgtcaccgcgccttgggcgaccgtcccggtctaattgctatcctggctctggcagtcctgcttcttgccgctggcctggcagcccacttgggcaccggccagcctaggaagggcgtgggggggagaagaccacttccacccgcgtgggcattctggggatggtcagcgccctctgtgagagtggtatccgcccctcttgtacttccgtggaatcccgggcgcaagcttccccggagctccgaaggcgagaccctcttacctcccctgagccagaacagctag

SEQ ID NO: 164059 - DNA, 2142 bp, Artificial Sequence
  derived and/or modified sequence
atgaggttacttgtcgcgccacttctgctggcctgggtggccggggctaccgctgccgtcccagttgtcccctggcatgtgccctgcccaccgcaatgtgcttgtcagatccgcccttggtatacccctcgaagctcctacagagaggcaactacagtggattgtaatgatctatttctcaccgctgtaccaccagcacttccggccggaactcaaacacttctcttacaatctaactccattgtgcgcgtcgaccagagcgaactgggctacctcgcaaacctgacggaacttgatctcagccaaaattcattctctgacgctagggactgtgatttccacgcgctgccgcagctgctgtcactgcatcttgaggaaaaccagctgactagacttgaggatcatagcttcgccgggttagcttctttgcaggaactttatttgaatcacaatcagttataccggattgccccacgagcgttttccggattgtctaatctgctccgacttcatctaaactcaaacctgctgagagcaatcgatagcaggtggttcgaaatgttgccaaacctggaaatcctgatgatcggaggaaacaaggttgatgccatacttgacatgaactttaggcctctggccaatctgcgttcccttgtgcttgccgggatgaacctgcgagaaatcagcgattatgcactggaggggttgcaaagtctcgaatccttgtctttttatgacaatcagttggcaagggtgccgagacgcgctctggagcaagttccaggcctcaagtttcttgaccttaataaaaaccctctgcagcgcgtggggccaggcgattttgccaatatgttgcacttgaaggagctgggacttaacaacatggaggagctcgtaagtatcgataaatttgcccttgttaacctgccagaactaactaagctggatatcacgaacaaccccaggctctcgtttatccatccacgcgcttttcaccatctcccacagatggaaaccttgatgctgaacaacaatgcactgagtgccttacatcagcagaccgtggaatccctcccaaatcttcaggaggtcgggctgcatggaaaccctattaggtgcgactgtgttatcagatgggccaatgctaccgggactcgtgtgaggtttattgaaccacagagtaccttatgcgccgagcccccagacctccaacgactcccggtgagagaggtgcctttccgcgagatgaccgaccattgcctccccctgatctcacctaggtcgttccctccgtctctgcaggtagcctcaggtgaatcaatggtgctgcactgccgcgctctggccgaaccagagccggagatctactgggtgactccagctggccttaggttaacgcccgctcatgccggtaggcggtatcgcgtgtaccccgagggcacccttgaactcaggagggttaccgcggaggaggccggcctgtacacatgtgtggcccagaatcttgtgggagctgacacgaagactgtgagcgtcgtagttggtcgggccctcttacagcccggacgggatgaaggccaggggctggagctcagggtgcaagagacacacccctatcacatactgctaagctgggtgacaccccctaatacagtgtccacaaatctgacatggtcttcagcaagctccctgaggggacagggtgccactgcattagccagactgcctcgcgggacacacagctacaacatcacccggctgctgcaagcaaccgaatattgggcatgcctgcaggttgcctttgctgatgcccacacccagctggcctgtgtgtgggctcggacaaaagaagcaactagttgccatcgtgctttgggcgaccgccccggcctgatcgctattctcgcgctggctgtactcctgctcgccgctggattggccgcccacctgggtacaggacaacctaggaagggggtgggaggccggcgccccctccctccggcttgggccttctggggctggtcagccccctcagtcagggtcgtctcggcgcctctcgtactaccctggaatccaggccggaagctgcctcggtcatccgaaggagagactctgttgccgcctctgagccagaacagttag

SEQ ID NO: 164060 - DNA, 5036 bp, Artificial Sequence
  derived and/or modified sequence
gaacaggcacagggcctgcagctgcagcattcagtgcatcccagaccctccagaggcccagggcagggtcagatcagacagacctggcagcacagatgtgaagtgtaaacggcacacagccccctggacttgggttgattcttgtatcttgctgctcaccagctatgtgacttgagccaagttctttaacctcttcaggacctcagtctcttaatctgcaaactggaggtattagtgcttatctcatgtacctgttatgagagtcatatgaaaaaagacattcagagtcttcaaagagtcctgagcaatggtaggtgctcagtaagtgtttgtgcatttccttgacacttgtagctaaaaacttacctggaatcagacttccactcaggagtcagaccaggctcaagaaggcaacacagtctggcccctttttgtttccatctttggttctaggccaaggctggacttgcctcatggccctggcatctgagagagaaactggataggttcctcatgctcaggatggaggaaacagcagtggcttgcattgttgattgcaggggtgatgtctaatctcctgaagaaaggaactctggagtcacagagattgattcatacaatcaacacacactgggcacccatcccgtactacaggcacaagaggcaagacaggtctctagttagagacgttttcccacggtgtggtcagaactgtgacagtaggaagcatgagtactgcaagagcataaagccagccccttagtcagccaggtggggaggttttggagaagacttctgcaggtggtgactgaacttaaagttgagcgttgaagaacaagtaggagttgtctggaagacaatgaggaggagacatcagaaggggtggcatgtcacggtaacctcaacccaaaaggtttgtgtgcagcgggtaagtggggtggtgacaagagaagccaggtgaaggggccgggccaggtcacagaaggtcttacctgcacagctgaggagctcagacccaggcttcttaactccactgcctcctcctgggcaacactgccaggctgttgggaaaggagaaacactcctgcctccagggtggggaagttggcaaacaccaaagcaatatccccacccagaagatcctgggcagcagaacaccccagcctgcctggatgtgtcaggtctgctgcctttcacctctagggtcctggggagcccatcccagattttagaagctgtacttatttccaccaaccctcacccacctcccacctacactgccagaggaacttctggaaacttatcattttatcttccatttacccagtgagccaaggaggctgggaggaaagaggtaagaaaggttagagaacctacctcacatctctctgggctcagaaggactctgaagataacaataatttcagcccatccactctccttccctcccaaacacacatgtgcatgtacacacacacatacacacacatacaccttcctctccttcactgaagactcacagtcactcactctgtgagcaggtcatagaaaaggacactaaagccttaaggacaggcctggccattacctctgcagctcctttggcttgttgagtcaaaaaacatgggaggggccaggcacggtgactcacacctgtaatcccagcattttgggagaccgaggtgagcagatcacttgaggtcaggagttcgagaccagcctggccaacatggagaaacccccatctctactaaaaatacaaaaattagccaggagtggtggcaggtgcctgtaatcccagctactcaggtggctgagccaggagaatcgcttgaatccaggaggcggaggatgcagtcagctgagtgcaccgctgcactccagcctgggtgacagaatgagactctgtctcaaacaaacaaacacgggaggaggggtagatactgcttctctgcaacctccttaactctgcatcctcttcttccagggctgcccctgatggggcctggcaatgactgagcaggcccagccccagaggacaaggaagagaaggcatattgaggagggcaagaagtgacgcccggtgtagaatgactgccctgggagggtggttccttgggccctggcagggttgctgacccttaccctgcaaaacacaaagagcaggactccagactcttcttgtgaatggtcccctgccctgcagctccaccatgaggcttctcgtggccccactcttgctagcttgggtggctggtgccactgccgctgtgcccgtggtaccctggcatgttccctgcccccctcagtgtgcctgccagatccggccctggtatacgccccgctcgtcctaccgcgaggctaccactgtggactgcaatgacctattcctgacggcagtccccccggcactccccgcaggcacacagaccctgctcctgcagagcaacagcattgtccgtgtggaccagagtgagctgggctacctggccaatctcacagagctggacctgtcccagaacagcttttcggatgcccgagactgtgatttccatgccctgccccagctgctgagcctgcacctagaggagaaccagctgacccggctggaggaccacagctttgcagggctggccagcctacaggaactctatctcaaccacaaccagctctaccgcatcgcccccagggccttttctggcctcagcaacttgctgcggctgcacctcaactccaacctcctgagggccattgacagccgctggtttgaaatgctgcccaacttggagatactcatgattggcggcaacaaggtagatgccatcctggacatgaacttccggcccctggccaacctgcgtagcctggtgctagcaggcatgaacctgcgggagatctccgactatgccctggaggggctgcaaagcctggagagcctctccttctatgacaaccagctggcccgggtgcccaggcgggcactggaacaggtgcccgggctcaagttcctagacctcaacaagaacccgctccagcgggtagggccgggggactttgccaacatgctgcaccttaaggagctgggactgaacaacatggaggagctggtctccatcgacaagtttgccctggtgaacctccccgagctgaccaagctggacatcaccaataacccacggctgtccttcatccacccccgcgccttccaccacctgccccagatggagaccctcatgctcaacaacaacgctctcagtgccttgcaccagcagacggtggagtccctgcccaacctgcaggaggtaggtctccacggcaaccccatccgctgtgactgtgtcatccgctgggccaatgccacgggcacccgtgtccgcttcatcgagccgcaatccaccctgtgtgcggagcctccggacctccagcgcctcccggtccgtgaggtgcccttccgggagatgacggaccactgtttgcccctcatctccccacgaagcttccccccaagcctccaggtagccagtggagagagcatggtgctgcattgccgggcactggccgaacccgaacccgagatctactgggtcactccagctgggcttcgactgacacctgcccatgcaggcaggaggtaccgggtgtaccccgaggggaccctggagctgcggagggtgacagcagaagaggcagggctatacacctgtgtggcccagaacctggtgggggctgacactaagacggttagtgtggttgtgggccgtgctctcctccagccaggcagggacgaaggacaggggctggagctccgggtgcaggagacccacccctatcacatcctgctatcttgggtcaccccacccaacacagtgtccaccaacctcacctggtccagtgcctcctccctccggggccagggggccacagctctggcccgcctgcctcggggaacccacagctacaacattacccgcctccttcaggccacggagtactgggcctgcctgcaagtggcctttgctgatgcccacacccagttggcttgtgtatgggccaggaccaaagaggccacttcttgccacagagccttaggggaccgtcctgggctcattgccatcctggctctcgctgtccttctcctggcagctgggctagcggcccaccttggcacaggccaacccaggaagggtgtgggtgggaggcggcctctccctccagcctgggctttctggggctggagtgccccttctgtccgggttgtgtctgctcccctcgtcctgccctggaatccagggaggaagctgcccagatcctcagaaggggagacactgttgccaccattgtctcaaaattcttgaagctcagcctgttctcagcagtagagaaatcactaggactactttttaccaaaagagaagcagtctgggccagatgccctgccaggaaagggacatggacccacgtgcttgaggcctggcagctgggccaagacagatggggctttgtggccctgggggtgcttctgcagcctcgaaaaagttgcccttacctcctagggtcacctctgctgccattctgaggaacatctccaaggaacaggagggactttggctagagcctcctgcctccccatcttctctctgcccagaggctcctgggcctggcttggctgtcccctacctgtgtccccgggctgcaccccttcctcttctctttctctgtacagtctcagttgcttgctcttgtgcctcctgggcaagggctgaaggaggccactccatctcacctcggggggctgccctcaatgtgggagtgaccccagccagatctgaaggacatttgggagagggatgcccaggaacgcctcatctcagcagcctgggctcggcattccgaagctgactttctataggcaattttgtacctttgtggagaaatgtgtcacctcccccaacccgattcactcttttctcctgttttgtaaaaaataaaaataaataataacaataatacgggggaaaggaacgaaaggaaaataa

SEQ ID NO: 164061 - DNA, 3211 bp, Artificial Sequence
  derived and/or modified sequence
cagcagacggcagacggtgcccggcgcccacgggaagctgaagatacagcggtaaacaaacctccatgtctcaagctgaccacacttgtatctggacttgccagctgattagctctgttcccaccaggctcgttcaaagacccacagcttgagggggcagagggctgcccctgatggggcctggcaatgactgagcaggcccagccccagaggacaaggaagagaaggcatattgaggagggcaagaagtgacgcccggtgtagaatgactgccctgggagggtggttccttgggccctggcagggttgctgacccttaccctgcaaaacacaaagagcaggactccagactcttcttgtgaatggtcccctgccctgcagctccaccatgaggcttctcgtggccccactcttgctagcttgggtggctggtgccactgccgctgtgcccgtggtaccctggcatgttccctgcccccctcagtgtgcctgccagatccggccctggtatacgccccgctcgtcctaccgcgaggctaccactgtggactgcaatgacctattcctgacggcagtccccccggcactccccgcaggcacacagaccctgctcctgcagagcaacagcattgtccgtgtggaccagagtgagctgggctacctggccaatctcacagagctggacctgtcccagaacagcttttcggatgcccgagactgtgatttccatgccctgccccagctgctgagcctgcacctagaggagaaccagctgacccggctggaggaccacagctttgcagggctggccagcctacaggaactctatctcaaccacaaccagctctaccgcatcgcccccagggccttttctggcctcagcaacttgctgcggctgcacctcaactccaacctcctgagggccattgacagccgctggtttgaaatgctgcccaacttggagatactcatgattggcggcaacaaggtagatgccatcctggacatgaacttccggcccctggccaacctgcgtagcctggtgctagcaggcatgaacctgcgggagatctccgactatgccctggaggggctgcaaagcctggagagcctctccttctatgacaaccagctggcccgggtgcccaggcgggcactggaacaggtgcccgggctcaagttcctagacctcaacaagaacccgctccagcgggtagggccgggggactttgccaacatgctgcaccttaaggagctgggactgaacaacatggaggagctggtctccatcgacaagtttgccctggtgaacctccccgagctgaccaagctggacatcaccaataacccacggctgtccttcatccacccccgcgccttccaccacctgccccagatggagaccctcatgctcaacaacaacgctctcagtgccttgcaccagcagacggtggagtccctgcccaacctgcaggaggtaggtctccacggcaaccccatccgctgtgactgtgtcatccgctgggccaatgccacgggcacccgtgtccgcttcatcgagccgcaatccaccctgtgtgcggagcctccggacctccagcgcctcccggtccgtgaggtgcccttccgggagatgacggaccactgtttgcccctcatctccccacgaagcttccccccaagcctccaggtagccagtggagagagcatggtgctgcattgccgggcactggccgaacccgaacccgagatctactgggtcactccagctgggcttcgactgacacctgcccatgcaggcaggaggtaccgggtgtaccccgaggggaccctggagctgcggagggtgacagcagaagaggcagggctatacacctgtgtggcccagaacctggtgggggctgacactaagacggttagtgtggttgtgggccgtgctctcctccagccaggcagggacgaaggacaggggctggagctccgggtgcaggagacccacccctatcacatcctgctatcttgggtcaccccacccaacacagtgtccaccaacctcacctggtccagtgcctcctccctccggggccagggggccacagctctggcccgcctgcctcggggaacccacagctacaacattacccgcctccttcaggccacggagtactgggcctgcctgcaagtggcctttgctgatgcccacacccagttggcttgtgtatgggccaggaccaaagaggccacttcttgccacagagccttaggggaccgtcctgggctcattgccatcctggctctcgctgtccttctcctggcagctgggctagcggcccaccttggcacaggccaacccaggaagggtgtgggtgggaggcggcctctccctccagcctgggctttctggggctggagtgccccttctgtccgggttgtgtctgctcccctcgtcctgccctggaatccagggaggaagctgcccagatcctcagaaggggagacactgttgccaccattgtctcaaaattcttgaagctcagcctgttctcagcagtagagaaatcactaggactactttttaccaaaagagaagcagtctgggccagatgccctgccaggaaagggacatggacccacgtgcttgaggcctggcagctgggccaagacagatggggctttgtggccctgggggtgcttctgcagcctcgaaaaagttgcccttacctcctagggtcacctctgctgccattctgaggaacatctccaaggaacaggagggactttggctagagcctcctgcctccccatcttctctctgcccagaggctcctgggcctggcttggctgtcccctacctgtgtccccgggctgcaccccttcctcttctctttctctgtacagtctcagttgcttgctcttgtgcctcctgggcaagggctgaaggaggccactccatctcacctcggggggctgccctcaatgtgggagtgaccccagccagatctgaaggacatttgggagagggatgcccaggaacgcctcatctcagcagcctgggctcggcattccgaagctgactttctataggcaattttgtacctttgtggagaaatgtgtcacctcccccaacccgattcactcttttctcctgttttgtaaaaaataaaaataaataataacaataatacgggggaaaggaacgaaaggaaaataa

SEQ ID NO: 164062 - DNA, 3463 bp, Artificial Sequence
  derived and/or modified sequence
gggagagcggcggagaagcgagtgaggagggcgagcgcgaagccgggaagaggggcgcgcgtggagggggtgccgggcgccgcgagggcctgctccgggcacctgcgaacgcgcggcgctctcaaggagcgcctggctctcgcccgccagcctccggccgcgacgcgcccagggcgcggagagggggtggggacggattgggattctgccatcgccctcaccggctgggccctggagccgctcccaggataactccacgttggggagggcgcccgccgagcctccccggcctgtgcagacggcgcgcgcggcgggagggcgcggaccagcgtccccagcccggccccgggcggaaggcgagcggagcgcggccgcgcgggcagcagacggcagacggtgcccggcgcccacgggggctgcccctgatggggcctggcaatgactgagcaggcccagccccagaggacaaggaagagaaggcatattgaggagggcaagaagtgacgcccggtgtagaatgactgccctgggagggtggttccttgggccctggcagggttgctgacccttaccctgcaaaacacaaagagcaggactccagactcttcttgtgaatggtcccctgccctgcagctccaccatgaggcttctcgtggccccactcttgctagcttgggtggctggtgccactgccgctgtgcccgtggtaccctggcatgttccctgcccccctcagtgtgcctgccagatccggccctggtatacgccccgctcgtcctaccgcgaggctaccactgtggactgcaatgacctattcctgacggcagtccccccggcactccccgcaggcacacagaccctgctcctgcagagcaacagcattgtccgtgtggaccagagtgagctgggctacctggccaatctcacagagctggacctgtcccagaacagcttttcggatgcccgagactgtgatttccatgccctgccccagctgctgagcctgcacctagaggagaaccagctgacccggctggaggaccacagctttgcagggctggccagcctacaggaactctatctcaaccacaaccagctctaccgcatcgcccccagggccttttctggcctcagcaacttgctgcggctgcacctcaactccaacctcctgagggccattgacagccgctggtttgaaatgctgcccaacttggagatactcatgattggcggcaacaaggtagatgccatcctggacatgaacttccggcccctggccaacctgcgtagcctggtgctagcaggcatgaacctgcgggagatctccgactatgccctggaggggctgcaaagcctggagagcctctccttctatgacaaccagctggcccgggtgcccaggcgggcactggaacaggtgcccgggctcaagttcctagacctcaacaagaacccgctccagcgggtagggccgggggactttgccaacatgctgcaccttaaggagctgggactgaacaacatggaggagctggtctccatcgacaagtttgccctggtgaacctccccgagctgaccaagctggacatcaccaataacccacggctgtccttcatccacccccgcgccttccaccacctgccccagatggagaccctcatgctcaacaacaacgctctcagtgccttgcaccagcagacggtggagtccctgcccaacctgcaggaggtaggtctccacggcaaccccatccgctgtgactgtgtcatccgctgggccaatgccacgggcacccgtgtccgcttcatcgagccgcaatccaccctgtgtgcggagcctccggacctccagcgcctcccggtccgtgaggtgcccttccgggagatgacggaccactgtttgcccctcatctccccacgaagcttccccccaagcctccaggtagccagtggagagagcatggtgctgcattgccgggcactggccgaacccgaacccgagatctactgggtcactccagctgggcttcgactgacacctgcccatgcaggcaggaggtaccgggtgtaccccgaggggaccctggagctgcggagggtgacagcagaagaggcagggctatacacctgtgtggcccagaacctggtgggggctgacactaagacggttagtgtggttgtgggccgtgctctcctccagccaggcagggacgaaggacaggggctggagctccgggtgcaggagacccacccctatcacatcctgctatcttgggtcaccccacccaacacagtgtccaccaacctcacctggtccagtgcctcctccctccggggccagggggccacagctctggcccgcctgcctcggggaacccacagctacaacattacccgcctccttcaggccacggagtactgggcctgcctgcaagtggcctttgctgatgcccacacccagttggcttgtgtatgggccaggaccaaagaggccacttcttgccacagagccttaggggaccgtcctgggctcattgccatcctggctctcgctgtccttctcctggcagctgggctagcggcccaccttggcacaggccaacccaggaagggtgtgggtgggaggcggcctctccctccagcctgggctttctggggctggagtgccccttctgtccgggttgtgtctgctcccctcgtcctgccctggaatccagggaggaagctgcccagatcctcagaaggggagacactgttgccaccattgtctcaaaattcttgaagctcagcctgttctcagcagtagagaaatcactaggactactttttaccaaaagagaagcagtctgggccagatgccctgccaggaaagggacatggacccacgtgcttgaggcctggcagctgggccaagacagatggggctttgtggccctgggggtgcttctgcagcctcgaaaaagttgcccttacctcctagggtcacctctgctgccattctgaggaacatctccaaggaacaggagggactttggctagagcctcctgcctccccatcttctctctgcccagaggctcctgggcctggcttggctgtcccctacctgtgtccccgggctgcaccccttcctcttctctttctctgtacagtctcagttgcttgctcttgtgcctcctgggcaagggctgaaggaggccactccatctcacctcggggggctgccctcaatgtgggagtgaccccagccagatctgaaggacatttgggagagggatgcccaggaacgcctcatctcagcagcctgggctcggcattccgaagctgactttctataggcaattttgtacctttgtggagaaatgtgtcacctcccccaacccgattcactcttttctcctgttttgtaaaaaataaaaataaataataacaataatacgggggaaaggaacgaaaggaaaataa

SEQ ID NO: 164063 - DNA, 2142 bp, Artificial Sequence
  derived and/or modified sequence
atgaggctgctggtggcccccctgctgctggcctgggtggccggggccacagctgctgtgcctgtggtgccctggcacgtgccctgccccccccagtgtgcctgccagatccggccctggtacacccccaggagcagctaccgggaggccaccaccgtggactgcaatgacctcttcctgacagctgtgcccccagccctgcctgctggcacccagaccctgctgctgcagagcaacagcatcgtgcgggtggaccagagcgagctgggctacctggccaacctgacagagctggacctgagccagaacagcttcagtgatgcccgggactgtgacttccacgccctgccccagctgctgagcctgcacctggaggagaaccagctgacccggctggaggaccacagctttgctggcctggccagcctgcaggagctgtacctgaaccacaaccagctgtaccgcatcgccccccgggccttcagcggcctgagcaacctgctgcggctgcacctgaacagcaacctgctgcgggccatcgacagccgctggtttgagatgctgcccaacctggagatcctgatgattggaggcaacaaggtggatgccatcctggacatgaacttccggcccctggccaacctgcggagcctggtgctggccggcatgaacctgcgggagatcagtgactatgccctggagggcctgcagagcctggagagcctgtccttctatgacaaccagctggcccgggtgccccggcgggccctggagcaggtgcccggcctgaagttcctggacctgaacaagaaccccctgcagagggtgggccctggggactttgccaacatgctgcacctgaaggagctgggcctgaacaacatggaggagctggtgtccattgacaagtttgccctggtgaacctgcctgagctgaccaagctggacatcaccaacaacccccggctgtccttcatccacccccgggccttccaccacctgccccagatggagaccctgatgctgaacaacaatgccctgagcgccctgcaccagcagacagtggagagcctgcccaacctgcaggaggtgggcctgcacggcaaccccatccgctgtgactgtgtgatccgctgggccaatgccaccggcaccagggtgcgcttcatcgagccccagagcaccctgtgtgccgagcccccagacctgcagaggctgcctgtgcgggaggtgcccttccgggagatgacagaccactgcctgcccctcatcagccccaggagcttcccccccagcctgcaggtggccagcggggagagcatggtgctgcactgccgggccctggccgagcctgagcctgagatctactgggtgaccccagctggcctgcggctgaccccagcccacgccggccgccgctacagagtgtacccagagggcaccctggagctgcggcgggtgacagctgaggaggccggcctgtacacctgtgtggcccagaacctggtgggcgctgacaccaagacagtgtctgtggtggtgggccgggccctgctgcagcccggcagagatgagggccagggcctggagctgcgggtgcaggagacccacccctaccacatcctgctgtcctgggtgaccccacccaacacagtgtccaccaacctgacctggagcagcgccagcagcctgcggggccagggcgccacagccctggcccggctgccccggggcacccacagctacaacatcacccggctgctgcaggccacagagtactgggcctgcctgcaggtggcctttgctgatgcccacacccagctggcctgtgtgtgggcccggaccaaggaggccaccagctgccaccgggccctgggggacaggcctggcctcatcgccatcctggccctggccgtgctgctgctggccgccggcctggccgcccacctgggcaccggccagcccaggaaaggagtgggcggccggcggcccctgcccccagcctgggccttctggggctggagcgcccccagcgtgcgggtggtgtctgcccccctggtgctgccctggaaccctggcaggaagctgcccaggagcagcgagggggagaccctgctgccccccctgagccagaacagctag

SEQ ID NO: 164064 - DNA, 2142 bp, Artificial Sequence
  derived and/or modified sequence
atgcggctgctggtggcccccctgctgctggcctgggtggccggcgccacagcagccgtgccagtcgtgccttggcacgttccttgtcctcctcaatgtgcctgccaaatacggccatggtatacaccccggtcgagctatcgcgaggcaaccaccgtcgactgcaatgacctgtttttgacagctgttccccccgcgctgcctgctggaacacagaccttactcctccagtcaaacagcatagtgagggtggatcagtccgagctcggctatctggctaatcttactgagctggatctgagccagaattccttcagtgatgcacgggactgcgatttccacgcactgcctcagcttttaagcctgcacctagaggagaaccagttgacacggctcgaggatcattctttcgcgggactggcaagtctccaggagctgtacctgaaccataatcagctgtacagaattgcacccagagctttctccgggctcagtaacctcctgcgcctgcacctgaactccaatctgctgagggctatcgacagtaggtggtttgagatgctccccaacctcgaaatattaatgattggaggaaataaggttgacgcgattctggacatgaactttaggcccctggctaacctcagatccctcgtcctggcggggatgaacctgcgggaaatctcagattatgcgcttgaaggacttcagtctctcgaatccctctcattctacgataatcagttagccagagtccctagacgggcactggagcaggtccctggactgaagtttctagacctcaataaaaatccactgcagagggtcggtcctggcgactttgctaacatgctccatctgaaagaactgggtttaaacaacatggaagagctcgtttctatcgacaaattcgcgttggtgaacctgcctgagttgacaaagctggacatcactaacaaccctcgcctctcgtttatccatccgagagcattccatcatctccctcagatggagaccctgatgctgaataataacgccctgtctgctttgcatcagcaaaccgtggagagcctcccaaacctgcaagaagtgggtctacacggcaatcctatcagatgtgattgtgtgattcggtgggctaacgcgacaggcacgcgagtccgttttattgagccacagtcaactttatgtgccgagccaccggacttacagcgtctgcctgtccgagaggtgccattcagagaaatgacggatcactgtctgcctctcatctctccccgttcctttcccccgtccctccaagtggcgtctggcgagtctatggtattacactgccgcgctctcgccgaacctgaaccggaaatttactgggtgacacctgccggattgcggcttacccccgcgcacgcagggcgccgctacagagtgtatcccgaaggaactctggaactcagaagagtaacagctgaggaagctggactgtacacctgcgtcgcccagaacctcgtgggtgccgacacaaagacagtgagcgtggtcgtgggacgagccctcctgcaaccagggcgcgatgaagggcagggcctggaactgcgggtgcaagagacccatccatatcatattctcctgtcctgggttactcctcccaatactgtgtccaccaatctcacttggtccagcgccagctctctccgcgggcagggggccactgcactggcacgcttgcctcggggaacccatagctataatattactaggttgctccaggcaaccgaatactgggcttgccttcaggtggcattcgctgacgcccatactcaactggcttgcgtatgggccagaaccaaagaggccaccagctgtcacagggctttaggggacaggccaggccttatcgccatcctggcactcgcagtcctactcctcgcagccggcttggccgctcacctcggaacaggtcagccaagaaagggcgtaggaggtaggaggcctttgccacccgcttgggccttctggggatggagtgctccctctgtgagggtggtgtccgctccccttgtgcttccatggaaccctggacgtaaactgcctcggtccagtgaaggcgaaaccttacttccacccctgagccagaactcctag

SEQ ID NO: 164065 - DNA, 2142 bp, Artificial Sequence
  derived and/or modified sequence
atgcggctgctggtggcccccctgctgctggcctgggtggccggcgctaccgcagccgtacctgtggttccttggcacgtcccgtgtccgccacagtgtgcctgtcagattcgcccctggtatacgcctagaagtagttacagagaggcaacgaccgtcgactgcaacgacctgttcctgaccgccgtcccacctgccctcccagcgggtacacagacactcctccttcaaagcaatagcatagtgcgcgtggatcagtccgaactcggatatcttgccaatctgaccgagctggatctgtctcagaacagtttctccgacgccagagattgcgacttccacgccctcccccagctactgtccctccatctcgaagaaaaccagctgacaagattagaggatcatagcttcgcaggactggcgtcgctccaggaactgtacctgaatcataatcagttataccgtattgcacctcgggctttttctgggctaagtaatctcctcagattgcacctgaactccaatcttctgcgggcgattgacagtaggtggtttgaaatgctccccaacttggagatcttaatgattggagggaacaaggtagacgctattttagacatgaatttcaggcccctggcaaatttacgcagcctcgtgctcgcaggcatgaatttgcgggagatctccgactatgcattggaaggcctccaatctctcgagagcctctctttctacgataaccagctcgcaagagtacctagacgggctctggaacaggtgccaggcctgaagttcctcgatctcaataaaaatcctctgcagagagttgggccgggagactttgccaatatgctgcacctcaaggaactggggcttaacaacatggaggagcttgtcagcatcgacaaatttgcattggtgaatctcccagaacttaccaaacttgacatcaccaataacccccgcctatcgttcatacatccgcgcgctttccaccatctgccccagatggaaacactgatgttgaacaacaacgccctgtcagctctccatcagcagactgtggagtcgctgcctaacctgcaagaagtcggactgcacggcaaccccattaggtgtgactgtgtgattcgttgggccaacgcaacaggaacccgcgtgaggttcattgagcctcagagcacactttgcgccgagcccccagacctccagaggcttcccgtgagggaggtcccctttagggagatgaccgatcactgcctgcccttgatctccccccgctccttcccaccctctctgcaggtggctagcggagaatcaatggtgttgcattgcagggccttggccgaaccagagcctgaaatatactgggtgacacccgctggcctccggctcacccccgctcacgccggccgtcggtatagagtctatccagagggtaccctggagctgcgtagagtgaccgcggaagaagctggattgtatacctgtgtggcgcaaaacttggtcggcgcagacacgaaaacagtctcagtggtggtgggtcgcgcactgctgcaaccagggagggacgagggccagggactcgagttgcgagtgcaggaaacgcacccttatcacattctgttgtcatgggtcacaccccccaatacagtaagcaccaatttgacgtggtcgtctgccagctcactcaggggacaaggcgcaacggccctggcccggctgccaagaggaacacactcttacaatattactcggctgttgcaggctacagagtattgggcatgcctccaggtcgcctttgcggatgcacacacacagttagcctgcgtgtgggcacgcaccaaggaggctacgtcatgtcaccgggccctgggggacagacctggcctgattgcaattctggccctcgctgtcctgctattggccgcgggtttggccgcccacctaggcacgggtcagccccggaagggggtcggaggaaggaggcctctgcctcctgcctgggcgttctggggatggagcgctcccagcgtgcgggtcgtcagcgccccgttggtcttaccatggaatccaggccggaaactgcctagaagcagcgaaggggagactctgctgccacctctgagccagaatagttag

SEQ ID NO: 164066 - DNA, 2142 bp, Artificial Sequence
  derived and/or modified sequence
atgcggctgctggtggcccccctgctgctggcctgggtggccggcgccactgccgctgttcctgtagtgccgtggcatgtcccttgccccccacaatgtgcttgtcaaatccgcccttggtataccccacgtagctcatatagagaagccacaaccgtcgattgcaatgacttgttcttgactgccgtcccaccggctctacccgccggcacccagacactactgctgcagagcaacagcatagtgagagtcgatcaatccgagttgggctacctggcgaatctcacggaactagacctgtcacagaacagttttagtgacgcccgtgattgtgacttccacgccctgcctcagctgttaagcctccatctggaggaaaatcagctcactcgcctggaagaccacagcttcgcaggcctcgcctccctccaagagctctatctgaaccataatcagctataccggatcgctccacgggctttcagtggactgtccaacctcctgcgcctccacctgaactcgaatttgctccgcgccattgacagccggtggttcgaaatgttgccaaacttggagatcctgatgataggcggcaacaaagtggatgccattctcgacatgaattttcggccactcgcgaatcttagaagtctggttctggcggggatgaatttacgggagatctctgattatgctctggaaggcttacagagtctggagtccctgagtttctatgataaccagttagcacgggtacctcgcagagctcttgagcaagtgcccggactcaagtttttagacctgaataagaacccccttcagagggtgggacccggcgattttgctaacatgctccacctcaaagagcttgggctgaataacatggaagaactggtgagcatcgacaaattcgctctcgtgaatttgcctgagctgaccaaactggacataaccaacaatcctcggctgtccttcatccatccgcgggcattccaccacctcccccagatggagactcttatgctcaacaataacgccctgtccgcccttcatcaacaaacagttgagagcctgcctaacttacaagaggtgggcctgcatggaaatccaattaggtgcgactgcgtgattagatgggctaacgccacaggtacacgcgtacggtttattgagccacaaagcactctatgcgcagagccccccgacttgcaacgtctccccgtcagggaggtgccattccgtgagatgacagaccactgtcttccactgatctccccccggtcattccccccaagcttgcaggtggcgtctggtgaatcaatggtgctgcattgcagggctctagccgagcccgaacctgaaatctactgggtgacccccgcgggcctcagactgacccccgcacacgccgggcggcggtacagagtgtatcctgaagggacccttgagctgcgccgcgtcacagctgaggaggctggcctgtatacttgtgtggcccagaacctggtaggcgccgatactaagactgtgagcgtggtagtgggacgggctctgctccagcccggcagagacgagggacagggcctagagcttcgcgttcaggaaacccatccctatcacattctgctgagttgggtgaccccaccaaacaccgtgtctactaatttaacgtggtccagtgccagctcattgcgggggcagggggctacagcacttgcaaggctgccaagaggaacccatagctacaatatcacccgactcctgcaggccactgaatattgggcctgtcttcaggtagccttcgccgacgcgcacacccaactggcatgcgtgtgggcccggacaaaagaggctacctcatgtcatagggccctgggggataggcccggactcattgccattttagccttggctgtgctcctcctggccgccggcttggcagcacaccttggaaccggccagccgaggaaaggcgtcggcggcagaagacctctccctcccgcgtgggccttttgggggtggtctgcgccatccgtgagagtggtctctgctccattggtgctcccgtggaaccccggtcgaaagctcccgagatcatccgaaggagagactctgctcccaccgctttcccagaactcttag

SEQ ID NO: 164067 - DNA, 2142 bp, Artificial Sequence
  derived and/or modified sequence
atgaggttacttgtggcgccacttctccttgcctgggtggctggggctacagcagctgtgcccgttgtaccgtggcacgtaccctgcccgccacaatgcgcttgccagatacggccttggtatactccacggagcagctaccgagaggcaaccacagtggattgtaacgacctgtttctgaccgccgtaccaccagctttgccagccggaacacagacgttgcttctgcagagcaactcaatcgtcagggtggatcagtccgaactcggatacctggccaacttaactgagctggacttgagtcagaatagcttcagcgacgccagggattgtgatttccacgctctgcctcagctgttgagcttgcacttggaggagaaccagctgacacggctcgaggatcactctttcgctggactggcttctctgcaagaactgtacctcaaccacaatcagctatatcgtatagcacccagggcattttctggactgtctaatctgcttcgtcttcaccttaatagcaacctcctgcgcgctattgatagtcgatggtttgagatgctacccaatcttgagatactcatgattggcggaaacaaagtagatgcaattctggatatgaacttccgtcccttagccaacctgcggtcgcttgtgctagccggaatgaacctcagggagatttccgattacgctctcgaagggcttcaatcgctggagtcgttatcattctacgataaccagcttgcacgggtccccagacgcgcactcgagcaagttccagggctgaagttcttagatctgaataagaaccccctacaaagggtgggccctggagactttgccaacatgctccatctaaaagaactaggcctaaacaatatggaagagctggtcagcatcgataagttcgcactggtcaacctgcccgaactcactaagctggatatcaccaataatcccagacttagtttcatccaccctcgcgcattccaccaccttccccagatggaaacactcatgctcaacaataacgctctgtccgcgttgcaccaacagaccgtcgaaagcttacctaatctgcaggaggtgggcctgcatggaaatcccatccgatgcgactgtgtgatcagatgggccaacgccactggaactagagtccgattcatcgagccgcaatctacgctgtgtgctgagcctcctgatctgcagcggctgccagtgcgtgaggtcccatttagagaaatgacagaccattgcctgcctctcatttcaccacgatcctttccgcctagcttacaggtggccagtggggagagtatggtcctacactgtagggctctcgccgagccagaacctgaaatatattgggtgaccccagctgggctccggctgaccccagcccatgcagggcgtaggtatcgggtgtatcctgagggcactctggaactgaggagggtcacagcggaggaggccggattgtatacttgcgtcgctcagaatctggtgggtgctgatacgaaaaccgttagtgttgtggttggtagggcccttctacaacccggaagagatgaaggccaaggactcgaactgagagtgcaggagacacacccgtatcatatactgttgagctgggtgacaccgccaaacactgtgagtactaacttgacgtggtcctccgccagctctttacggggtcagggagcgactgcactggctcgactcccccgtggcacacacagctacaacataacccggcttctgcaggcgacagagtattgggcttgtctgcaggtagctttcgcagacgcccacacccagctggcctgcgtatgggcccgaacaaaagaggccacatcatgccaccgtgctctcggcgataggccaggccttatcgctatcttggctctcgctgtcttgctgttggcggctggcctggccgctcatctgggaaccgggcagcctaggaaaggtgtggggggtcggagacccttgcctcctgcttgggcattctggggctggtccgccccatcagttagagtcgttagtgctcccctggtcctgccatggaatccgggtcggaaactgcctcgctcaagcgagggagagacgctgctgcccccactgtcacagaatagctag

SEQ ID NO: 164068 - DNA, 2142 bp, Artificial Sequence
  derived and/or modified sequence
atgcgccttttggtcgcaccccttttactggcatgggtcgcaggggcaactgccgcagttccggtggtgccctggcacgtgccttgcccacctcagtgcgcttgtcagatcagaccttggtatactcctcgcagcagttaccgcgaagccaccacggtggattgcaatgacctcttcctaacagcggtgccacccgcactgcctgcagggacacagactctgctgctgcaaagcaacagtatagtgcgcgtggatcagtccgaactggggtatttagcaaatttgaccgagttagatctctcacaaaactccttcagtgacgcacgggactgtgatttccacgccctcccccagttgcttagcttacatctggaggagaatcaacttacccgtctcgaagaccacagtttcgccggactggccagcttacaagagctgtatctcaaccacaaccagctgtacagaattgcacctcgagctttctccggcctctcaaatcttctccgtctgcatctaaatagcaaccttcttcgggctatcgactcccgctggtttgaaatgcttcctaacctcgagatcttaatgatcgggggaaacaaagtggatgcaatcctggatatgaattttcgccctctggccaatcttagatccctcgtcctggcaggaatgaacctgcgggaaatttccgattacgcattggaagggttgcagtctctcgagtctctgagtttttacgacaaccagctagccagggtacccagaagggcactagagcaggtcccgggactgaaattcctggatttaaacaagaaccccctccagagggttgggcctggcgactttgcaaatatgctgcacctaaaagagcttggcctgaacaatatggaggagttagtgtccatagacaaattcgctctggtcaatcttccagaactgacgaaactggatattaccaacaaccctcgcctgagctttatccatccaagagcttttcaccacctccctcagatggagacactgatgttaaacaacaatgccctttccgctctgcatcagcaaactgtggagtcgctgccaaaccttcaagaagtgggcctacatgggaatcccattcgatgtgactgcgtgatcaggtgggctaacgccactggaactcgtgtgcgcttcattgagccccaaagtactctctgtgcggagccccctgacctccagcggctgcctgtccgcgaggtgccctttcgcgagatgactgatcattgtttgccgttgatctcccccaggtcctttccgccttctcttcaggttgcttcaggcgagtctatggtgcttcattgtcgggcactggcagagcccgaacctgagatctactgggtaacaccggcaggcttacggttgactcccgctcacgcaggacgcaggtaccgcgtgtacccggaaggcacactcgagctaaggcgcgtcacagcggaagaagcaggattatatacctgcgtagcacagaatctggtcggagcggacacgaagaccgtgagcgtagtggtaggccgagcccttcttcagcctggaagggacgagggccaggggttggaactgcgcgtacaggaaactcacccgtaccacattctcttatcttgggtgacgcctcctaacaccgtttcgactaacctgacttggtcatcagcatccagcctgcgcggacaaggggctacggccctcgcgagactgccacgtggaacccacagttataatataactagattgcttcaagccactgagtactgggcatgtctgcaggttgccttcgccgatgcacacactcaactggcctgtgtctgggcacgcactaaggaagccacctcttgtcatagagccctgggggatcgcccaggtttgatcgctatacttgctcttgcagttcttctcctggccgcagggctggcggctcatctgggtaccggtcagccacgcaagggcgtgggaggacggaggcccctgcctccagcctgggcgttttggggatggagcgcccctagcgttcgggtcgtcagcgcaccactagttctgccctggaatccaggacgtaagttgcctcgttcatctgaaggggagacccttttaccacccctgtcccaaaactcctag

SEQ ID NO: 164069 - DNA, 2142 bp, Artificial Sequence
  derived and/or modified sequence
atgcgcctgctcgtagctccactgctgcttgcctgggttgcaggtgccacagctgccgtgcccgtggtgccctggcacgtgccctgtccaccgcagtgcgcatgccagatccggccatggtacaccccgcgatcttcttatcgcgaagctacaactgtcgactgcaatgacctattcctcaccgctgtgccgcctgccctgcccgcagggactcagaccctgctcctccagagcaacagtatcgttcgagtcgaccagagcgagcttgggtacctcgccaatcttaccgagttagacctctcgcaaaactcttttagcgacgctcgggattgtgatttccacgcactgccccaactgctcagcctgcatctagaggaaaaccagctgacaaggcttgaggatcactcattcgcgggactggcctctcttcaggaactctacctaaatcataaccagctctataggattgcccctagggcatttagcggactttcaaatctcctgaggctccatttgaactcaaacctgctgcgtgccatagacagtaggtggttcgagatgctgccaaatctcgagatcctcatgattggcggaaataaggtcgacgcaattttagacatgaacttccggcctctagcgaacctcaggtcattggtgctcgcagggatgaacctgcgagaaatctcggattatgccctagaaggcctccagtcactggaaagcttatcattttacgacaaccagctcgccagagtgccacgaagggctctggaacaggtgccaggcctgaagttcctcgacctgaataaaaacccgctccaacgtgtcggaccaggtgacttcgccaacatgctacacctcaaggaactcggcctaaataacatggaggaactggtaagcatcgacaagttcgcgctggtaaacctccccgaattgaccaagctggatatcactaacaatcccaggctctccttcatacacccccgagctttccatcatctccctcagatggaaactctcatgctgaacaacaacgcactaagcgctttgcatcagcaaactgtggaaagtctgccaaacctgcaggaggtgggcttacatggtaaccccatcagatgtgactgtgttatcagatgggcaaatgccactgggactagagtgcggtttatagagccgcagtctacgttatgtgccgagcccccagatctgcagcgcctgcccgtaagggaggtaccttttagagaaatgacagatcattgtctaccgctgatttcaccaagatccttcccaccctcattgcaggtggctagtggggagtccatggtgctccactgtcgggcattagcggagcccgaaccggagatttactgggtgactcctgcagggttacggctgacccctgcccatgccggacgcaggtatagagtgtaccctgagggcacgctggagctcaggcgcgtaaccgccgaagaagccggtttgtacacctgtgtggcacaaaacctggttggagccgacaccaagacagtatcggtggttgtgggcagagcacttctacagcctggtcgggacgaggggcagggcctggagttgagagtgcaggagacccacccatatcatatactgttgagctgggtgacgccacctaatacagtcagtaccaacctgacttggtcctcggccagctccttgagagggcaaggcgcaaccgctctggccagattgccaaggggaacccacagttataatatcactcggttgttacaggctacggagtactgggcatgtttgcaggtggccttcgccgatgcgcatacccaattggcgtgtgtctgggcaagaaccaaagaggccacttcttgtcatagagcactcggagacagacccggactcatcgccatcttggctttggcagtgctgctactggctgcagggctggccgctcacctggggaccgggcagcccaggaagggagtcggtggaagaagaccactgccgccagcctgggccttctgggggtggtcggccccaagcgtgcgcgtagtgagtgctccactggtgcttccttggaatcctggtaggaaactgcctagaagcagcgaaggggagacccttctcccccctttaagccaaaattcttag

SEQ ID NO: 164070 - protein, 317 aa, Artificial Sequence
  derived and/or modified sequence
MSHGPKQPGAAAAPAGGKAPGQHGGFVVTVKQERGEGPRAGEKGSHEEEPVKKRGWPKGKKRKKILPNGPKAPVTGYVRFLNERREQIRTRHPDLPFPEITKMLGAEWSKLQPTEKQRYLDEAEREKQQYMKELRAYQQSEAYKMCTEKIQEKKIKKEDSSSGLMNTLLNGHKGGDCDGFSTFDVPIFTEEFLDQNKAREAELRRLRKMNVAFEEQNAVLQRHTQSMSSARERLEQELALEERRTLALQQQLQAVRQALTASFASLPVPGTGETPTLGTLDFYMARLHGAIERDPAQHEKLIVRIKEILAQVASEHL

SEQ ID NO: 164071 - protein, 215 aa, Artificial Sequence
  derived and/or modified sequence
MSHGPKQPGAAAAPAGGKAPGQHGGFVVTVKQERGEGPRAGEKGSHEEEPVKKRGWPKGKKRKKILPNGPKAPVTGYVRFLNERREQIRTRHPDLPFPEITKMLGAEWSKLQPTEKQRYLDEAEREKQQYMKELRAYQQSEAYKMCTEKIQEKKIKKEDSSSGLMNTLLNGHKGGDCDGFSTFDVPIFTEEFLDQNKAREAELRRLRKMNVAFEE

SEQ ID NO: 164072 - protein, 142 aa, Artificial Sequence
  derived and/or modified sequence
MSHGPKQPGAAAAPAGGKAPGQHGGFVVTVKQERGEGPRAGEKGSHEEEPVKKRGWPKGKKRKKILPNGPKAPVTGYVRFLNERREQIRTRHPDLPFPEITKMLGAEWSKLQPTEKQRYLDEAEREKQQYMKELRAYQQSEA

SEQ ID NO: 164073 - DNA, 1584 bp, Artificial Sequence
  derived and/or modified sequence
gttggttggagcgtcgcgcagtcgggaggtccgggaaagtttctttggaggtccggcccggagcggccatgtcccacggccccaagcagcccggcgcggccgccgcgccggcgggcggcaaggctccgggccagcatgggggcttcgtggtgactgtcaagcaagagcgcggcgagggtccacgcgcgggcgagaaggggtcccacgaggaggagccggtgaagaaacgcggctggcccaagggcaagaagcggaagaagattctgccgaatgggcccaaggcaccggtcacgggctacgtgcgcttcctgaacgagcggcgcgagcagatccgcacgcgccacccggatctgccctttcccgagatcaccaagatgctgggcgccgagtggagcaagctgcagccaacggaaaagcagcggtacctggatgaggccgagagagagaagcagcagtacatgaaggagctgcgggcgtaccagcagtctgaagcctataagatgtgcacggagaagatccaggagaagaagatcaagaaagaagactcgagctctgggctcatgaacactctcctgaatggacacaagggtggggactgcgatggcttctccaccttcgatgttcccatcttcactgaagagttcttggaccaaaacaaagcgcgtgaggcggagcttcggcgcttgcggaagatgaatgtggccttcgaggagcagaacgcggtactgcagaggcacacgcagagcatgagcagcgcgcgcgagcgtctggagcaggagctggcgctggaggagcggaggacgctggcgctgcagcagcagctccaggccgtgcgccaggcgctcaccgccagcttcgcctcactgccggtgccgggcacgggcgaaacgcccacgctgggcactctggacttctacatggcccggcttcacggagccatcgagcgcgaccccgcccagcacgagaagctcatcgtccgcatcaaggaaatcctggcccaggtcgccagcgagcacctgtgaggagtgggcgggcccacgatgcagaggagaagctgtgggcgcggccctgccacaccccaccccgtggacgagaggctgggggtccaccctttggggcctggtcccatcctgcaccttgggggctccagcccccctaaaattaaatttctgcagcatccctttagctttcaatctccccagccccctgaacccggaaaaagcactcgctgcgcgatacacccagaagaacctcacagccgagggtgcccctcctcggaggacagccacgcgctacactggctctccgggccacccccaggacacagggcagacgaaacccacccccagcacacggcaggaccccccaaattactcactacggggggctgtgccataggccacacaggaagctgccttgtggggacttacctggggtgtcccccgcatgcctgtaccccagatgggtgggggccggctttgcccatcctgctctcctccagccgagggaccctggtgggggtggctccttctcactgctggatccggactttttaaataaaaacaagtaaaatttgtgttttaa

SEQ ID NO: 164074 - DNA, 954 bp, Artificial Sequence
  derived and/or modified sequence
atgagtcacggtcctaaacagcccggtgccgcggccgctccggcaggagggaaggctccggggcagcacggcggcttcgttgtcacagtaaagcaagaaagaggtgaagggcccagagccggggaaaagggtagccatgaagaagaacctgtgaagaagagggggtggcccaaaggaaagaagaggaaaaagatcctccctaatggcccaaaggcaccagttaccggatatgttcgattcctgaacgagcggcgcgaacaaatccgcaccaggcacccagatctcccatttccagagataactaaaatgctcggcgccgagtggagtaaactgcagcccacagagaaacagaggtacctcgatgaagccgaacgcgaaaaacaacagtatatgaaggaactgcgtgcctaccagcaatcagaggcctacaagatgtgcactgagaagatccaggaaaagaaaattaagaaagaagattcttcttccgggttgatgaatactcttcttaatggacataagggtggcgactgcgacggtttcagcacatttgatgtgcccattttcacagaggagtttctggaccaaaacaaggctagggaggcagaactgaggaggctgcgaaaaatgaatgtcgccttcgaggagcagaacgccgtcctgcagagacatacccagtccatgagctccgccagagagaggctcgagcaagagctggccctcgaggagcgccggacactggcattgcagcagcagctccaagcagttaggcaggctttgacagcgagtttcgcaagtttgccggttcctggcacaggagagacacccacactcggcaccctggatttttatatggcaagactgcacggcgccatcgaaagagatcctgctcaacacgagaaactgatcgtgcgtataaaagagatcctcgcccaagtcgcatcagagcatttgtag

SEQ ID NO: 164075 - DNA, 807 bp, Artificial Sequence
  derived and/or modified sequence
atggacactcgcgtgggcacagcaatggctagcccccctagtatgttccctagtagcctcaagtcttcatggaccaaaacaaagagggtgagacgctcatttggggccgaagacgagtgcggcctccgcggtgctgaacggggcacagcggaggcacatgcagagcacgagcagcgcgccagggcatcaggcgctggagccggcgctggcggcgctgaggatgcaggcgcagcagccgcggcccccgggcgcgctccaggtgcacaccgccagttacgtcttactgccggcgccggccacggcagaaacgcgcacgccggacactctggcctcctacacggccctgcgtctcgctctcatagggctcgacctcggccagccagagaagctcaccgaccccaccagggtaaccctggacccggtaggcagcgggctccagtgaggtctggacgtgcccatgacgctgaagaaaaactctgggcacgaccatgtcacactccgcctagaggaagagaagccggcggcccacctgggccagggccaatcttacacctgggcggatcaagtccacctaagattaaattcctgcagcacccctttagttttcaaagcccacaaccgcctgaacccgggaagtctacacgtgacactccacggcgtacatcacaaccgcgagtacctcttctgggtggccaaactaggtacaccggttctcccggtcacccccaggataccggccagacgaaaccaaccccatctactagacaagatccacccaactactcactgcgaggagcagttccctag

SEQ ID NO: 164076 - DNA, 648 bp, Artificial Sequence
  derived and/or modified sequence
atgtcccatggccccaaacaacccggcgcggccgccgcacctgcaggaggcaaagctcccggccagcacggtggatttgttgttacggtgaagcaggagagaggagagggcccgcgagctggagagaagggttcacacgaagaggaacctgtcaaaaagcgagggtggcctaagggaaaaaagagaaaaaaaattcttccaaacggacctaaggcaccggttacggggtacgtgcgattcctcaacgaaagacgagagcagatcaggacccgacatcccgatctgccctttccagaaatcacaaagatgttgggagccgagtggtctaaactccagcctactgagaagcagaggtacctggatgaagctgagagggaaaaacagcagtacatgaaggagctgcgcgcgtaccagcagtccgaggcatataagatgtgtacggagaagatacaagagaagaaaatcaaaaaagaagactcatcatctgggttgatgaataccctgctaaacggtcataagggcggtgactgcgacggcttcagcaccttcgacgtgcctatttttacagaggaattcttagaccaaaataaggcccgtgaggcggagcttagaaggctgaggaagatgaacgtggccttcgaagaatag

SEQ ID NO: 164077 - DNA, 429 bp, Artificial Sequence
  derived and/or modified sequence
atgagtcacggaccaaaacagcctggggcggcagcagccccagcagggggaaaggcccctggccagcacggtggttttgtcgtcaccgttaaacaggagagaggcgaaggcccccgcgctggagagaagggctctcatgaagaggaacccgtgaagaagcgagggtggcctaaggggaagaagcgaaagaagatactgccgaatggacctaaagccccagtgaccggttacgtgcggtttttaaacgaaaggcgcgagcagatcagaactagacacccagacctgccattccccgaaatcaccaagatgttaggggctgaatggtcaaaactccagccgacagagaagcagagatacctagatgaagccgagagggaaaaacagcagtatatgaaggagcttcgcgcttatcagcagagtgaagcttag

SEQ ID NO: 164078 - DNA, 1596 bp, Artificial Sequence
  derived and/or modified sequence
gcgggcggttggttggagcgtcgcgcagtcgggaggtccgggaaagtttctttggaggtccggcccggagcggccatgtcccacggccccaagcagcccggcgcggccgccgcgccggcgggcggcaaggctccgggccagcatgggggcttcgtggtgactgtcaagcaagagcgcggcgagggtccacgcgcgggcgagaaggggtcccacgaggaggagccggtgaagaaacgcggctggcccaagggcaagaagcggaagaagattctgccgaatgggcccaaggcaccggtcacgggctacgtgcgcttcctgaacgagcggcgcgagcagatccgcacgcgccacccggatctgccctttcccgagatcaccaagatgctgggcgccgagtggagcaagctgcagccaacggaaaagcagcggtacctggatgaggccgagagagagaagcagcagtacatgaaggagctgcgggcgtaccagcagtctgaagcctataagatgtgcacggagaagatccaggagaagaagatcaagaaagaagactcgagctctgggctcatgaacactctcctgaatggacacaagggtggggactgcgatggcttctccaccttcgatgttcccatcttcactgaagagttcttggaccaaaacaaagcgcgtgaggcggagcttcggcgcttgcggaagatgaatgtggccttcgaggagcagaacgcggtactgcagaggcacacgcagagcatgagcagcgcgcgcgagcgtctggagcaggagctggcgctggaggagcggaggacgctggcgctgcagcagcagctccaggccgtgcgccaggcgctcaccgccagcttcgcctcactgccggtgccgggcacgggcgaaacgcccacgctgggcactctggacttctacatggcccggcttcacggagccatcgagcgcgaccccgcccagcacgagaagctcatcgtccgcatcaaggaaatcctggcccaggtcgccagcgagcacctgtgaggagtgggcgggcccacgatgcagaggagaagctgtgggcgcggccctgccacaccccaccccgtggacgagaggctgggggtccaccctttggggcctggtcccatcctgcaccttgggggctccagcccccctaaaattaaatttctgcagcatccctttagctttcaatctccccagccccctgaacccggaaaaagcactcgctgcgcgatacacccagaagaacctcacagccgagggtgcccctcctcggaggacagccacgcgctacactggctctccgggccacccccaggacacagggcagacgaaacccacccccagcacacggcaggaccccccaaattactcactacggggggctgtgccataggccacacaggaagctgccttgtggggacttacctggggtgtcccccgcatgcctgtaccccagatgggtgggggccggctttgcccatcctgctctcctccagccgagggaccctggtgggggtggctccttctcactgctggatccggactttttaaataaaaacaagtaaaatttgtgttttaagcttg

SEQ ID NO: 164079 - DNA, 1460 bp, Artificial Sequence
  derived and/or modified sequence
aaagtttctttggaggtccggcccggagcggccatgtcccacggccccaagcagcccggcgcggccgccgcgccggcgggcggcaaggctccgggccagcatgggggcttcgtggtgactgtcaagcaagagcgcggcgagggtccacgcgcgggcgagaaggggtcccacgaggaggagccggtgaagaaacgcggctggcccaagggcaagaagcggaagaagattctgccgaatgggcccaaggcaccggtcacgggctacgtgcgcttcctgaacgagtggagcaagctgcagccaacggaaaagcagcggtacctggatgaggccgagagagagaagcagcagtacatgaaggagctgcgggcgtaccagcagtctgaagcctataagatgtgcacggagaagatccaggagaagaagatcaagaaagaagactcgagctctgggctcatgaacactctcctgaatggacacaagggtggggactgcgatggcttctccaccttcgatgttcccatcttcactgaagagttcttggaccaaaacaaagcgcgtgaggcggagcttcggcgctgaagatgaatgtggccttcgaggagcagaacgcggtactgcagaggcacacgcagagcatgagcagcgcgcgcgagcgtctggagcaggagctggcgctggaggagcggaggacgctggcgctgcagcagcagctccaggccgtgcgccaggcgctcaccgccagcttcgcctcactgccggtgccgggcacgggcgaaacgcccacgctgggcactctggacttctacatggcccggcttcacggagccatcgagcgcgaccccgcccagcacgagaagctcatcgtccgcatcaaggaaatcctggcccaggtcgccagcgagcacctgtgaggagtgggcgggcccacgatgcagaggagaagctgtgggcgcggccctgccacaccccaccccgtggacgagaggctgggggtccacccgggcctggtcccatcctgcaccttgggggctccagcccccctaaaattaaatttctgcagcatccctttagctttcaatctccccagccccctgaacccggaaaaagcactcgcgatacacccagaagaacctcacagccgagggtgcccctcctcggaggacagacgcgctacactggctctccgggccacccccaggacacagggcagacgaaacccacccccagcacacggcaggaccccccaaattactcactacggggggctgtgccataggccacacaggaagctgccttgtggggacttacctggggtgtcccccgcatgcctgtaccccagatgggtgggggccggctttgcccatcctgctctcctccagccgagggaccctggtgggggtggctccttctcactgctggatccggactttttaaataaaaacaagtaaaatttgtgtttt

SEQ ID NO: 164080 - DNA, 711 bp, Artificial Sequence
  derived and/or modified sequence
cgcgactcagcaacctccccaaccaatcgccggccggcgcgccgatcggtccggcccggagcggccatgtcccacggccccaagcagcccggcgcggccgccgcgccggcgggcggcaaggctccgggccagcatgggggcttcgtggtgactgtcaagcaagagcgcggcgagggtccacgcgcgggcgagaaggggtcccacgaggaggagccggtgaagaaacgcggctggcccaagggcaagaagcggaagaagattctgccgaatgggcccaaggcaccggtcacgggctacgtgcgcttcctgaacgagcggcgcgagcagatccgcacgcgccacccggatctgccctttcccgagatcaccaagatgctgggcgccgagtggagcaagctgcagccaacggaaaagcagcggtacctggatgaggccgagagagagaagcagcagtacatgaaggagctgcgggcgtaccagcagtctgaagcctataagatgtgcacggagaagatccaggagaagaagatcaagaaagaagactcgagctctgggctcatgaacactctcctgaatggacacaagggtggggactgcgatggcttctccaccttcgatgttcccatcttcactgaagagttcttggaccaaaacaaagcgcgtgaggcggagcttcggcgcttgcggaagatgaatgtggccttcgaggag

SEQ ID NO: 164081 - DNA, 759 bp, Artificial Sequence
  derived and/or modified sequence
gggaaagtttctttggaggtgaaaacagccgcggaactccgggccctgagagggggcgggggtgcaggggtcccagggccgggccggggtctttcctggcccgggggaaaccggcccaggcctcccggggggggcaatcgcccaacaaaggattcttggggcgcccgccctcgaggacttccctgcccctggatccggcccccccagcgctccgggcccggcatcccggggctctccatcgcggggtaccccagttcgcggtctgccatcgggcagcccgggcgctactcacctccgcccgcgtccgtgttccaggtccggcccggagcggccatgtcccacggccccaagcagcccggcgcggccgccgcgccggcgggcggcaaggctccgggccagcatgggggcttcgtggtgactgtcaagcaagagcgcggcgagggtccacgcgcgggcgagaaggggtcccacgaggaggagccggtgaagaaacgcggctggcccaagggcaagaagcggaagaagattctgccgaatgggcccaaggcaccggtcacgggctacgtgcgcttcctgaacgagcggcgcgagcagatccgcacgcgccacccggatctgccctttcccgagatcaccaagatgctgggcgccgagtggagcaagctgcagccaacggaaaagcagcggtacctggatgaggccgagagagagaagcagcagtacatgaaggagctgcgggcgtaccagcagtctgaagcc

SEQ ID NO: 164082 - DNA, 954 bp, Artificial Sequence
  derived and/or modified sequence
atgagccacggccccaagcagcccggggctgctgctgccccagctgggggcaaggcccctggccagcacggcggctttgtggtgacagtgaagcaggagcggggggagggcccccgggccggggagaagggcagccatgaggaggagcctgtgaagaagaggggctggcccaagggcaagaagaggaagaagatcctgcccaacggccccaaggcccctgtgacaggctacgtgcgcttcctgaatgaaagaagagagcagatccgcaccaggcacccagacctgcccttccctgagatcaccaagatgctgggcgctgagtggagcaagctgcagcccacagagaagcagcgctacctggatgaagctgagcgggagaagcagcagtacatgaaggagctgcgggcctaccagcagagcgaggcctacaagatgtgcacagagaagatccaggagaagaagatcaagaaggaggacagcagcagcggcctgatgaacaccctgctgaatggccacaagggcggggactgtgatggcttcagcacctttgatgtgcccatcttcacagaggagttcctggaccagaacaaggcccgggaggccgagctgcggcggctgaggaagatgaatgtggcctttgaggagcagaatgctgtgctgcagaggcacacccagagcatgagcagcgcccgggagcggctggagcaggagctggccctggaggagaggaggaccctggccctgcagcagcagctgcaggccgtgcggcaggccctgacagccagctttgccagcctgcctgtgcccggcactggagagacccccaccctgggcaccctggacttctacatggcccggctgcacggggccatcgagcgggaccctgcccagcacgagaagctgattgtgcgcatcaaggagatcctggcccaggtggccagcgagcacctgtag

SEQ ID NO: 164083 - DNA, 648 bp, Artificial Sequence
  derived and/or modified sequence
atgagccacggccccaagcagcccggggctgctgctgccccagctgggggcaaggcccctggccagcacggcggctttgtggtgacagtgaagcaggagcggggggagggcccccgggccggggagaagggcagccatgaggaggagcctgtgaagaagaggggctggcccaagggcaagaagaggaagaagatcctgcccaacggccccaaggcccctgtgacaggctacgtgcgcttcctgaatgaaagaagagagcagatccgcaccaggcacccagacctgcccttccctgagatcaccaagatgctgggcgctgagtggagcaagctgcagcccacagagaagcagcgctacctggatgaagctgagcgggagaagcagcagtacatgaaggagctgcgggcctaccagcagagcgaggcctacaagatgtgcacagagaagatccaggagaagaagatcaagaaggaggacagcagcagcggcctgatgaacaccctgctgaatggccacaagggcggggactgtgatggcttcagcacctttgatgtgcccatcttcacagaggagttcctggaccagaacaaggcccgggaggccgagctgcggcggctgaggaagatgaatgtggcctttgaggagtag

SEQ ID NO: 164084 - DNA, 429 bp, Artificial Sequence
  derived and/or modified sequence
atgagccacggccccaagcagcccggggctgctgctgccccagctgggggcaaggcccctggccagcacggcggctttgtggtgacagtgaagcaggagcggggggagggcccccgggccggggagaagggcagccatgaggaggagcctgtgaagaagaggggctggcccaagggcaagaagaggaagaagatcctgcccaacggccccaaggcccctgtgacaggctacgtgcgcttcctgaatgaaagaagagagcagatccgcaccaggcacccagacctgcccttccctgagatcaccaagatgctgggcgctgagtggagcaagctgcagcccacagagaagcagcgctacctggatgaagctgagcgggagaagcagcagtacatgaaggagctgcgggcctaccagcagagcgaggcctag

SEQ ID NO: 164085 - DNA, 954 bp, Artificial Sequence
  derived and/or modified sequence
atgagccacggccccaagcagcccggcgccgccgccgcccccgccggcggcaaagctccagggcagcatggcgggttcgtcgtcaccgtgaagcaggagcgtggcgaaggtccacgcgcaggggagaagggctcccatgaagaggagccggtcaaaaagcgcggatggcccaaggggaaaaagcgcaagaagattttgcccaatggcccaaaggcgccggttactgggtatgtccggttcctcaatgagcgcagggagcagatcaggacccgccacccggacctccccttccctgaaatcactaagatgctgggcgcggaatggtctaagctacagcctaccgaaaaacagcgctatttagatgaagcagagcgggagaagcagcaatatatgaaggagttgagagcctatcaacagagtgaggcctacaagatgtgtactgagaaaattcaagagaagaagatcaaaaaggaagacagtagcagcggcttgatgaacactctacttaacggtcacaaaggcggcgattgcgacgggttttcaacattcgatgtgcccatctttaccgaagagttcctggaccagaacaaagctcgggaggcggagctgagacgtctgaggaaaatgaacgttgccttcgaggaacagaacgcagttctacaacgtcacacgcaatcaatgtcaagcgctcgagaaaggctggagcaggaactcgccctcgaagagaggcggaccctcgctctccaacagcagctgcaagccgtccggcaggccctcacagcctcattcgccagtcttccagtgccaggtactggcgagaccccaaccttaggcactctggacttctatatggctcgcctgcatggagccattgagcgagaccctgcacagcatgaaaagctgatagtgcggattaaagagatactcgcacaggtcgcctcggagcatctctag

SEQ ID NO: 164086 - DNA, 648 bp, Artificial Sequence
  derived and/or modified sequence
atgagccacggccccaagcagcccggcgccgccgccgcccccgccgggggtaaggctcctggccagcatggggggttcgtcgtcaccgtgaagcaggagaggggggagggccctcgggccggagaaaaaggaagtcatgaagaagagcccgtcaaaaaaaggggttggccaaagggaaagaagcgtaagaagatcctccctaacggaccaaaggctcccgtaaccgggtatgtccgctttctgaacgagaggcgggaacagatccgcacaaggcaccccgacctgccctttccagagataaccaagatgctgggtgctgaatggtcgaaactccagcctaccgagaaacaacgctacttggacgaggccgagcgggagaagcagcagtacatgaaagagctgcgcgcttatcaacagagcgaggcatacaaaatgtgcaccgaaaagatccaagagaagaagattaagaaagaggatagcagttctggcctgatgaacacactccttaatgggcataagggcggtgactgtgacgggttctctacatttgacgtaccaatcttcacagaagagtttcttgatcaaaataaagcccgcgaggctgagctgcgaagattgcggaagatgaacgtagccttcgaagaatag

SEQ ID NO: 164087 - DNA, 429 bp, Artificial Sequence
  derived and/or modified sequence
atgagccacggccccaagcagcccggcgccgccgccgcccccgccggcggtaaggctccgggtcagcacgggggcttcgtcgttaccgtgaagcaggaacggggcgaaggtccccgcgcaggggagaaaggtagccacgaagaagagcccgttaagaagagaggctggccgaaggggaagaagcgcaagaagatactgccaaatggtcccaaagctcccgtgacgggctacgttcgtttcttgaacgaaaggagagaacagatcaggaccaggcatcccgatctgccttttccagagattacaaagatgctgggagcagagtggagtaagttgcagcccacggagaagcagcgctatctggacgaggccgaacgcgagaaacagcagtacatgaaggagctgcgcgcttaccagcaatccgaagcttag

SEQ ID NO: 164088 - DNA, 954 bp, Artificial Sequence
  derived and/or modified sequence
atgtcacacggtcccaaacagccaggggcagccgcagctccggcaggcggtaaggcacctggccaacacggaggattcgtagtcacagttaagcaagagcgaggcgaagggccacgcgctggagagaaaggctcgcacgaggaagaacctgtgaaaaagaggggctggccaaaaggaaaaaaaaggaaaaaaattttgccgaacggaccaaaagccccagtgactggttacgtgagattcctgaacgaacgacgcgagcagataaggacccggcaccccgatctccccttcccagaaatcaccaagatgcttggcgctgaatggagtaagctgcagccgactgagaaacagaggtacctggatgaggcagaacgggaaaagcagcagtacatgaaggagctgagagcttatcagcagtctgaagcttataaaatgtgcacagagaaaatccaggagaaaaagataaagaaggaggactctagctctggcctgatgaacacactgctgaacggccacaaaggcggtgattgcgacgggttttccacgtttgatgttcctatttttacagaggaattcctggatcagaataaggccagggaggccgagttacggcgattgagaaagatgaatgtggcatttgaagagcagaacgcagtgcttcagaggcacacccaaagcatgtcaagtgctcgagaacgcctagaacaggagctggcccttgaagaaagaaggaccctagcactccaacagcagttgcaggccgtgagacaggcactgacagcgagcttcgcgagtctgcctgtccccggaacaggcgaaactccgactctgggcaccctggatttctatatggctcgccttcacggagccattgaacgagatcctgctcagcacgaaaagctcatagttcggattaaggagatcctggcacaagtcgctagcgaacacctgtag

SEQ ID NO: 164089 - DNA, 648 bp, Artificial Sequence
  derived and/or modified sequence
atgtcccacgggccaaaacagcccggagccgctgccgctccagcaggcggaaaagcaccaggccagcatggcggttttgtggttaccgtcaagcaggagcgaggcgaaggacctcgagctggcgagaagggctctcacgaagaggagccagttaagaagcgcggatggcctaagggtaaaaaacgtaagaagatcctgcccaatggtcccaaggccccagtgaccggctatgttagatttttgaacgagcgcagagagcaaatccgcactcgtcatcctgacctaccctttccggagataacaaaaatgctcggggcagagtggtctaagctgcagcccactgaaaagcaacgttatctggacgaggcagaacgcgagaagcagcagtatatgaaggagttgagagcctaccaacagagcgaagcctataagatgtgtacagaaaagatccaagaaaagaaaatcaagaaagaggatagttcttcagggctgatgaatacgctcctgaatggccataaaggcggagattgcgacggattcagtactttcgacgtccctatctttactgaagagtttctggatcagaataaagctagagaggcggagctgagaagattgcggaaaatgaacgttgcttttgaggagtag

SEQ ID NO: 164090 - DNA, 429 bp, Artificial Sequence
  derived and/or modified sequence
atgtcacatggtcccaaacagcctggggcagcggctgcccctgcaggcggaaaagcgccagggcaacacggaggctttgttgtaaccgtgaagcaggagagaggtgaaggacccagggccggagagaaaggcagtcacgaagaggagcccgtgaagaagcgtggctggcctaaagggaaaaagaggaagaaaattctccctaatggcccaaaggcccctgtaaccggttacgttcgcttcctcaacgaaaggcgcgaacagatcaggactcgtcatcctgatctcccattcccagagatcaccaagatgctcggggcagagtggtccaaactgcaacctaccgaaaagcagagatacctcgacgaggccgagagagaaaaacaacaatatatgaaggagctccgcgcttaccagcagagtgaggcttag

SEQ ID NO: 164091 - DNA, 954 bp, Artificial Sequence
  derived and/or modified sequence
atgagccacggccccaagcagcccggcgccgccgccgcccccgccggcggcaaggcccccggccagcacggcggcttcgtggtgaccgtgaagcaggagagaggcgagggccccagagccggcgagaagggcagccacgaggaggagcccgtgaagaagagaggctggcccaagggcaagaagagaaagaagatcctgcccaacggccccaaggcccccgtgaccggctacgtgagattcctgaacgagagaagagagcagatcagaaccagacaccccgacctgcccttccccgagatcaccaagatgctgggcgccgagtggagcaagctgcagcccaccgagaagcagagatacctggacgaggccgagagagagaagcagcagtacatgaaggagctgagagcctaccagcagagcgaggcctacaagatgtgcaccgagaagatccaggagaagaagatcaagaaggaggacagcagcagcggcctgatgaacaccctgctgaacggccacaagggcggcgactgcgacggcttcagcaccttcgacgtgcccatcttcaccgaggagttcctggaccagaacaaggccagagaggccgagctgagaagactgagaaagatgaacgtggccttcgaggagcagaacgccgtgctgcagagacacacccagagcatgagcagcgccagagagagactggagcaggagctggccctggaggagagaagaaccctggccctgcagcagcagctgcaggccgtgagacaggccctgaccgccagcttcgccagcctgcccgtgcccggcaccggcgagacccccaccctgggcaccctggacttctacatggccagactgcacggcgccatcgagagagaccccgcccagcacgagaagctgatcgtgagaatcaaggagatcctggcccaggtggccagcgagcacctgtag

SEQ ID NO: 164092 - DNA, 648 bp, Artificial Sequence
  derived and/or modified sequence
atgagccacggccccaagcagcccggcgccgccgccgcccccgccggcggcaaggcccccggccagcacggcggcttcgtggtgaccgtgaagcaggagagaggcgagggccccagagccggcgagaagggcagccacgaggaggagcccgtgaagaagagaggctggcccaagggcaagaagagaaagaagatcctgcccaacggccccaaggcccccgtgaccggctacgtgagattcctgaacgagagaagagagcagatcagaaccagacaccccgacctgcccttccccgagatcaccaagatgctgggcgccgagtggagcaagctgcagcccaccgagaagcagagatacctggacgaggccgagagagagaagcagcagtacatgaaggagctgagagcctaccagcagagcgaggcctacaagatgtgcaccgagaagatccaggagaagaagatcaagaaggaggacagcagcagcggcctgatgaacaccctgctgaacggccacaagggcggcgactgcgacggcttcagcaccttcgacgtgcccatcttcaccgaggagttcctggaccagaacaaggccagagaggccgagctgagaagactgagaaagatgaacgtggccttcgaggagtag

SEQ ID NO: 164093 - DNA, 429 bp, Artificial Sequence
  derived and/or modified sequence
atgagccacggccccaagcagcccggcgccgccgccgcccccgccggcggcaaggcccccggccagcacggcggcttcgtggtgaccgtgaagcaggagagaggcgagggccccagagccggcgagaagggcagccacgaggaggagcccgtgaagaagagaggctggcccaagggcaagaagagaaagaagatcctgcccaacggccccaaggcccccgtgaccggctacgtgagattcctgaacgagagaagagagcagatcagaaccagacaccccgacctgcccttccccgagatcaccaagatgctgggcgccgagtggagcaagctgcagcccaccgagaagcagagatacctggacgaggccgagagagagaagcagcagtacatgaaggagctgagagcctaccagcagagcgaggcctag

SEQ ID NO: 164094 - protein, 838 aa, Artificial Sequence
  derived and/or modified sequence
MSLQVLNDKNVSNEKNTENCDFLFSPPEVTGRSSVLRVSQKENVPPKNLAKAMKVTFQTPLRDPQTHRILSPSMASKLEAPFTQDDTLGLENSHPVWTQKENQQLIKEVDAKTTHGILQKPVEADTDLLGDASPAFGSGSSSESGPGALADLDCSSSSQSPGSSENQMVSPGKVSGSPEQAVEENLSSYSLDRRVTPASETLEDPCRTESQHKAETPHGAEEECKAETPHGAEEECRHGGVCAPAAVATSPPGAIPKEACGGAPLQGLPGEALGCPAGVGTPVPADGTQTLTCAHTSAPESTAPTNHLVAGRAMTLSPQEEVAAGQMASSSRSGPVKLEFDVSDGATSKRAPPPRRLGERSGLKPPLRKAAVRQQKAPQEVEEDDGRSGAGEDPPMPASRGSYHLDWDKMDDPNFIPFGGDTKSGCSEAQPPESPETRLGQPAAEQLHAGPATEEPGPCLSQQLHSASAEDTPVVQLAAETPTAESKERALNSASTSLPTSCPGSEPVPTHQQGQPALELKEESFRDPAEVLGTGAEVDYLEQFGTSSFKESALRKQSLYLKFDPLLRDSPGRPVPVATETSSMHGANETPSGRPREAKLVEFDFLGALDIPVPGPPPGVPAPGGPPLSTGPIVDLLQYSQKDLDAVVKATQEENRELRSRCEELHGKNLELGKIMDRFEEVVYQAMEEVQKQKELSKAEIQKVLKEKDQLTTDLNSMEKSFSDLFKRFEKQKEVIEGYRKNEESLKKCVEDYLARITQEGQRYQALKAHAEEKLQLANEEIAQVRSKAQAEALALQASLRKEQMRIQSLEKTVEQKTKENEELTRICDDLISKMEKI

SEQ ID NO: 164095 - protein, 231 aa, Artificial Sequence
  derived and/or modified sequence
MSLQVLNDKNVSNEKNTENCDFLFSPPEVTGRSSVLRVSQKENVPPKNLAKAMKVTFQTPLRDPQTHRILSPSMASKLEAPFTQDDTLGLENSHPVWTQKENQQLIKEVDAKTTHGILQKPVEADTDLLGDASPAFGSGSSSESGPGALADLDCSSSSQSPGSSENQMVSPGKVSGSPEQAVEENLSSYSLDRRVTPASETLEDPCRTESQHKAETPHGAEEECKAETPHG

SEQ ID NO: 164096 - DNA, 2517 bp, Artificial Sequence
  derived and/or modified sequence
atgagcctgcaggtgctgaacgacaagaacgtgagcaacgagaagaacaccgagaactgcgacttcctgttcagcccccccgaggtgaccggcagaagcagcgtgctgagagtgagccagaaggagaacgtgccccccaagaacctggccaaggccatgaaggtgaccttccagacccccctgagagacccccagacccacagaatcctgagccccagcatggccagcaagctggaggcccccttcacccaggacgacaccctgggcctggagaacagccaccccgtgtggacccagaaggagaaccagcagctgatcaaggaggtggacgccaagaccacccacggcatcctgcagaagcccgtggaggccgacaccgacctgctgggcgacgccagccccgccttcggcagcggcagcagcagcgagagcggccccggcgccctggccgacctggactgcagcagcagcagccagagccccggcagcagcgagaaccagatggtgagccccggcaaggtgagcggcagccccgagcaggccgtggaggagaacctgagcagctacagcctggacagaagagtgacccccgccagcgagaccctggaggacccctgcagaaccgagagccagcacaaggccgagaccccccacggcgccgaggaggagtgcaaggccgagaccccccacggcgccgaggaggagtgcagacacggcggcgtgtgcgcccccgccgccgtggccaccagcccccccggcgccatccccaaggaggcctgcggcggcgcccccctgcagggcctgcccggcgaggccctgggctgccccgccggcgtgggcacccccgtgcccgccgacggcacccagaccctgacctgcgcccacaccagcgcccccgagagcaccgcccccaccaaccacctggtggccggcagagccatgaccctgagcccccaggaggaggtggccgccggccagatggccagcagcagcagaagcggccccgtgaagctggagttcgacgtgagcgacggcgccaccagcaagagagcccccccccccagaagactgggcgagagaagcggcctgaagccccccctgagaaaggccgccgtgagacagcagaaggccccccaggaggtggaggaggacgacggcagaagcggcgccggcgaggacccccccatgcccgccagcagaggcagctaccacctggactgggacaagatggacgaccccaacttcatccccttcggcggcgacaccaagagcggctgcagcgaggcccagccccccgagagccccgagaccagactgggccagcccgccgccgagcagctgcacgccggccccgccaccgaggagcccggcccctgcctgagccagcagctgcacagcgccagcgccgaggacacccccgtggtgcagctggccgccgagacccccaccgccgagagcaaggagagagccctgaacagcgccagcaccagcctgcccaccagctgccccggcagcgagcccgtgcccacccaccagcagggccagcccgccctggagctgaaggaggagagcttcagagaccccgccgaggtgctgggcaccggcgccgaggtggactacctggagcagttcggcaccagcagcttcaaggagagcgccctgagaaagcagagcctgtacctgaagttcgaccccctgctgagagacagccccggcagacccgtgcccgtggccaccgagaccagcagcatgcacggcgccaacgagacccccagcggcagacccagagaggccaagctggtggagttcgacttcctgggcgccctggacatccccgtgcccggccccccccccggcgtgcccgcccccggcggcccccccctgagcaccggccccatcgtggacctgctgcagtacagccagaaggacctggacgccgtggtgaaggccacccaggaggagaacagagagctgagaagcagatgcgaggagctgcacggcaagaacctggagctgggcaagatcatggacagattcgaggaggtggtgtaccaggccatggaggaggtgcagaagcagaaggagctgagcaaggccgagatccagaaggtgctgaaggagaaggaccagctgaccaccgacctgaacagcatggagaagagcttcagcgacctgttcaagagattcgagaagcagaaggaggtgatcgagggctacagaaagaacgaggagagcctgaagaagtgcgtggaggactacctggccagaatcacccaggagggccagagataccaggccctgaaggcccacgccgaggagaagctgcagctggccaacgaggagatcgcccaggtgagaagcaaggcccaggccgaggccctggccctgcaggccagcctgagaaaggagcagatgagaatccagagcctggagaagaccgtggagcagaagaccaaggagaacgaggagctgaccagaatctgcgacgacctgatcagcaagatggagaagatctag

SEQ ID NO: 164097 - DNA, 2517 bp, Artificial Sequence
  derived and/or modified sequence
atgtcacttcaagtgctcaatgataaaaacgtgtctaacgaaaagaacaccgagaattgcgactttttgttctcaccgcccgaagtgacggggcggtcctcagtcctgcgagttagccagaaagagaatgtcccgcccaaaaacttagcaaaagcaatgaaggtaaccttccagactcctctccgggatccacaaacacaccgcatcctgagcccatcaatggctagcaagctagaggcgccgtttacccaggatgacacccttggcctggagaacagccacccagtttggacacagaaagagaaccagcaactaatcaaagaagtggatgctaaaacaactcacggcatcctgcagaaaccagtagaggctgacacggatctgctgggtgatgcatcccctgcctttggctccggatcaagttccgagtcaggcccgggcgcacttgccgatctcgattgttccagttcatcacaaagcccaggttcatcggaaaatcagatggtctccccgggcaaggtctccggatcccccgaacaggctgtggaagagaacctgagcagctacagtcttgataggcgagtcactcctgcatctgaaaccctggaagatccatgtcgcaccgagtctcaacataaagctgaaactcctcacggagcggaagaggaatgtaaggccgagacaccccacggtgccgaggaagaatgccgacacggtggcgtttgcgcaccagcagcagtggcaacaagtccccctggcgcaataccaaaagaagcttgcggaggcgctccattgcagggtcttcccggtgaagctctgggctgcccagcaggggtggggactcccgtgcctgccgatggaacacagaccctcacctgtgcccacacgtccgcgccggagagtacagcccccacgaaccacctggtcgccggcagggccatgactttgtctcctcaagaagaggtcgccgccggacagatggcgtcctcctcccggtctgggccagtgaagctcgagttcgatgtgtccgacggtgctacaagcaaacgcgccccaccaccccgcaggttgggcgagcggagtgggctaaaacctcctttgcgtaaggcagccgttcgacagcagaaggctccccaagaagttgaagaagacgatggcagaagcggcgccggggaggacccccccatgcccgcatcacggggatcatatcacctggactgggataagatggatgaccctaactttataccttttggcggagatactaaatccggatgctccgaggcacagcctccagaaagtcccgaaactagattgggccaacctgcggcagagcaattgcacgcaggaccagctacggaagaaccaggaccgtgcctgtctcagcagttgcactctgccagcgcagaggacaccccagtcgtgcagctggcagccgaaacgcccacagctgagtccaaagaacgtgctcttaatagtgcatccacatcacttcccacttcatgccccggaagcgagccagtgcccacccatcagcagggccagccagctcttgagctcaaggaggaatcattcagagaccccgctgaagtgctgggtaccggtgccgaagttgactacctggagcagttcggaacgtccagctttaaggagtcggcactgcggaagcaatccctgtatctgaagtttgaccccctgctcagggacagccctggccgacctgtgcccgtggcaactgagacatcgtcaatgcatggtgcaaacgaaacaccttctgggcggcctcgggaggctaagctggtggagtttgatttcttaggtgccctcgacatcccggtgccggggccgcctcctggcgtccctgcgccaggaggcccaccattatcaactggcccaatcgtggacctgttacaatactcacagaaggatctcgatgccgtcgttaaggccactcaggaagaaaatcgggaactccgctctcgctgcgaagaactgcacggaaagaacctagaactgggaaagatcatggatcggtttgaggaggtggtctatcaggccatggaggaggtccagaagcaaaaagagctgtctaaagcagagattcagaaggtgctgaaagaaaaggaccaactaacgaccgatcttaactccatggagaaatcttttagtgacctgtttaagaggttcgagaaacaaaaagaggtaattgagggatatcgtaagaatgaggaaagcctgaaaaagtgcgttgaagattatctggcacgcattacccaggaaggtcaacggtatcaagccctcaaagcccacgctgaggaaaaattgcagttggctaacgaggagattgcccaggtgcggtctaaagcacaggccgaggcactcgcattacaggcttctctacggaaagaacagatgaggatccaatctctggagaagacagtggagcaaaagacaaaagaaaatgaagaactgacacgaatatgtgacgacctcatcagcaagatggaaaaaatttag

SEQ ID NO: 164098 - DNA, 2517 bp, Artificial Sequence
  derived and/or modified sequence
atgagcctgcaggtgctgaatgacaagaatgtgtccaatgagaagaacacagagaactgtgacttcctgttcagccccccagaggtgacaggccgcagctctgtgctgcgggtgtcccagaaggaaaatgtgccccccaagaacctggccaaggccatgaaggtgaccttccagacccccctgcgggacccccagacccaccgcatcctgagccccagcatggccagcaagctggaggcccccttcacccaggatgacaccctgggcctggagaacagccaccctgtgtggacccagaaggagaaccagcagctgatcaaggaggtggatgccaagaccacccacggcatcctgcagaagcctgtggaggccgacacagacctgctgggagatgccagccctgccttcggcagcggcagcagcagcgagagcggccctggggccctggccgacctggactgcagcagcagcagccagagccctggcagcagcgagaaccagatggtgtccccaggcaaggtgtctggcagccctgagcaggccgtggaggagaacctgagcagctacagcctggacagaagagtgaccccagccagcgagaccctggaggacccctgcaggacagagagccagcacaaggccgagaccccccacggggctgaggaggagtgcaaggccgagaccccccacggggctgaggaggagtgccgccacggcggcgtgtgtgccccagctgctgtggccaccagccccccaggggccatccccaaggaggcctgtggcggggcccccctgcagggcctgcctggagaggccctgggctgcccagctggggtgggcacccctgtgcctgcagatggcacccagaccctgacctgtgcccacaccagcgcccctgagagcacagcccccaccaaccacctggtggccggccgggccatgaccctgagcccccaggaggaggtggccgccggccagatggccagcagcagccgcagcggccctgtgaagctggagtttgatgtgtctgatggagccaccagcaagagggcccccccaccccggcggctgggggagaggagcggcctgaagccacccctgaggaaggctgctgtgcggcagcagaaggccccccaggaggtggaggaggatgatggccgcagcggggccggggaggacccccccatgcctgccagccggggcagctaccacctggactgggacaagatggatgaccccaacttcatcccctttggaggagacaccaagagcggctgcagcgaggcccagcccccagagagccctgagacccggctgggccagcctgctgctgagcagctgcatgctggccctgccacagaggagcccggcccctgcctgagccagcagctgcacagcgccagcgctgaggacacccctgtggtgcagctggccgctgagacccccacagctgagagcaaggagcgggccctgaacagcgccagcaccagcctgcccaccagctgccccggcagcgagcctgtgcccacccaccagcagggccagcctgccctggagctgaaggaggagagcttccgggaccctgctgaggtgctgggcaccggggctgaggtggactacctggagcagtttggcaccagcagcttcaaggagagcgccctgaggaagcagagcctgtacctgaagtttgaccccctgctgcgggacagccctggccggcctgtgcctgtggccacagagaccagctccatgcatggagccaatgagacccccagcggccggccccgggaggccaagctggtggagtttgacttcctgggcgccctggacatccctgtgcccggccccccacctggggtgcctgcccctgggggcccccccctgagcacaggccccatcgtggacctgctgcagtacagccagaaggacctggatgctgtggtgaaggccacccaggaggagaaccgggagctgcggagccgctgtgaggagctgcacggcaagaacctggagctgggcaagatcatggacagatttgaggaggtggtgtaccaggccatggaggaggtgcagaagcagaaggagctgagcaaggccgagatccagaaggtgctgaaggagaaggaccagctgaccacagacctgaacagcatggagaagagcttcagtgacctcttcaagagatttgagaagcagaaggaggtgattgagggctacaggaagaatgaggagagcctgaagaagtgtgtggaggactacctggcccgcatcacccaggagggccagcgctaccaggccctgaaggcccatgctgaggagaagctgcagctggccaatgaggagatcgcccaggtgcgcagcaaggcccaggccgaggccctggccctgcaggccagcctgaggaaggagcagatgaggatccagagcctggagaagacagtggagcagaagaccaaggaaaatgaggagctgacccgcatctgtgatgacctgatcagcaagatggagaagatctag

SEQ ID NO: 164099 - DNA, 2517 bp, Artificial Sequence
  derived and/or modified sequence
atgagcctgcaggtgctgaacgacaagaacgtgagcaacgagaagaatacagagaactgcgacttcctctttagtccccctgaagtgacaggccggagcagtgttctgcgtgtcagccagaaggaaaacgtaccccccaaaaaccttgccaaggccatgaaggtgacattccagacccctttgagggaccctcaaactcaccggattttatccccaagcatggcgagcaaattggaagcaccctttacacaagacgataccctgggcttggagaattctcaccctgtgtggacacagaaagaaaaccagcagctgataaaggaagtggatgcaaaaactacgcacggcatcctgcagaaacccgtggaagctgacaccgatttgttgggagacgctagccccgcctttgggagtggatcttcctcagagtccggccctggagccttggccgatttggattgctcctcctctagccaatctcccgggtcctcggagaatcagatggtgagtccaggtaaagtgtcaggaagccccgagcaggctgtggaggaaaatctgagctcctatagcctagacagacgggtgactccagcttccgagacattggaggacccctgccgcaccgaaagccagcataaggccgagactcctcacggtgctgaggaggaatgcaaggctgagactccacacggagcggaagaagagtgtcgccatggcggcgtgtgcgctcctgctgccgtggccacatctcctcccggggccataccaaaggaagcgtgtgggggggcacccctacaaggcctcccaggagaggcactcgggtgcccggccggcgttggaacacccgtgcccgcagacgggacccagaccctgacttgcgcgcatacaagtgcccctgaaagtaccgcccctacaaatcacctcgtcgcaggaagggccatgaccctgtctcctcaggaagaggttgcagcagggcaaatggcctccagctcacgatctggccctgtcaagttggagtttgacgtgagcgacggcgctacgtccaaacgtgcccctcccccacgccggctgggagaaagatcaggactcaagcccccgctccggaaggcagccgtgcgccagcagaaagcccctcaggaagttgaagaagacgatggccggtcaggtgccggggaagacccccctatgcccgcatctaggggctcctatcatctggactgggacaaaatggatgaccctaattttatacctttcggaggagatacaaagtcagggtgctctgaggctcaaccgcctgaaagccccgaaacccgattgggccagccggcggctgagcaactacatgctggacccgccactgaggaacctggaccttgtctgtcgcagcagctccatagcgcttctgctgaggatacacctgtcgtgcagcttgccgcagagacaccaaccgcggagtccaaagagagagccctgaattctgcctcgacctcactgcctacatcctgccccggaagcgaaccagttccgacacaccaacagggacagccggccctcgagctgaaggaggaaagcttcagagaccccgctgaggtgctgggaaccggcgctgaggtggattacctagagcagttcggtacttccagctttaaggagagcgcactgagaaaacagagcttatatcttaagtttgacccattactgagggattcaccgggtaggcctgtgcctgttgctacagagacctcttcaatgcatggggccaacgaaacaccaagcgggcgcccccgggaagccaagctggtggagttcgactttttaggggccttggatattccggttcccggcccaccccccggtgtgcccgccccaggcgggccaccgctttcaacaggacccatcgtggatctgcttcagtatagtcagaaggacctcgacgctgtcgtcaaagctacccaagaagagaatagagaacttagatctcgatgcgaggagttgcacggcaaaaatctggagctcggcaagatcatggatagattcgaagaagtcgtgtaccaagccatggaggaagtgcagaaacaaaaggagcttagcaaagccgagattcagaaggtgctgaaggaaaaggaccagcttaccaccgatctcaattcgatggagaagtctttttctgacctgttcaaacgcttcgagaagcagaaggaggtcattgaaggttaccgcaaaaacgaagaaagcctgaagaagtgtgttgaggattatctagcccggattacacaggagggccagaggtatcaagctcttaaggcccacgcagaagaaaagctgcagctggctaatgaagagatcgcccaagtaaggtctaaggctcaagcagaagctttagccctgcaagcttccctgcgcaaggagcagatgaggattcagagtttggaaaagacagtggagcagaagaccaaggagaatgaggaactgacacggatatgtgacgacctcatctcaaagatggaaaagatatag

SEQ ID NO: 164100 - DNA, 2517 bp, Artificial Sequence
  derived and/or modified sequence
atgagtttacaggttctcaatgacaaaaacgtctcaaatgaaaaaaacactgagaattgcgatttcctcttctctcctcctgaggtgacaggacgctcaagcgtgctgagggtaagccaaaaggaaaacgttcctccaaagaatcttgctaaagcaatgaaagtcactttccaaaccccattacgtgatcctcagacacatcgtattctgtcaccgtcgatggcctctaagctggaggcaccattcacccaggatgatacactggggctggaaaactcacaccccgtttggactcaaaaggaaaatcaacagctgatcaaagaagtggacgcgaagacgacccacggtatcctgcagaagcccgtggaggctgacacagacctgttgggcgatgccagtcccgcatttggcagtggctcatcttcagaatctggaccaggcgctctggccgacctcgactgctcatcctcgtcccaatcccccggtagttctgagaatcagatggttagccccggtaaggtgtccgggtcacctgagcaagccgtggaagaaaatctgtcctcctacagtctcgaccggcgtgtgacgccagctagtgaaacactggaggatccttgtcgcaccgaatctcagcacaaggctgagacaccgcacggagccgaggaagagtgtaaagccgagactccccacggcgcagaggaagagtgtcgccacgggggtgtgtgcgctcccgctgctgtggccacttctccacccggagctatcccaaaggaggcatgcgggggagcacccctgcaggggctcccgggagaggccttaggttgccccgctggcgtgggcacccctgtcccagccgatggcacccaaacactaacctgcgcccatacttcagcgccagaatcaaccgcgccaactaaccacttggtggctggtcgagctatgactcttagcccccaggaagaagtcgccgctggtcagatggcctcttcatctagaagcggtccagtgaagttggagtttgacgtgagtgacggcgctaccagcaagagagctccgcctccgaggagactgggagagcgcagcggcctcaagcctccactgaggaaagccgcagtgaggcaacagaaggctcctcaggaagtggaggaggacgacggacgatctggcgctggcgaggatcctccaatgccggcatcacgcggttcctatcatctggactgggacaagatggatgacccgaatttcataccattcggcggtgatactaaaagcggttgctctgaagctcagccacctgagtcccctgagacaaggttaggacaaccggctgcggagcagttgcatgctggtccggcaacagaagaacctggcccatgcctttctcagcagctgcattccgccagcgcagaggataccccggtcgtgcaattggccgctgaaactcccaccgccgagagcaaggaacgcgctctcaactccgcaagtacaagcctaccaacatcatgcccgggtagtgaacccgtgcctacacatcagcaggggcagcctgcgctagaattgaaagaagagtcttttcgggatcctgcggaagtcctgggcactggagcagaagtggattacctcgaacaattcggcactagttcattcaaggagagcgccctgcggaagcaatccctgtacctgaaatttgatccgttgctgcgagactcccctgggcgacccgtgcccgttgctacagaaacctcctccatgcatggtgctaacgagacgccttcaggacgcccacgggaagccaagctcgtggagtttgattttctgggagccctggatattcctgtgccgggtcccccaccaggggtgcccgctcctggaggaccgccattatctactggtccaatagtggaccttctccagtattcccagaaagaccttgatgcagtcgttaaggctacacaagaagagaaccgggaactcaggtcgaggtgcgaggagttacatggaaagaacctggagttgggaaaaattatggatcggtttgaggaggtagtataccaggctatggaagaggtacagaagcagaaagagcttagcaaggccgagatccagaaagtgctgaaggagaaggaccaactcacgacagacttaaattcaatggaaaaatcgtttagtgatctgtttaaaagattcgagaagcagaaggaggtcatcgaaggctatcgaaaaaatgaagaaagtcttaaaaagtgcgtggaggattacctggccaggatcactcaggagggccaacggtaccaagcgctcaaggctcatgccgaggagaagctacagctggccaacgaggagattgcacaagtcaggagtaaagctcaggcagaggctttggcccttcaagcctcacttaggaaagagcagatgcgcattcagagcttggaaaagactgtggagcagaagactaaggaaaatgaagagcttacccggatttgcgacgacctgattagcaaaatggagaagatctag

SEQ ID NO: 164101 - DNA, 2781 bp, Artificial Sequence
  derived and/or modified sequence
cggcggtagcagctaggcttggcccccggcgtggagcagacgcggacccctccttcctggcggcggcggcgcgggctcagagcccggcaacgggcgggcgggcagaatgagtctgcaggtcttaaacgacaaaaatgtcagcaatgaaaaaaatacagaaaattgcgacttcctgttttcgccaccagaagttaccggaagatcgtctgttcttcgtgtgtcacagaaagaaaatgtgccacccaagaacctggccaaagctatgaaggtgacttttcagacacctctgcgggatccacagacgcacaggattctaagtcctagcatggccagcaaacttgaggctcctttcactcaggatgacacccttggactggaaaactcacacccggtctggacacagaaagagaaccaacagctcatcaaggaagtggatgccaaaactactcatggaattctacagaaaccagtggaggctgacaccgacctcctgggggatgcaagcccagcctttgggagtggcagctccagcgagtctggcccaggtgccctggctgacctggactgctcaagctcttcccagagcccaggaagttctgagaaccaaatggtgtctccaggaaaagtgtctggcagccctgagcaagccgtggaggaaaaccttagttcctattccttagacagaagagtgacacccgcctctgagaccctagaagacccttgcaggacagagtcccagcacaaagcggagactccgcacggagccgaggaagaatgcaaagcggagactccgcacggagccgaggaggaatgccggcacggtggggtctgtgctcccgcagcagtggccacttcgcctcctggtgcaatccctaaggaagcctgcggaggagcacccctgcagggtctgcctggcgaagccctgggctgccctgcgggtgtgggcacccccgtgccagcagatggcactcagacccttacctgtgcacacacctctgctcctgagagcacagccccaaccaaccacctggtggctggcagggccatgaccctgagtcctcaggaagaagtggctgcaggccaaatggccagctcctcgaggagcggacctgtaaaactagaatttgatgtatctgatggcgccaccagcaaaagggcacccccaccaaggagactgggagagaggtccggcctcaagcctcccttgaggaaagcagcagtgaggcagcaaaaggccccgcaggaggtggaggaggacgacggtaggagcggagcaggagaggacccccccatgccagcttctcggggctcttaccacctcgactgggacaaaatggatgacccaaacttcatcccgttcggaggtgacaccaagtctggttgcagtgaggcccagcccccagaaagccctgagaccaggctgggccagccagcggctgaacagttgcatgctgggcctgccacggaggagccaggtccctgtctgagccagcagctgcattcagcctcagcggaggacacgcctgtggtgcagttggcagccgagaccccaacagcagagagcaaggagagagccttgaactctgccagcacctcgcttcccacaagctgtccaggcagtgagccagtgcccacccatcagcaggggcagcctgccttggagctgaaagaggagagcttcagagaccccgctgaggttctaggcacgggcgcggaggtggattacctggagcagtttggaacttcctcgtttaaggagtcggccttgaggaagcagtccttatacctcaagttcgaccccctcctgagggacagtcctggtagaccagtgcccgtggccaccgagaccagcagcatgcacggtgcaaatgagactccctcaggacgtccgcgggaagccaagcttgtggagttcgatttcttgggagcactggacattcctgtgccaggcccacccccaggtgttcccgcgcctgggggcccacccctgtccaccggacctatagtggacctgctccagtacagccagaaggacctggatgcagtggtaaaggcgacacaggaggagaaccgggagctgaggagcaggtgtgaggagctccacgggaagaacctggaactggggaagatcatggacaggttcgaagaggttgtgtaccaggccatggaggaagttcagaagcagaaggaactttccaaagctgaaatccagaaagttctaaaagaaaaagaccaacttaccacagatctgaactccatggagaagtccttctccgacctcttcaagcgttttgagaaacagaaagaggtgatcgagggctaccgcaagaacgaagagtcactgaagaagtgcgtggaggattacctggcaaggatcacccaggagggccagaggtaccaagccctgaaggcccacgcggaggagaagctgcagctggcaaacgaggagatcgcccaggtccggagcaaggcccaggcggaagcgttggccctccaggccagcctgaggaaggagcagatgcgcatccagtcgctggagaagacagtggagcagaagactaaagagaacgaggagctgaccaggatctgcgacgacctcatctccaagatggagaagatctgacctccacggagccgctgtccccgcccccctgctcccgtctgtctgtcctgtctgattctcttaggtgtcatgttcttttttctgtcttgtcttcaacttttttaaaaactagattgctttgaaaacatgactcaataaaagtttcctttcaatttaaa

SEQ ID NO: 164102 - protein, 999 aa, Artificial Sequence
  derived and/or modified sequence
MGPAPLPLLLGLFLPALWRRAITEAREEAKPYPLFPGPFPGSLQTDHTPLLSLPHASGYQPALMFSPTQPGRPHTGNVAIPQVTSVESKPLPPLAFKHTVGHIILSEHKGVKFNCSISVPNIYQDTTISWWKDGKELLGAHHAITQFYPDDEVTAIIASFSITSVQRSDNGSYICKMKINNEEIVSDPIYIEVQGLPHFTKQPESMNVTRNTAFNLTCQAVGPPEPVNIFWVQNSSRVNEQPEKSPSVLTVPGLTEMAVFSCEAHNDKGLTVSKGVQINIKAIPSPPTEVSIRNSTAHSILISWVPGFDGYSPFRNCSIQVKEADPLSNGSVMIFNTSALPHLYQIKQLQALANYSIGVSCMNEIGWSAVSPWILASTTEGAPSVAPLNVTVFLNESSDNVDIRWMKPPTKQQDGELVGYRISHVWQSAGISKELLEEVGQNGSRARISVQVHNATCTVRIAAVTRGGVGPFSDPVKIFIPAHGWVDYAPSSTPAPGNADPVLIIFGCFCGFILIGLILYISLAIRKRVQETKFGNAFTEEDSELVVNYIAKKSFCRRAIELTLHSLGVSEELQNKLEDVVIDRNLLILGKILGEGEFGSVMEGNLKQEDGTSLKVAVKTMKLDNSSQREIEEFLSEAACMKDFSHPNVIRLLGVCIEMSSQGIPKPMVILPFMKYGDLHTYLLYSRLETGPKHIPLQTLLKFMVDIALGMEYLSNRNFLHRDLAARNCMLRDDMTVCVADFGLSKKIYSGDYYRQGRIAKMPVKWIAIESLADRVYTSKSDVWAFGVTMWEIATRGMTPYPGVQNHEMYDYLLHGHRLKQPEDCLDELYEIMYSCWRTDPLDRPTFSVLRLQLEKLLESLPDVRNQADVIYVNTQLLESSEGLAQGSTLAPLDLNIDPDSIIASCTPRAAISVVTAEVHDSKPHEGRYILNGGSEEWEDLTSAPSAAVTAEKNSVLPGERLVRNGVSWSHSSMLPLGSSLPDELLFADDSSEGSEVLM

SEQ ID NO: 164103 - protein, 556 aa, Artificial Sequence
  derived and/or modified sequence
MKPPTKQQDGELVGYRISHVWQSAGISKELLEEVGQNGSRARISVQVHNATCTVRIAAVTRGGVGPFSDPVKIFIPAHGESYTHAQIARNLHKVRPAYISLTICSSLLQASVSHIFQTMTGLLVSTRLGRLCPLFNSGAWQRRSCAHHLWLLLWILIGLILYISLAIRKRVQETKFGNAFTEEDSELVVNYIAKKSFCRRAIELTLHSLGVSEELQNKLEDVVIDRNLLILGKILGEGEFGSVMEGNLKQEDGTSLKVAVKTMKLDNSSQREIEEFLSEAACMKDFSHPNVIRLLGTSEKCRWVAKRALLICSVPKEKISGVDKNCLQIHIPLQTLLKFMVDIALGMEYLSNRNFLHRDLAARNCMLRDDMTVCVADFGLSKKIYSGDYYRQGRIAKMPVKWIAIESLADRVYTSKSDVWAFGVTMWEIATRGMTPYPGVQNHEMYDYLLHGHRLKQPTAWMNCDQVGMCRGVEPTDTPAQEPFLMWEIVYECTLAGEPIPDRPTFSVLRLQLEKLLESLPDVRNQADVIYVNTQLLESSEGLALHPCSTGLEHRP

SEQ ID NO: 164104 - DNA, 3000 bp, Artificial Sequence
  derived and/or modified sequence
atgggccccgcccccctgcccctgctgctgggcctgttcctgcccgccctgtggagaagagccatcaccgaggccagagaggaggccaagccctaccccctgttccccggccccttccccggcagcctgcagaccgaccacacccccctgctgagcctgccccacgccagcggctaccagcccgccctgatgttcagccccacccagcccggcagaccccacaccggcaacgtggccatcccccaggtgaccagcgtggagagcaagcccctgccccccctggccttcaagcacaccgtgggccacatcatcctgagcgagcacaagggcgtgaagttcaactgcagcatcagcgtgcccaacatctaccaggacaccaccatcagctggtggaaggacggcaaggagctgctgggcgcccaccacgccatcacccagttctaccccgacgacgaggtgaccgccatcatcgccagcttcagcatcaccagcgtgcagagaagcgacaacggcagctacatctgcaagatgaagatcaacaacgaggagatcgtgagcgaccccatctacatcgaggtgcagggcctgccccacttcaccaagcagcccgagagcatgaacgtgaccagaaacaccgccttcaacctgacctgccaggccgtgggcccccccgagcccgtgaacatcttctgggtgcagaacagcagcagagtgaacgagcagcccgagaagagccccagcgtgctgaccgtgcccggcctgaccgagatggccgtgttcagctgcgaggcccacaacgacaagggcctgaccgtgagcaagggcgtgcagatcaacatcaaggccatccccagcccccccaccgaggtgagcatcagaaacagcaccgcccacagcatcctgatcagctgggtgcccggcttcgacggctacagccccttcagaaactgcagcatccaggtgaaggaggccgaccccctgagcaacggcagcgtgatgatcttcaacaccagcgccctgccccacctgtaccagatcaagcagctgcaggccctggccaactacagcatcggcgtgagctgcatgaacgagatcggctggagcgccgtgagcccctggatcctggccagcaccaccgagggcgcccccagcgtggcccccctgaacgtgaccgtgttcctgaacgagagcagcgacaacgtggacatcagatggatgaagccccccaccaagcagcaggacggcgagctggtgggctacagaatcagccacgtgtggcagagcgccggcatcagcaaggagctgctggaggaggtgggccagaacggcagcagagccagaatcagcgtgcaggtgcacaacgccacctgcaccgtgagaatcgccgccgtgaccagaggcggcgtgggccccttcagcgaccccgtgaagatcttcatccccgcccacggctgggtggactacgcccccagcagcacccccgcccccggcaacgccgaccccgtgctgatcatcttcggctgcttctgcggcttcatcctgatcggcctgatcctgtacatcagcctggccatcagaaagagagtgcaggagaccaagttcggcaacgccttcaccgaggaggacagcgagctggtggtgaactacatcgccaagaagagcttctgcagaagagccatcgagctgaccctgcacagcctgggcgtgagcgaggagctgcagaacaagctggaggacgtggtgatcgacagaaacctgctgatcctgggcaagatcctgggcgagggcgagttcggcagcgtgatggagggcaacctgaagcaggaggacggcaccagcctgaaggtggccgtgaagaccatgaagctggacaacagcagccagagagagatcgaggagttcctgagcgaggccgcctgcatgaaggacttcagccaccccaacgtgatcagactgctgggcgtgtgcatcgagatgagcagccagggcatccccaagcccatggtgatcctgcccttcatgaagtacggcgacctgcacacctacctgctgtacagcagactggagaccggccccaagcacatccccctgcagaccctgctgaagttcatggtggacatcgccctgggcatggagtacctgagcaacagaaacttcctgcacagagacctggccgccagaaactgcatgctgagagacgacatgaccgtgtgcgtggccgacttcggcctgagcaagaagatctacagcggcgactactacagacagggcagaatcgccaagatgcccgtgaagtggatcgccatcgagagcctggccgacagagtgtacaccagcaagagcgacgtgtgggccttcggcgtgaccatgtgggagatcgccaccagaggcatgaccccctaccccggcgtgcagaaccacgagatgtacgactacctgctgcacggccacagactgaagcagcccgaggactgcctggacgagctgtacgagatcatgtacagctgctggagaaccgaccccctggacagacccaccttcagcgtgctgagactgcagctggagaagctgctggagagcctgcccgacgtgagaaaccaggccgacgtgatctacgtgaacacccagctgctggagagcagcgagggcctggcccagggcagcaccctggcccccctggacctgaacatcgaccccgacagcatcatcgccagctgcacccccagagccgccatcagcgtggtgaccgccgaggtgcacgacagcaagccccacgagggcagatacatcctgaacggcggcagcgaggagtgggaggacctgaccagcgcccccagcgccgccgtgaccgccgagaagaacagcgtgctgcccggcgagagactggtgagaaacggcgtgagctggagccacagcagcatgctgcccctgggcagcagcctgcccgacgagctgctgttcgccgacgacagcagcgagggcagcgaggtgctgatgtag

SEQ ID NO: 164105 - DNA, 2472 bp, Artificial Sequence
  derived and/or modified sequence
atgaagatcaacaacgaggagatcgtgagcgaccccatctacatcgaggtgcagggcctgccccacttcaccaagcagcccgagagcatgaacgtgaccagaaacaccgccttcaacctgacctgccaggccgtgggcccccccgagcccgtgaacatcttctgggtgcagaacagcagcagagtgaacgagcagcccgagaagagccccagcgtgctgaccgtgcccggcctgaccgagatggccgtgttcagctgcgaggcccacaacgacaagggcctgaccgtgagcaagggcgtgcagatcaacatcaaggccatccccagcccccccaccgaggtgagcatcagaaacagcaccgcccacagcatcctgatcagctgggtgcccggcttcgacggctacagccccttcagaaactgcagcatccaggtgaaggaggccgaccccctgagcaacggcagcgtgatgatcttcaacaccagcgccctgccccacctgtaccagatcaagcagctgcaggccctggccaactacagcatcggcgtgagctgcatgaacgagatcggctggagcgccgtgagcccctggatcctggccagcaccaccgagggcgcccccagcgtggcccccctgaacgtgaccgtgttcctgaacgagagcagcgacaacgtggacatcagatggatgaagccccccaccaagcagcaggacggcgagctggtgggctacagaatcagccacgtgtggcagagcgccggcatcagcaaggagctgctggaggaggtgggccagaacggcagcagagccagaatcagcgtgcaggtgcacaacgccacctgcaccgtgagaatcgccgccgtgaccagaggcggcgtgggccccttcagcgaccccgtgaagatcttcatccccgcccacggctgggtggactacgcccccagcagcacccccgcccccggcaacgccgaccccgtgctgatcatcttcggctgcttctgcggcttcatcctgatcggcctgatcctgtacatcagcctggccatcagaaagagagtgcaggagaccaagttcggcaacgccttcaccgaggaggacagcgagctggtggtgaactacatcgccaagaagagcttctgcagaagagccatcgagctgaccctgcacagcctgggcgtgagcgaggagctgcagaacaagctggaggacgtggtgatcgacagaaacctgctgatcctgggcaagatcctgggcgagggcgagttcggcagcgtgatggagggcaacctgaagcaggaggacggcaccagcctgaaggtggccgtgaagaccatgaagctggacaacagcagccagagagagatcgaggagttcctgagcgaggccgcctgcatgaaggacttcagccaccccaacgtgatcagactgctgggcgtgtgcatcgagatgagcagccagggcatccccaagcccatggtgatcctgcccttcatgaagtacggcgacctgcacacctacctgctgtacagcagactggagaccggccccaagcacatccccctgcagaccctgctgaagttcatggtggacatcgccctgggcatggagtacctgagcaacagaaacttcctgcacagagacctggccgccagaaactgcatgctgagagacgacatgaccgtgtgcgtggccgacttcggcctgagcaagaagatctacagcggcgactactacagacagggcagaatcgccaagatgcccgtgaagtggatcgccatcgagagcctggccgacagagtgtacaccagcaagagcgacgtgtgggccttcggcgtgaccatgtgggagatcgccaccagaggcatgaccccctaccccggcgtgcagaaccacgagatgtacgactacctgctgcacggccacagactgaagcagcccgaggactgcctggacgagctgtacgagatcatgtacagctgctggagaaccgaccccctggacagacccaccttcagcgtgctgagactgcagctggagaagctgctggagagcctgcccgacgtgagaaaccaggccgacgtgatctacgtgaacacccagctgctggagagcagcgagggcctggcccagggcagcaccctggcccccctggacctgaacatcgaccccgacagcatcatcgccagctgcacccccagagccgccatcagcgtggtgaccgccgaggtgcacgacagcaagccccacgagggcagatacatcctgaacggcggcagcgaggagtgggaggacctgaccagcgcccccagcgccgccgtgaccgccgagaagaacagcgtgctgcccggcgagagactggtgagaaacggcgtgagctggagccacagcagcatgctgcccctgggcagcagcctgcccgacgagctgctgttcgccgacgacagcagcgagggcagcgaggtgctgatgtag

SEQ ID NO: 164106 - DNA, 3954 bp, Artificial Sequence
  derived and/or modified sequence
aacctgctgggcccgccgggactcgcccccctgcccgctcctctcctccagccccggccggcctcggctcggcccccggcccgccccttccagccctcggcacctcccgccggccgcttggctccgccactcggcactcactgcccgggccgcccggacagggagcttcgctggcgcgcttggccggcgacaggacaggttcgggacgtccatctgtccatccgtccggagagaaattacagatccgcagccccgggatggggccggccccgctgccgctgctgctgggcctcttcctccccgcgctctggcgtagagctatcactgaggcaagggaagaagccaagccttacccgctattcccgggaccttttccagggagcctgcaaactgaccacacaccgctgttatcccttcctcacgccagtgggtaccagcctgccttgatgttttcaccaacccagcctggaagaccacatacaggaaacgtagccattccccaggtgacctctgtcgaatcaaagcccctaccgcctcttgccttcaaacacacagttggacacataatactttctgaacataaaggtgtcaaatttaattgctcaatcagtgtacctaatatataccaggacaccacaatttcttggtggaaagatgggaaggaattgcttggggcacatcatgcaattacacagttttatccagatgatgaagttacagcaataatcgcttccttcagcataaccagtgtgcagcgttcagacaatgggtcgtatatctgtaagatgaaaataaacaatgaagagatcgtgtctgatcccatctacatcgaagtacaaggacttcctcactttactaagcagcctgagagcatgaatgtcaccagaaacacagccttcaacctcacctgtcaggctgtgggcccgcctgagcccgtcaacattttctgggttcaaaacagtagccgtgttaacgaacagcctgaaaaatccccctccgtgctaactgttccaggcctgacggagatggcggtcttcagttgtgaggcccacaatgacaaagggctgaccgtgtccaagggagtgcagatcaacatcaaagcaattccctccccaccaactgaagtcagcatccgtaacagcactgcacacagcattctgatctcctgggttcctggttttgatggatactccccgttcaggaattgcagcattcaggtcaaggaagctgatccgctgagtaatggctcagtcatgatttttaacacctctgccttaccacatctgtaccaaatcaagcagctgcaagccctggctaattacagcattggtgtttcctgcatgaatgaaataggctggtctgcagtgagcccttggattctagccagcacgactgaaggagccccatcagtagcacctttaaatgtcactgtgtttctgaatgaatctagtgataatgtggacatcagatggatgaagcctccgactaagcagcaggatggagaactggtgggctaccggatatcccacgtgtggcagagtgcagggatttccaaagagctcttggaggaagttggccagaatggcagccgagctcggatctctgttcaagtccacaatgctacgtgcacagtgaggattgcagccgtcaccagagggggagttgggcccttcagtgatccagtgaaaatatttatccctgcacacggttgggtagattatgccccctcttcaactccggcgcctggcaacgcagatcctgtgctcatcatctttggctgcttttgtggatttattttgattgggttgattttatacatctccttggccatcagaaaaagagtccaggagacaaagtttgggaatgcattcacagaggaggattctgaattagtggtgaattatatagcaaagaaatccttctgtcggcgagccattgaacttaccttacatagcttgggagtcagtgaggaactacaaaataaactagaagatgttgtgattgacaggaatcttctaattcttggaaaaattctgggtgaaggagagtttgggtctgtaatggaaggaaatcttaagcaggaagatgggacctctctgaaagtggcagtgaagaccatgaagttggacaactcttcacagcgggagatcgaggagtttctcagtgaggcagcgtgcatgaaagacttcagccacccaaatgtcattcgacttctaggtgtgtgtatagaaatgagctctcaaggcatcccaaagcccatggtaattttacccttcatgaaatacggggacctgcatacttacttactttattcccgattggagacaggaccaaagcatattcctctgcagacactattgaagttcatggtggatattgccctgggaatggagtatctgagcaacaggaattttcttcatcgagatttagctgctcgaaactgcatgttgcgagatgacatgactgtctgtgttgcggacttcggcctctctaagaagatttacagtggcgattattaccgccaaggccgcattgctaagatgcctgttaaatggatcgccatagaaagtcttgcagaccgagtctacacaagtaaaagtgatgtgtgggcatttggcgtgaccatgtgggaaatagctacgcggggaatgactccctatcctggggtccagaaccatgagatgtatgactatcttctccatggccacaggttgaagcagcccgaagactgcctggatgaactgtatgaaataatgtactcttgctggagaaccgatcccttagaccgccccaccttttcagtattgaggctgcagctagaaaaactcttagaaagtttgcctgacgttcggaaccaagcagacgttatttacgtcaatacacagttgctggagagctctgagggcctggcccagggctccacccttgctccactggacttgaacatcgaccctgactctataattgcctcctgcactccccgcgctgccatcagtgtggtcacagcagaagttcatgacagcaaacctcatgaaggacggtacatcctgaatgggggcagtgaggaatgggaagatctgacttctgccccctctgctgcagtcacagctgaaaagaacagtgttttaccgggggagagacttgttaggaatggggtctcctggtcccattcgagcatgctgcccttgggaagctcattgcccgatgaacttttgtttgctgacgactcctcagaaggctcagaagtcctgatgtgaggagaggtgcggggagacattccaaaaatcaagccaattcttctgctgtaggagaatccaattgtacctgatgtttttggtatttgtcttccttaccaagtgaactccatggccccaaagcaccagatgaatgttgttaagtaagctgtcattaaaaatacataatatatatttatttaaagagaaaaaatatgtgtatatcatggaaaaagacaaggatattttaataaaacattacttatttcatttcacttatcttgcatatcttaaaattaagcttcagctgctccttgatattaacatttgtacagagttgaagttgttttttcaagttcttttctttttcatgactattaaatgtaaaaatatttgtaaaatgaaatgccatatttgacttggcttctggtcttgatgtatttgataagaatgattcattcaatgtttaaagttgtataactgattaattttctgatatggcttcctaataaaatatgaataaggaaggatatgttgaacttacttgagacttgaaagacagtggtcggcagcggccttgtggcctttgcaaaggaattcccttaatgcctggtccttggggcaattgctctgaccattcttggcattgctttatagagatatggaaaaaccacaccagggtctgtagataaggaataaagaatattgaaggattgaaaaa

SEQ ID NO: 164107 - DNA, 3810 bp, Artificial Sequence
  derived and/or modified sequence
actcactgcccgggccgcccggacagggagcttcgctggcgcgcttggccggcgacaggacaggttcgggacgtccatctgtccatccgtccggagagaaattacagatccgcagccccgggatggggccggccccgctgccgctgctgctgggcctcttcctccccgcgctctggcgtagagctatcactgaggcaagggaagaagccaagccttacccgctattcccgggaccttttccagggagcctgcaaactgaccacacaccgctgttatcccttcctcacgccagtgggtaccagcctgccttgatgttttcaccaacccagcctggaagaccacatacaggaaacgtagccattccccaggtgacctctgtcgaatcaaagcccctaccgcctcttgccttcaaacacacagttggacacataatactttctgaacataaaggtgtcaaatttaattgctcaatcagtgtacctaatatataccaggacaccacaatttcttggtggaaagatgggaaggaattgcttggggcacatcatgcaattacacagttttatccagatgatgaagttacagcaataatcgcttccttcagcataaccagtgtgcagcgttcagacaatgggtcgtatatctgtaagatgaaaataaacaatgaagagatcgtgtctgatcccatctacatcgaagtacaaggacttcctcactttactaagcagcctgagagcatgaatgtcaccagaaacacagccttcaacctcacctgtcaggctgtgggcccgcctgagcccgtcaacattttctgggttcaaaacagtagccgtgttaacgaacagcctgaaaaatccccctccgtgctaactgttccaggcctgacggagatggcggtcttcagttgtgaggcccacaatgacaaagggctgaccgtgtccaagggagtgcagatcaacatcaaagcaattccctccccaccaactgaagtcagcatccgtaacagcactgcacacagcattctgatctcctgggttcctggttttgatggatactccccgttcaggaattgcagcattcaggtcaaggaagctgatccgctgagtaatggctcagtcatgatttttaacacctctgccttaccacatctgtaccaaatcaagcagctgcaagccctggctaattacagcattggtgtttcctgcatgaatgaaataggctggtctgcagtgagcccttggattctagccagcacgactgaaggagccccatcagtagcacctttaaatgtcactgtgtttctgaatgaatctagtgataatgtggacatcagatggatgaagcctccgactaagcagcaggatggagaactggtgggctaccggatatcccacgtgtggcagagtgcagggatttccaaagagctcttggaggaagttggccagaatggcagccgagctcggatctctgttcaagtccacaatgctacgtgcacagtgaggattgcagccgtcaccagagggggagttgggcccttcagtgatccagtgaaaatatttatccctgcacacggtgagagctatacccatgcacagattgccagaaacttacacaaagtgagacctgcctatatttctttgactatttgttcttccctgttacaagccagtgtttctcatatatttcaaaccatgactggtctattggtatctaccaggttgggtagattatgccccctcttcaactccggcgcctggcaacgcagatcctgtgctcatcatctttggctgcttttgtggattttgattgggttgattttatacatctccttggccatcagaaaaagagtccaggagacaaagtttgggaatgcattcacagaggaggattctgaattagtggtgaattatatagcaaagaaatccttctgtcggcgagccattgaacttaccttacatagcttgggagtcagtgaggaactacaaaataaactagaagatgttgtgattgacaggaatcttctaattcttggaaaaattctgggtgaaggagagtttgggtctgtaatggaaggaaatcttaagcaggaagatgggacctctctgaaagtggcagtgaagaccatgaagttggacaactcttcacagcgggagatcgaggagtttctcagtgaggcagcgtgcatgaaagacttcagccacccaaatgtcattcgacttctaggtacttccgagaaatgcaggtgggtggccaagagggctctgctgatctgctctgtgccaaaggaaaaaatctctggtgtagataaaaactgcttgcaaatacatattcctctgcagacactattgaagttcatggtggatattgccctgggaatggagtatctgagcaacaggaattttcttcatcgagatttagctgctcgaaactgcatgttgcgagatgacatgactgtctgtgttgcggacttcggcctctctaagaagatttacagtggcgattattaccgccaaggccgcattgctaagatgcctgttaaatggatcgccatagaaagtcttgcagaccgagtctacacaagtaaaagtgatgtgtgggcatttggcgtgaccatgtgggaaatagctacgcggggaatgactccctatcctggggtccagaaccatgagatgtatgactatcttctccatggccacaggttgaagcagcccactgcctggatgaactgtgaccaggtgggcatgtgcagaggggtggaacccacagacaccccagcccaggagccattcctgatgtgggagatagtgtatgaatgtactcttgctggagaaccgatccctgaccgccccaccttttcagtattgaggctgcagctagaaaaactcttagaaagtttgcctgacgttcggaaccaagcagacgttatttacgtcaatacacagttgctggagagctctgagggcctggccctccacccttgctccactggacttgaacatcgaccctgactctataattgcctcctgcactccccgcgctgccatcagtgtggtcacagcagaagttcatgacagcaaacctcatgaaggacggtacatcctgaatgggggcagtgaggaatgggaagatctgacttctgccccctctgctgcagtcacagctgaaaagaacagtgttttaccgggggagagacttgttaggaatggggtctcctggtcccattcgagcatgctgcccttgggaagctcattgcccgatgaacttttgtttgctgacgactcctcagaaggctcagaagtcctgatgtgaggagaggtgcggggagacattccaaaaatcaagccaattcttctgctgtaggagaatccaattgtacctgatgtttttggtatttgtcttccttaccaagtgaactccatggccccaaagcaccagatgaatgttgttaagtaagctgtcattaaaaatacataatatatatttatttaaagagaaaaaatatgtgtatatcatggaaaaagacaaggatattttaataaaacattacttatttcatttcacttatcttgcatatcttaaaattaagcttcagctgctccttgatattaacatttgtacagagttgaagttgttttttcaagttcttttctttttcatgactattaaatgtaaaaatatttgtaaaatgaaatgccatatttgacttggcttctggtcttgatgtatttgataagaatgattcattcaatgtttaaagttgtataactgattaattttctgatatggcttcctaataaaatatgaataagg

SEQ ID NO: 164108 - DNA, 3189 bp, Artificial Sequence
  derived and/or modified sequence
cgcccggacagggagcttcgctggcgcgcttggccggcgacaggacaggttcgggacgtccatctgtccatccgtccggagagaaattacagatccgcagccccgggatggggccggccccgctgccgctgctgctgggcctcttcctccccgcgctctggcgtagagcataaccagtgtgcagcgttcagacaatgggtcgtatatctgtaagatgaaaataaacaatgaagagatcgtgtctgatcccatctacatcgaagtacaaggacttcctcactttactaagcagcctgagagcatgaatgtcaccagaaacacagccttcaacctcacctgtcaggctgtgggcccgcctgagcccgtcaacattttctgggttcaaaacagtagccgtgttaacgaacagcctgaaaaatccccctccgtgctaactgttccaggcctgacggagatggcggtcttcagttgtgaggcccacaatgacaaagggctgaccgtgtccaagggagtgcagatcaacatcaaagcaattccctccccaccaactgaagtcagcatccgtaacagcactgcacacagcattctgatctcctgggttcctggttttgatggatactccccgttcaggaattgcagcattcaggtcaaggaagctgatccgctgagtaatggctcagtcatgatttttaacacctctgccttaccacatctgtaccaaatcaagcagctgcaagccctggctaattacagcattggtgtttcctgcatgaatgaaataggctggtctgcagtgagcccttggattctagccagcacgactgaaggagccccatcagtagcacctttaaatgtcactgtgtttctgaatgaatctagtgataatgtggacatcagatggatgaagcctccgactaagcagcaggatggagaactggtgggctaccggatatcccacgtgtggcagagtgcagggatttccaaagagctcttggaggaagttggccagaatggcagccgagctcggatctctgttcaagtccacaatgctacgtgcacagtgaggattgcagccgtcaccagagggggagttgggcccttcagtgatccagtgaaaatatttatccctgcacacggttgggtagattatgccccctcttcaactccggcgcctggcaacgcagatcctgtgctcatcatctttggctgcttttgtggatttattttgattgggttgattttatacatctccttggccatcagaaaaagagtccaggagacaaagtttgggaatgcattcacagaggaggattctgaattagtggtgaattatatagcaaagaaatccttctgtcggcgagccattgaacttaccttacatagcttgggagtcagtgaggaactacaaaataaactagaagatgttgtgattgacaggaatcttctaattcttggaaaaattctgggtgaaggagagtttgggtctgtaatggaaggaaatcttaagcaggaagatgggacctctctgaaagtggcagtgaagaccatgaagttggacaactcttcacagcgggagatcgaggagtttctcagtgaggcagcgtgcatgaaagacttcagccacccaaatgtcattcgacttctaggtgtgtgtatagaaatgagctctcaaggcatcccaaagcccatggtaattttacccttcatgaaatacggggacctgcatacttacttactttattcccgattggagacaggaccaaagcatattcctctgcagacactattgaagttcatggtggatattgccctgggaatggagtatctgagcaacaggaattttcttcatcgagatttagctgctcgaaactgcatgttgcgagatgacatgactgtctgtgttgcggacttcggcctctctaagaagatttacagtggcgattattaccgccaaggccgcattgctaagatgcctgttaaatggatcgccatagaaagtcttgcagaccgagtctacacaagtaaaagtgatgtgtgggcatttggcgtgaccatgtgggaaatagctacgcggggaatgactccctatcctggggtccagaaccatgagatgtatgactatcttctccatggccacaggttgaagcagcccgaagactgcctggatgaactgtatgaaataatgtactcttgctggagaaccgatcccttagaccgccccaccttttcagtattgaggctgcagctagaaaaactcttagaaagtttgcctgacgttcggaaccaagcagacgttatttacgtcaatacacagttgctggagagctctgagggcctggcccagggctccacccttgctccactggacttgaacatcgaccctgactctataattgcctcctgcactccccgcgctgccatcagtgtggtcacagcagaagttcatgacagcaaacctcatgaaggacggtacatcctgaatgggggcagtgaggaatgggaagatctgacttctgccccctctgctgcagtcacagctgaaaagaacagtgttttaccgggggagagacttgttaggaatggggtctcctggtcccattcgagcatgctgcccttgggaagctcattgcccgatgaacttttgtttgctgacgactcctcagaaggctcagaagtcctgatgtgaggagaggtgcggggagacattccaaaaatcaagccaattcttctgctgtaggagaatccaattgtacctgatgtttttggtatttgtcttccttaccaagtgaactccatggccccaaagcaccagatgaatgttgttaagtaagctgtcattaaaaatacataatatatatttatttaaagagaaaaaatatgtgtatatcatggaaaaagacaaggatattttaataaaacattacttatttcatttcacttatcttgcatatcttaaaattaagcttcagctgctccttgatattaacatttgtacagagttgaagttgttttttcaagttcttttctttttcatgactattaaatgtaaaaatatttgtaaaatgaaatgccatatttgacttggcttctggtcttgatgtatttgataagaatgattcattcaatgtttaaagttgtataactgattaattttctgatatggcttcctaataaaatatgaataaggaa

SEQ ID NO: 164109 - DNA, 3600 bp, Artificial Sequence
  derived and/or modified sequence
ctcggcactcactgcccgggccgcccggacagggagcttcgctggcgcgcttggccggcgacaggacaggttcgggacgtccatctgtccatccgtccggagagaaattacagatccgcagccccgggatggggccggccccgctgccgctgctgctgggcctcttcctccccgcgctctggcgtagagctatcactgaggcaagggaagaagccaagccttacccgctattcccgggaccttttccagggagcctgcaaactgaccacacaccgctgttatcccttcctcacgccagtgggtaccagcctgccttgatgttttcaccaacccagcctggaagaccacatacaggaaacgtagccattccccaggtgacctctgtcgaatcaaagcccctaccgcctcttgccttcaaacacacagttggacacataatactttctgaacataaaggtgtcaaatttaattgctcaatcagtgtacctaatatataccaggacaccacaatttcttggtggaaagatgggaaggaattgcttggggcacatcatgcaattacacagttttatccagatgatgaagttacagcaataatcgcttccttcagcataaccagtgtgcagcgttcagacaatgggtcgtatatctgtaagatgaaaataaacaatgaagagatcgtgtctgatcccatctacatcgaagtacaaggacttcctcactttactaagcagcctgagagcatgaatgtcaccagaaacacagccttcaacctcacctgtcaggctgtgggcccgcctgagcccgtcaacattttctgggttcaaaacagtagccgtgttaacgaacagcctgaaaaatccccctccgtgctaactgttccaggcctgacggagatggcggtcttcagttgtgaggcccacaatgacaaagggctgaccgtgtccaagggagtgcagatcaacatcaaagcaattccctccccaccaactgaagtcagcatccgtaacagcactgcacacagcattctgatctcctgggttcctggttttgatggatactccccgttcaggaattgcagcattcaggtcaaggaagctgatccgctgagtaatggctcagtcatgatttttaacacctctgccttaccacatctgtaccaaatcaagcagctgcaagccctggctaattacagcattggtgtttcctgcatgaatgaaataggctggtctgcagtgagcccttggattctagccagcacgactgaaggagccccatcagtagcacctttaaatgtcactgtgtttctgaatgaatctagtgataatgtggacatcagatggatgaagcctccgactaagcagcaggatggagaactggtgggctaccggatatcccacgtgtggcagagtgcagggatttccaaagagctcttggaggaagttggccagaatggcagccgagctcggatctctgttcaagtccacaatgctacgtgcacagtgaggattgcagccgtcaccagagggggagttgggcccttcagtgatccagtgaaaatatttatccctgcacacggttgggtagattatgccccctcttcaactccggcgcctggcaacgcagatcctgtgctcatcatctttggctgcttttgtggatttattttgattgggttgattttatacatctccttggccatcagaaaaagagtccaggagacaaagtttgggaatgcattcacagaggaggattctgaattagtggtgaattatatagcaaagaaatccttctgtcggcgagccattgaacttaccttacatagcttgggagtcagtgaggaactacaaaataaactagaagatgttgtgattgacaggaatcttctaattcttggaaaaattctgggtgaaggagagtttgggtctgtaatggaaggaaatcttaagcaggaagatgggacctctctgaaagtggcagtgaagaccatgaagttggacaactcttcacagcgggagatcgaggagtttctcagtgaggcagcgtgcatgaaagacttcagccacccaaatgtcattcgacttctaggtgtgtgtatagaaatgagctctcaaggcatcccaaagcccatggtaattttacccttcatgaaatacggggacctgcatacttacttactttattcccgattggagacaggaccaaagcatattcctctgcagacactattgaagttcatggtggatattgccctgggaatggagtatctgagcaacaggaattttcttcatcgagatttagctgctcgaaactgcatgttgcgagatgacatgactgtctgtgttgcggacttcggcctctctaagaagatttacagtggcgattattaccgccaaggccgcattgctaagatgcctgttaaatggatcgccatagaaagtcttgcagaccgagtctacacaagtaaaagtgatgtgtgggcatttggcgtgaccatgtgggaaatagctacgcggggaatgactccctatcctggggtccagaaccatgagatgtatgactatcttctccatggccacaggttgaagcagcccgaagactgcctggatgaactgtatgaaataatgtactcttgctggagaaccgatcccttagaccgccccaccttttcagtattgaggctgcagctagaaaaactcttagaaagtttgcctgacgttcggaaccaagcagacgttatttacgtcaatacacagttgctggagagctctgagggcctggcccagggctccacccttgctccactggacttgaacatcgaccctgactctataattgcctcctgcactccccgcgctgccatcagtgtggtcacagcagaagttcatgacagcaaacctcatgaaggacggtacatcctgaatgggggcagtgaggaatgggaagatctgacttctgccccctctgctgcagtcacagctgaaaagaacagtgttttaccgggggagagacttgttaggaatggggtctcctggtcccattcgagcatgctgcccttgggaagctcattgcccgatgaacttttgtttgctgacgactcctcagaaggctcagaagtcctgatgtgaggagaggtgcggggagacattccaaaaatcaagccaattcttctgctgtaggagaatccaattgtacctgatgtttttggtatttgtcttccttaccaagtgaactccatggccccaaagcaccagatgaatgttgttaagtaagctgtcattaaaaatacataatatatatttatttaaagagaaaaaatatgtgtatatcatggaaaaagacaaggatattttaataaaacattacttatttcatttcacttatcttgcatatcttaaaattaagcttcagctgctccttgatattaacatttgtacagagttgaagttgttttttcaagttcttttctttttcatgactattaaatgtaaaaatatttgtaaaatgaaatgccatatttgacttggcttctggtcttgatgtatttgataagaatgattaattttctgatatggcttcctaataaaatatgaataagga

SEQ ID NO: 164110 - DNA, 3000 bp, Artificial Sequence
  derived and/or modified sequence
atgggaccagctccactccccctattgttgggtttatttctgccggccctatggcgacgtgctattaccgaggcaagggaagaagccaagccctacccactcttcccaggtccttttcccgggagcctacagacagaccacacacccctcttgtctcttccacacgcttctgggtatcagcccgcgttaatgttttcacccacccagcccggtaggcctcacaccgggaacgtggcaattccgcaggtaacctcagtggaaagcaaacctctaccccctctggctttcaaacacactgtgggccacattatattatctgaacacaagggagtcaagtttaattgctcgatcagcgtgcccaatatctaccaggacaccacgatctcttggtggaaggacggcaaagagctcctgggggcacaccacgccataactcagttttatccggacgacgaggtcaccgccattatcgcatctttctctattacgtcggtgcaacggtccgataacggctcctacatatgtaaaatgaaaataaataacgaggagatcgtgtctgacccgatctacattgaagtgcagggactgccacacttcactaaacagccagagtccatgaatgtgaccaggaataccgcctttaacctgacatgtcaagccgtcgggccacccgagccggtcaacatcttttgggtgcagaactccagccgggtgaacgaacagccagagaaaagcccctccgtcctcacagttcccggcttgacagaaatggccgtgtttagctgcgaggcccataatgacaagggcctcacagtgagcaaaggggtgcaaatcaatattaaggcaatcccaagccctccaaccgaagtctctattagaaacagtaccgcacactcgatcctaatttcatgggtaccaggttttgacgggtattctccctttagaaactgctcgatacaggtgaaggaggcagatcctctcagcaacggctctgtcatgatcttcaacacaagtgcactcccccatctctatcagataaagcagctgcaggcgctggcgaactatagcatcggcgtcagctgtatgaatgagattggttggtctgcggtatcaccctggattttggctagtactaccgaaggcgcacccagcgtggcgccactgaacgtgactgtctttctcaatgagtctagcgacaatgttgacatacggtggatgaaaccacccaccaagcagcaagatggggaacttgtcgggtaccgcatctctcatgtctggcagtccgctgggatctcaaaagagctcttggaagaggtgggtcagaatgggtccagggccagaatttcggtgcaggtgcacaatgctacttgtactgttcgaattgcagcagttactaggggcggcgtgggtcctttttcggatccagtcaaaattttcataccagcacatgggtgggtggactacgccccatctagtacaccagctccaggaaacgctgatccagttctgataattttcgggtgcttctgcggattcatccttattgggctcattctctacattagccttgccatccgcaaacgagttcaagaaactaaattcgggaatgcctttacagaggaggacagtgaactagtggtgaactacatcgcaaagaagtcgttctgccgcagggccattgaactcacccttcactcattgggagtgtctgaggaactccagaacaagctggaggatgtggtgatcgaccggaacctgctcattcttgggaagattctgggtgaaggcgaatttggcagtgtgatggaaggaaatcttaagcaggaagatgggacctcactgaaggttgcagtaaaaactatgaagttagacaactccagccagagagagattgaggagtttctgtcggaagcagcttgcatgaaagacttctcccaccccaacgtcatacggctgcttggcgtgtgtattgagatgagcagccagggaatcccaaaacccatggttatcttgcctttcatgaagtatggcgaccttcacacctaccttctgtatagccgacttgaaaccggtccaaaacacatcccattacagacccttctgaaattcatggtggacattgcattaggaatggagtacctttccaaccggaacttcctgcacagggacctggccgcccgaaattgcatgttgagggacgacatgaccgtatgcgtcgccgattttggactatccaagaagatatactctggcgactattatagacagggccgaatcgccaagatgcctgttaaatggatcgccatcgagagcttggccgacagggtctacacttcgaagtcagatgtttgggcgtttggcgtaacgatgtgggagatcgcgacgcggggcatgactccctatccgggcgttcagaatcacgaaatgtatgactacctgctgcacggtcaccgcctgaagcagccagaagactgcctggacgaattatatgagatcatgtattcatgctggcggactgaccctctcgatcggcccacattctctgtcctaagactgcaactcgagaagctgctggaatcactgcctgatgtcaggaaccaggctgatgtgatttatgtgaatacccagctgctggagtcctccgagggcctggcccagggcagtactctggctccactagatcttaacattgacccagactccataattgcatcgtgcacaccccgagctgcgatctctgtggttacagcggaggtccatgactccaaaccacatgaagggcgctacattctgaatggaggctcggaagagtgggaggatctgacctcagcccccagcgctgccgtgacggcagagaagaacagtgtgttaccaggggaaagactggtccggaacggggtgagctggagccactcgtccatgctccctctcggtagctcactccctgacgagctgctgttcgccgacgactcaagcgaaggctcggaggtgttgatgtag

SEQ ID NO: 164111 - DNA, 2472 bp, Artificial Sequence
  derived and/or modified sequence
atgaagatcaacaatgaagaaatcgtgtccgaccccatttacatcgaggtgcagggtcttccacatttcaccaaacagcccgaatctatgaatgtgacaagaaatacggcatttaacctgacctgtcaagccgtgggtcccccggagccagtcaatatcttttgggtgcagaattccagccgagtcaatgagcagccagagaagagtccatccgttttaacagttccaggcctgaccgaaatggccgtgttctcctgcgaggcccataatgataagggactaacggtgtccaagggagtccagatcaacataaaggccattccctcccctcctaccgaagtgagcattcgcaattcaacagcccactcgatcctaatcagctgggtgccgggcttcgacggatacagtcctttccgcaactgcagcatacaggtcaaagaagcagatcccttaagtaatggaagtgtgatgatcttcaatacttcggctctgccccatctctaccaaatcaaacagctgcaggccctggcaaattattctatcggcgtgtcctgtatgaacgaaatcggatggagtgccgttagtccctggatcctcgcctccaccaccgagggtgctccatccgtagctcctcttaacgtgacagtgttcctgaacgagtccagcgataacgtggatatccggtggatgaaaccccccaccaaacagcaggacggtgagctggttgggtatagaatctcccatgtgtggcagtccgccggcatcagcaaggaattgcttgaggaggtcggccagaatggctcgagggctcggatcagcgtgcaggtccacaacgctacctgcacggtgcgtatcgcggccgtcacccggggcggcgtgggacctttctcagatccggtaaagatctttattcctgcgcacgggtgggtcgattatgcccctagctctacccccgcacccggcaacgcagatcctgtattgattattttcggatgcttctgtggctttatcctgattggcctgatattgtacatttcccttgcgatcagaaagcgggttcaggagacaaagttcgggaacgccttcacagaggaggatagtgaactggtggtcaactacatcgctaagaaatctttctgccggagagcaatcgagctaacactgcactcgctgggggtgagcgaggaactccagaataagctggaggacgtggttattgatagaaacctgctgattcttggaaaaatccttggcgaaggcgaattcggcagtgtcatggagggtaacctaaaacaggaggacgggacttctctgaaggtggccgtcaagacaatgaagcttgacaactcctcccagcgagaaatcgaggagttcctctccgaggccgcgtgcatgaaggacttttcacaccctaacgtgatacggttactgggagtctgtatagaaatgagctcccagggaatccctaagcctatggtgattcttcccttcatgaaatatggagatttacatacatatctcctgtattctcggttggaaaccggcccaaagcatatccctctgcagactttactgaaattcatggtagacattgcattagggatggaatatctgtccaatcgaaattttctgcaccgagatcttgcagctcggaactgcatgctgagagatgacatgactgtgtgcgtcgcggacttcggactttcgaagaaaatctactccggcgattattaccgccagggacgaatcgccaaaatgccagtaaagtggatcgccatagaaagcttagccgaccgcgtgtacacttctaagagtgatgtttgggcctttggagtgactatgtgggagattgccacaaggggcatgacgccgtatcccggggtccagaaccatgagatgtatgattatctgctgcatgggcataggctcaaacagccagaggactgcctggatgaattatatgagatcatgtacagctgttggcgaaccgacccccttgaccggccaaccttttccgtgctccggctccagttggaaaagcttctcgagagcctacctgatgtcagaaaccaagccgatgtgatctatgttaacacgcagctactggaaagtagtgaaggcctggcccagggaagtaccttggcccctctggatctgaatatagacccggacagtataattgcttcttgtaccccacgcgccgcaatttctgtggtgaccgctgaggtgcatgactctaaaccacatgagggacgttacatcttaaacggaggaagcgaagaatgggaggacctcaccagcgcaccaagcgctgctgtcaccgccgaaaaaaatagcgtcctgcctggcgaaagacttgtacgcaatggggtgagctggtcacattcaagcatgctccctctcggtagttcattgccggatgaactgctcttcgcggacgactccagcgaaggctccgaggtgctcatgtag

SEQ ID NO: 164112 - DNA, 3000 bp, Artificial Sequence
  derived and/or modified sequence
atgggaccagcgcccctcccgctgttactgggcctgttcttaccggcgctgtggagacgcgcaataactgaggctagggaagaggcaaagccctatcccttatttcctgggcccttccccggctctctgcagacagatcataccccgctgctgagcctcccacacgctagcgggtaccagccggctctgatgtttagtccaacccaacccggccgtcctcacactggcaatgtggcgattccccaggtgacctccgtggaatccaagccattgccacctttggcctttaagcataccgtaggacacataattcttagtgagcacaaaggtgtgaagtttaactgcagcatttccgttcctaacatctaccaggacacaactatcagctggtggaaggacggtaaggaattgttaggcgcacaccacgccatcacccagttctacccagatgacgaggttaccgctatcattgcatccttttccattaccagcgtgcagcgcagtgacaacggtagttatatatgtaagatgaagattaacaatgaagaaatcgtaagcgatccaatctacattgaggtgcagggacttcctcacttcacaaagcagccagagtctatgaacgtcacgaggaatactgccttcaacctgacttgtcaggcagtggggcctccagagcccgtgaacatcttctgggtgcagaacagctcccgagtcaacgagcaaccagaaaaatcaccctccgttctcacagtgcccggtctaaccgagatggccgttttctcttgcgaggctcacaacgacaagggccttactgtttcaaagggggtgcagataaacataaaggcaattccctcaccccctactgaggtgtctattcgcaatagtaccgcccactccattctcattagctgggttccagggttcgacggttacagtccattccgcaactgttcgatccaggtgaaagaggctgacccattgtccaatggctccgtcatgattttcaatactagcgccctgccgcacctgtaccaaatcaagcaactccaagctctcgcgaactattccatcggcgttagttgcatgaatgagattggctggtccgcggtatcaccctggattctggcatcaacaactgagggcgcacccagtgtcgcccccttgaacgtgaccgtgtttctaaatgaaagctccgataacgtggatattaggtggatgaaaccaccgactaaacaacaagacggcgaattggttggataccgcatctcgcatgtttggcagtccgccgggatcagcaaagagctgcttgaagaagtagggcagaacggctcgagagcgcgcatctccgtccaggtccacaacgctacgtgtaccgtgagaatcgcagcagttacccgcggcggggtgggccccttctctgatccggtaaagatctttatcccagcacacggctgggtggactatgcccctagtagtactcctgctccagggaacgctgaccccgtcttgattattttcgggtgcttttgtggatttatcctgatcggactcatcctctatatcagtctggctattaggaagcgggtgcaggaaacaaaattcggaaacgcctttaccgaggaagattccgagctcgttgtgaactatattgctaaaaaatctttttgccggagagcaattgaactgacgttgcatagtttgggggtaagtgaagagctgcagaacaagctcgaggacgtggtgattgatcggaacctcctgatccttggcaagattttgggcgaaggcgagtttggctccgtgatggagggaaacctaaaacaagaggatggaacctccctgaaagtggcggttaagaccatgaaactggataatagttctcagcgcgagatagaggagttcctgtccgaagccgcttgcatgaaggactttagccacccgaacgtgatacggctcttgggcgtgtgtattgagatgtcgtcccaggggatcccgaagcccatggttattcttcccttcatgaagtacggggatctgcatacttaccttctctattcgcggttggagacaggtccaaagcatattcccctgcagacccttctaaaatttatggtggacatagccctcggtatggagtacctgagtaacagaaactttcttcaccgtgatttggccgcgcgcaactgcatgctccgggatgacatgactgtgtgcgtcgcagatttcggtctgagtaaaaaaatctacagcggcgactactatcgtcaaggtagaattgccaagatgcctgtcaaatggatagcgatcgaatccctggccgatagggtctatacatccaagagcgacgtgtgggcctttggagtgaccatgtgggaaatcgccacacgaggcatgactccctacccaggcgtgcagaaccatgaaatgtacgattatctgctacacgggcacaggttaaagcaacctgaggactgcttggacgagctgtacgaaataatgtactcatgttggcggacagacccacttgatcgtcccacgtttagcgttctgcgcctccagctggaaaagctgctcgagtctttgccagatgttcgtaaccaggccgacgtcatctacgtcaacacccagctgctggaatcctctgagggactcgcccaaggcagtactctggctcccctggacctgaatatcgatccagatagtatcattgcaagctgcactccgagagctgcgatctctgtcgtgactgccgaggtccacgactccaaaccacatgaaggcaggtacatccttaatggaggatccgaggagtgggaggatctaacctctgccccaagtgcagccgtaacagccgaaaagaactcagtgttgcccggtgaacgcctcgtacgtaatggggtctcctggagtcatagttctatgcttcctctcggcagctcgctgcctgatgagcttctgtttgcagacgatagttctgagggttcagaggtgctcatgtag

SEQ ID NO: 164113 - DNA, 3000 bp, Artificial Sequence
  derived and/or modified sequence
atgggccctgcccccctgcccctgctgctgggcctcttcctgcctgccctgtggaggcgggccatcacagaggcccgggaggaggccaagccctaccccctcttccctggccccttccctggcagcctgcagacagaccacacccccctgctgagcctgccccacgccagcggctaccagcctgccctgatgttcagccccacccagcccggccggccccacactggaaatgtggccatcccccaggtgacctctgtggagagcaagcccctgccccccctggccttcaagcacacagtgggccacatcatcctgtctgagcacaagggcgtgaagttcaactgcagcatctctgtgcccaacatctaccaggacaccaccatctcctggtggaaggatggcaaggagctgctgggcgcccaccacgccatcacccagttctacccagatgatgaggtgacagccatcatcgccagcttcagcatcacctctgtgcagaggagtgacaatggcagctacatctgcaagatgaagatcaacaatgaggagatcgtgtctgaccccatctacatcgaggtgcagggcctgccccacttcaccaagcagcctgagagcatgaatgtgaccaggaacacagccttcaacctgacctgccaggccgtgggccccccagagcctgtgaacatcttctgggtgcagaacagcagccgggtgaatgagcagcctgagaagagccccagcgtgctgactgtgcccggcctgacagagatggctgtgttcagctgtgaggcccacaatgacaagggcctgactgtgtccaagggcgtgcagatcaacatcaaggccatccccagccccccaacagaggtgtccatccggaacagcacagcccacagcatcctgatctcctgggtgcccggctttgatggctacagccccttcaggaactgcagcatccaggtgaaggaggccgaccccctgagcaatggatctgtgatgatcttcaacaccagcgccctgccccacctgtaccagatcaagcagctgcaggccctggccaactacagcattggagtgtcctgcatgaatgaaattggctggagcgctgtgagcccctggatcctggccagcaccacagaaggagcccccagcgtggcccccctgaatgtgacagtgttcctgaatgaaagcagtgacaacgtggacatccgctggatgaagccacccaccaagcagcaggatggagagctggtgggctaccgcatcagccacgtgtggcagagcgctggcatcagcaaggagctgctggaggaggtgggccagaatggcagccgggcccgcatctctgtgcaggtgcacaatgccacctgcaccgtgagaattgctgctgtgacccggggcggcgtgggccccttcagtgaccctgtgaagatcttcatcccagcccacggctgggtggactatgcccccagcagcaccccagcccctggaaatgctgaccctgtgctgatcatcttcggctgcttctgtggcttcatcctgattggcctcatcctgtacatcagcctggccatcaggaagagggtgcaggagaccaagtttggaaatgccttcacagaagaagattctgagctggtggtgaactacatcgccaagaagagcttctgcagaagagccatcgagctgaccctgcacagcctgggcgtgtctgaggagctgcagaacaagctggaggatgtggtgattgacaggaacctgctgatcctgggcaagatcctgggggagggggagtttggatctgtgatggagggcaacctgaagcaggaggatggcaccagcctgaaggtggccgtgaagaccatgaagctggacaacagcagccagcgggagattgaggagttcctgtctgaggccgcctgcatgaaggacttcagccaccccaacgtcatccggctgctgggcgtgtgcatcgagatgagcagccagggcatccccaagcccatggtgatcctgcccttcatgaagtacggggacctgcacacctacctgctgtacagccggctggagaccggccccaagcacatccccctgcagaccctgctgaagttcatggtggacatcgccctgggcatggagtacctgagcaacagaaacttcctgcaccgggacctggccgccaggaactgcatgctgagagatgacatgacagtgtgtgtggccgactttggcctgagcaagaagatctacagcggggactactaccggcagggcagaattgccaagatgcctgtgaagtggatcgccatcgagagcctggccgacagagtgtacaccagcaagagtgatgtgtgggccttcggcgtgaccatgtgggagatcgccacccggggcatgaccccctacccaggagtgcagaaccacgagatgtatgactacctgctgcacggccaccggctgaagcagcctgaggactgcctggatgagctgtatgagatcatgtacagctgctggaggacagaccccctggaccggcccaccttctctgtgctgcggctgcagctggagaagctgctggagagcctgcctgatgtgaggaaccaggctgatgtgatctacgtgaacacccagctgctggagagcagcgagggcctggcccagggcagcaccctggcccccctggacctgaacattgatcctgacagcatcatcgccagctgcaccccccgggccgccatctctgtggtgacagctgaggtgcatgacagcaagccccatgagggccgctacatcctgaatggaggcagcgaggagtgggaggacctgaccagcgcccccagcgctgctgtgacagctgagaagaacagcgtgctgcccggggagcggctggtgagaaatggagtgtcctggagccacagctccatgctgcccctgggcagcagcctgcctgatgagctgctgtttgctgatgacagcagcgagggcagcgaggtgctgatgtag

SEQ ID NO: 164114 - DNA, 2472 bp, Artificial Sequence
  derived and/or modified sequence
atgaagatcaacaatgaggagatcgtgtctgaccccatctacatcgaggtgcagggcctgccccacttcaccaagcagcctgagagcatgaatgtgaccaggaacacagccttcaacctgacctgccaggccgtgggccccccagagcctgtgaacatcttctgggtgcagaacagcagccgggtgaatgagcagcctgagaagagccccagcgtgctgactgtgcccggcctgacagagatggctgtgttcagctgtgaggcccacaatgacaagggcctgactgtgtccaagggcgtgcagatcaacatcaaggccatccccagccccccaacagaggtgtccatccggaacagcacagcccacagcatcctgatctcctgggtgcccggctttgatggctacagccccttcaggaactgcagcatccaggtgaaggaggccgaccccctgagcaatggatctgtgatgatcttcaacaccagcgccctgccccacctgtaccagatcaagcagctgcaggccctggccaactacagcattggagtgtcctgcatgaatgaaattggctggagcgctgtgagcccctggatcctggccagcaccacagaaggagcccccagcgtggcccccctgaatgtgacagtgttcctgaatgaaagcagtgacaacgtggacatccgctggatgaagccacccaccaagcagcaggatggagagctggtgggctaccgcatcagccacgtgtggcagagcgctggcatcagcaaggagctgctggaggaggtgggccagaatggcagccgggcccgcatctctgtgcaggtgcacaatgccacctgcaccgtgagaattgctgctgtgacccggggcggcgtgggccccttcagtgaccctgtgaagatcttcatcccagcccacggctgggtggactatgcccccagcagcaccccagcccctggaaatgctgaccctgtgctgatcatcttcggctgcttctgtggcttcatcctgattggcctcatcctgtacatcagcctggccatcaggaagagggtgcaggagaccaagtttggaaatgccttcacagaagaagattctgagctggtggtgaactacatcgccaagaagagcttctgcagaagagccatcgagctgaccctgcacagcctgggcgtgtctgaggagctgcagaacaagctggaggatgtggtgattgacaggaacctgctgatcctgggcaagatcctgggggagggggagtttggatctgtgatggagggcaacctgaagcaggaggatggcaccagcctgaaggtggccgtgaagaccatgaagctggacaacagcagccagcgggagattgaggagttcctgtctgaggccgcctgcatgaaggacttcagccaccccaacgtcatccggctgctgggcgtgtgcatcgagatgagcagccagggcatccccaagcccatggtgatcctgcccttcatgaagtacggggacctgcacacctacctgctgtacagccggctggagaccggccccaagcacatccccctgcagaccctgctgaagttcatggtggacatcgccctgggcatggagtacctgagcaacagaaacttcctgcaccgggacctggccgccaggaactgcatgctgagagatgacatgacagtgtgtgtggccgactttggcctgagcaagaagatctacagcggggactactaccggcagggcagaattgccaagatgcctgtgaagtggatcgccatcgagagcctggccgacagagtgtacaccagcaagagtgatgtgtgggccttcggcgtgaccatgtgggagatcgccacccggggcatgaccccctacccaggagtgcagaaccacgagatgtatgactacctgctgcacggccaccggctgaagcagcctgaggactgcctggatgagctgtatgagatcatgtacagctgctggaggacagaccccctggaccggcccaccttctctgtgctgcggctgcagctggagaagctgctggagagcctgcctgatgtgaggaaccaggctgatgtgatctacgtgaacacccagctgctggagagcagcgagggcctggcccagggcagcaccctggcccccctggacctgaacattgatcctgacagcatcatcgccagctgcaccccccgggccgccatctctgtggtgacagctgaggtgcatgacagcaagccccatgagggccgctacatcctgaatggaggcagcgaggagtgggaggacctgaccagcgcccccagcgctgctgtgacagctgagaagaacagcgtgctgcccggggagcggctggtgagaaatggagtgtcctggagccacagctccatgctgcccctgggcagcagcctgcctgatgagctgctgtttgctgatgacagcagcgagggcagcgaggtgctgatgtag

SEQ ID NO: 164115 - DNA, 3000 bp, Artificial Sequence
  derived and/or modified sequence
atgggccccgcccccctgcccctgctgctgggcctgttcctgcccgctttatggcggcgagctatcactgaggctcgggaggaggctaaaccctatcccctgtttccaggtccgtttcctggctccctccagacagatcacacaccactcttgagtttgccacatgcatctggttatcagcctgcgctcatgttctcacccactcagcccggcaggccccatacaggaaatgtggccattcctcaggtgacttcagtcgaatcaaaacccctcccccccctggctttcaaacatactgttgggcatattatactctccgagcacaagggtgtgaaattcaactgctcaatcagcgtgccaaatatctatcaggatacaacaattagttggtggaaggacggtaaggaactgctcggtgcacatcacgctatcacacagttttatcctgacgacgaggtaactgccatcatcgcatcattctccataacttcagtccagcgcagtgacaatggttcatatatctgtaagatgaagatcaacaatgaggagatcgtgtcagaccccatctatatcgaggttcaggggctgcctcatttcaccaagcagcccgagtcaatgaatgtaacgagaaatacagcctttaatctaacctgtcaggctgtggggcctccagaacctgtgaacatcttctgggtacaaaacagcagtcgggttaacgagcagccagagaaaagcccatcggtactaactgtgcccggcctcaccgagatggccgtcttttcatgtgaggcacataacgataagggcctgaccgtgtctaagggcgtgcaaattaacatcaaggcgatccccagtccccctacagaggtgagcattaggaactcaaccgcacattcaatccttatctcgtgggtgcccggctttgacgggtattccccatttcgtaactgcagtatccaggtcaaagaagctgacccccttagtaacgggtctgtgatgattttcaatactagtgcgctgccccacctttaccagattaagcagctacaagcactggccaattactctattggtgtatcctgcatgaatgagatcgggtggagtgctgtatctccatggatcctagctagtacaactgagggcgcaccaagtgtggcccctttaaacgtcacggtgtttctgaacgaaagttccgataacgtagatattcgctggatgaagcccccaaccaagcaacaggatggcgagctcgtcggatatcggattagccacgtgtggcaatccgccggaatctctaaagaactattagaagaagtgggtcagaacgggtcccgcgcccgtatcagtgttcaggtacataacgctacttgtactgtaagaatcgcagccgtcacaagaggaggagtaggacccttctccgatcctgtgaaaattttcatccccgctcatggatgggtagattatgctcctagcagtacgccggccccaggaaacgcagacccagtcctgatcatttttggctgcttttgcgggtttatattaattggactgatcctttatataagcctggcaatcagaaagcgcgtgcaggaaaccaagtttggcaacgctttcactgaggaagattctgagttggtagttaactacatcgctaaaaagtccttctgcaggagagccatcgagcttactctgcatagcttaggcgtgtccgaggaattgcagaataaacttgaggacgtcgttatcgatcgtaacctgctgattctgggaaagattctcggcgagggagagttcggtagcgtaatggaagggaatctcaagcaggaagacggcaccagcctgaaggttgcagtgaagacaatgaagttggacaatagctcgcagcgagagatcgaggaatttctgagtgaggcggcttgtatgaaagattttagtcatcctaatgttattcggttgctgggcgtctgtatagagatgtcctcacagggtatacctaagcccatggtgatcctgccttttatgaaatacggggacctgcacacatatttgctttacagtagactggaaactggtccgaaacatatcccacttcagacactcctaaagttcatggttgacattgccttggggatggaatatctgagtaacaggaattttctgcacagagaccttgccgctcggaattgtatgcttcgagatgatatgactgtgtgtgtggctgattttggtctcagtaagaagatttactcaggagattactaccggcaggggagaatcgctaagatgcccgtgaaatggatagcaatcgagtcactcgcggaccgagtctacacctcaaaatccgacgtctgggctttcggggtaacaatgtgggagatcgccactcggggtatgacaccgtaccctggcgttcaaaatcatgaaatgtatgattaccttctacacggacacaggctcaagcagcccgaagattgtctggacgaactgtacgaaatcatgtattcttgttggcgcaccgacccgcttgatagacctaccttttctgtgcttcgattacaattggagaagttattggagtccctgcctgatgtgaggaatcaggcggacgtgatatacgtcaacactcagctgctggagagctccgaggggcttgctcagggttccaccctcgcacccctggacctgaacatcgatcccgactctattattgctagctgcacaccacgtgcagccatcagtgtggtgacagctgaggtgcatgattccaagcctcatgagggcagatacatacttaatggcggctctgaggaatgggaagacctcaccagcgcgccttccgccgccgttaccgccgaaaagaactccgtcctcccaggagagcggttggtgcgcaacggcgtttcatggagtcattcatccatgttaccactcggctcatccctaccagacgaattacttttcgccgatgatagcagtgaaggatcggaagtgctgatgtag

SEQ ID NO: 164116 - DNA, 2472 bp, Artificial Sequence
  derived and/or modified sequence
atgaagatcaacaacgaggagatcgtgagcgaccccatctacatcgaagtgcaagggttgcctcacttcacaaaacagcccgaatcgatgaacgtaactagaaacaccgccttcaacctgacatgccaggccgttggcccccctgagccagtaaatatcttctgggtgcagaactcttccagagtgaacgaacagcccgagaaaagccccagcgtgttgaccgttcctggcctcacagaaatggccgtgttttcttgtgaggcccacaacgataaggggctcaccgtgagcaaaggggttcagatcaacattaaagcaatcccatccccccctacagaggtcagtatccgaaactcaaccgcacactcgatactgatcagctgggtccctgggtttgatggttactccccgttccgaaactgctcaattcaagttaaagaggcggatccactgtccaatggtagtgtgatgatattcaacaccagcgccctgcctcatttatatcaaataaagcagctgcaggccttggccaattactccattggggtctcatgtatgaacgaaatcggatggtcggcagtgtccccgtggattcttgctagtacgactgagggcgccccaagcgtagctccattgaatgtgacagtcttcctgaatgaatccagcgataatgtggacatccgttggatgaaacccccaaccaagcagcaggacggcgagttggtgggttatcgtatttctcatgtttggcaaagcgctggaatcagtaaagagctgctggaggaagtaggtcaaaacggatcacgtgctaggatttcagtgcaggtgcataacgcaacctgtaccgtgaggattgctgctgttaccagaggaggtgtgggaccgttctcggatcctgtaaaaatctttattcccgcacacgggtgggtggattacgcgccaagctccacgcccgcaccagggaacgctgaccccgtcctcatcattttcggatgcttttgcgggttcatactgattgggctgatcctgtacatttccctagcgatccgcaaacgtgtgcaggaaactaaattcggcaatgccttcaccgaggaagattcagaactcgtagtgaactacatcgccaaaaagagcttctgtcgaagagctattgaactgactcttcacagcttgggagtctcggaagagctgcagaacaaactagaggatgtcgtgattgatagaaatctgctgatcctcggcaagatattgggagagggggagtttggctcagtcatggagggcaaccttaaacaggaggacgggactagcctgaaagtggctgttaagacaatgaaattagataattcctctcaacgcgagattgaggaattcctatctgaggcagcctgcatgaaagatttttcccaccctaacgtaattaggctgctgggtgtatgtatcgaaatgagttcacaaggcatccctaagcctatggttattctcccctttatgaaatacggggacctacacacctacctgttatactctaggctcgaaaccggcccgaagcacatccccctgcagacacttctcaaatttatggtggatatcgcactgggaatggaatatctatctaatcggaacttcctgcacagagacctggccgctcgcaattgcatgttacgtgatgatatgacggtgtgcgtagctgactttggactgtcaaagaaaatctattctggtgattattacaggcagggccgcatcgcgaaaatgccagtcaaatggatcgcaatcgaatctctggcggaccgggtctatacatctaaatctgatgtctgggctttcggggttactatgtgggagattgctacgcgtggcatgaccccctatccaggcgtgcagaaccacgagatgtatgattatctgctccacggacaccgacttaagcagcctgaggactgccttgatgaactgtacgaaattatgtacagttgctggcggactgaccctctagataggccaacattttcagtcctgaggctgcagctggagaaactacttgaaagcctgccagacgtgaggaaccaggccgacgtcatctacgttaacactcagctcctggagtcatcggaaggactggctcaggggtcaactctcgccccactggatttaaacatcgatccagactcaataattgcttcctgcacccctcgcgcagctatctccgtggtcactgccgaagtccacgactcaaagccccatgaagggcggtacatattgaatgggggcagcgaagagtgggaggatttaacatctgcaccgagtgccgccgtcacagcagagaagaattccgtgttaccaggtgagcggttagtgcggaatggggtatcctggtctcattcctccatgttgcccctggggtcctcccttcccgatgaattgctgttcgcggatgattcctcggaggggtctgaggtgctgatgtag

SEQ ID NO: 164117 - DNA, 3000 bp, Artificial Sequence
  derived and/or modified sequence
atgggccccgcccccctgcccctgctgctgggcctgttcctgcccgctctctggcgccgggccattaccgaagccagggaggaggccaagccatacccgttattcccaggccccttcccgggcagtctccagacagaccacacacccctcctgagtctccctcatgcatctggttatcagcccgccctcatgttcagtccaacccagcccggccgacctcatactggaaacgtcgctatcccccaggtgactagtgtggagtccaagccactcccaccactggcttttaaacacacggtgggacatatcatactctcagagcataagggggttaaatttaactgttcaatctctgtccctaacatatatcaggacaccaccatcagctggtggaaggacggcaaggaactgctcggggcccaccatgccataactcagttttatccagatgatgaagttacagccattattgcaagtttttctattacctcagtgcagagatcagataacggatcatacatttgcaagatgaagattaacaacgaagagatcgtctcagatcctatttatatcgaggtccagggtttgccacacttcacaaaacagcccgagtccatgaatgtcactcggaatactgctttcaacctgacatgtcaggctgtaggtcccccagagcccgtgaacattttttgggtgcagaactctagtagggtgaacgaacagcctgagaagagcccctcggtgcttactgtgccgggcctcacagagatggcagtgttctcgtgtgaggctcacaacgacaaaggacttacagtctctaagggggtgcagattaatatcaaagccataccgtcacctccgaccgaggtttccatcaggaatagtacggcccactccatcctgatctcctgggtgcccggtttcgacggctattctccatttcggaattgctcaatccaggtgaaagaggcggatccactctccaatggcagcgtgatgatctttaatactagcgccctcccccacctatatcagatcaagcagttgcaagccctggcgaattattccattggggtgagctgtatgaatgagatcgggtggtccgcagtttccccctggatactagcctctacaactgagggcgcgcccagtgtagccccactgaatgtaaccgtttttctgaacgagtcatcagacaacgtagacattagatggatgaagccacctacgaaacagcaggatggcgagctggtaggatatcgtataagccatgtgtggcaatctgcgggcatctcaaaagagcttcttgaggaagtaggacagaatggtagtcgcgctcgcattagtgtgcaggtgcacaatgctacctgtaccgtccgtattgccgcagttactaggggcggggtgggacccttttccgatccagtgaaaatctttattcccgcacatggttgggtagactatgccccgagctcaacgcccgcccccggcaatgcggaccctgtgctgatcatctttggttgcttttgcggctttatcctcatcgggttaatcctttacatatcactggccatccgcaagcgcgtccaagaaaccaagttcggaaatgcctttaccgaggaagattccgagctggttgtgaattacattgcgaagaagagcttttgcaggcgtgcaatagagctgacattacatagccttggcgtctccgaagagcttcagaataagcttgaagacgtggttattgaccgtaacctcttgatactcggcaaaattttaggtgagggtgaattcggctcagtaatggagggaaaccttaagcaggaggatggcacaagcttaaaagttgccgtaaaaaccatgaaacttgacaactcgtcccagcgcgagatcgaagagtttctgagcgaggctgcctgcatgaaggatttctctcacccaaatgtcatcaggcttctcggagtgtgcatcgagatgagcagtcagggtatccccaagcctatggttattctccccttcatgaagtacggagatctacatacttatctgctttattcccgactggagaccggccccaagcacatacctctgcagacccttctgaaattcatggtggatatcgccttgggtatggaatatcttagtaacagaaactttctgcaccgggatctggcagctcgcaattgtatgctgcgggacgacatgacagtttgtgtagcagacttcggtctttctaagaaaatctattcaggagactactaccgtcaggggagaatcgccaagatgcccgtgaaatggattgcaatcgagtccttggcagaccgagtttatacatccaagtccgatgtgtgggcttttggtgtgaccatgtgggaaatcgctacaagaggcatgaccccataccccggagtgcagaatcatgaaatgtatgattacctcctccacggccacagactaaaacagccagaggactgcctagatgaactgtatgaaatcatgtatagctgttggcgtaccgacccattggaccgccctacattttccgtcttgagactgcagctggaaaagcttctcgaatctctgcccgacgtgcgtaatcaggccgatgtgatctatgtcaatacccagctgctggaatcttcagagggtcttgcacaggggtcaaccttagctccgctggatctgaacattgaccccgatagtatcatcgccagctgtacccctcgggctgccatatcagtcgtgacggccgaagttcatgactccaagccccacgagggccggtacatcctgaacggaggatccgaagagtgggaggacttgacatcagcccccagcgcagcggtgaccgcagagaaaaactcagttctgccgggcgaaagattggtgcgtaatggagtgtcttggtcccactctagcatgttacctctggggagttcactccctgacgaattactctttgcggacgacagcagcgaggggtccgaggtgttgatgtag

SEQ ID NO: 164118 - DNA, 3000 bp, Artificial Sequence
  derived and/or modified sequence
atgggaccggcaccactcccattgctgctgggactgtttttgccagcactgtggcgcagagccattactgaggccagagaggaagccaagccctaccccctgtttcccggtccattcccaggatcccttcagacagatcacaccccccttctctccctgcctcacgcctcggggtaccagccggctctcatgttctcccccacgcagcctggtagacctcataccggaaacgtggcaattcctcaggtgacatcagttgaaagcaagccactgccaccattggcgtttaaacacacagtagggcacatcattctgtcagagcacaagggagttaagtttaactgcagcatctctgttcccaatatatatcaggacactaccattagctggtggaaggacgggaaagaattactcggcgcacaccacgctatcacacaattttaccccgacgacgaggtaacagctattattgcctcattcagtatcacatccgtgcagagaagcgacaacggcagctatatctgtaagatgaagatcaacaacgaggagatcgtctctgatccaatctacattgaggtccagggcctgccccattttacaaagcaacctgaatctatgaatgttaccagaaatacagcattcaacctgacctgtcaggctgttggacctccagagcccgtgaatatcttctgggtgcagaattcctcccgcgttaatgaacagcccgaaaaatctccgtccgtgctgaccgtgcctggactgactgaaatggccgtctttagctgcgaggcacataatgataagggcctcaccgtatccaagggggtgcaaatcaacatcaaagctatcccgtcaccaccgactgaggtttccatacgcaacagcaccgctcactctatacttataagctgggttcccggttttgatgggtattcacctttccgtaattgtagcatacaggtgaaggaagctgaccccctatccaacggaagcgtgatgatcttcaacacttccgcactcccacatctgtaccagatcaagcagctccaagctctggccaattatagtattggtgtcagttgcatgaatgagataggctggtccgccgtcagcccgtggatcctggctagtaccaccgagggtgccccatctgtggcgccattgaatgtgacggtcttcctgaacgaatcaagtgacaacgttgatatacgctggatgaaaccacctaccaagcagcaggacggtgaactcgtggggtacagaatctcacatgtctggcagtctgctgggatttcaaaggagctgctggaggaggtggggcagaacggatcacgagcccgaatctcagtgcaggtgcataacgcgacctgcaccgtgagaatcgcagccgtaacacggggaggggtgggcccattttccgatcccgtcaagatttttattccagcccacggctgggtggactatgcacccagttcaactcctgctcctggcaacgccgaccccgtgttgatcatttttgggtgtttctgcggtttcatcctgatcggtctgatcctgtacattagcctggccattcgcaagagggtccaggaaactaagtttgggaatgcatttacagaggaggatagtgaactcgtggttaattacatcgcaaaaaaaagcttctgccggagagcaattgagctcacattacactccctgggtgtttcggaggagctccagaataagctggaagacgttgttattgacaggaacctcctcatactgggcaaaatcctgggggagggtgaattcggctctgtaatggaaggcaatttaaagcaggaggatggcacaagcttgaaagtcgcagtgaagacaatgaagcttgataactcctctcagcgagaaattgaagagttcctcagcgaagccgcttgcatgaaggatttttctcaccccaacgtgatccggctgctcggagtatgtattgaaatgtcaagtcaagggataccaaagccgatggttatcctgccctttatgaagtatggcgacctccacacctaccttctgtattcgcgacttgagacaggcccaaagcatatccctttgcaaaccctgctgaagttcatggtggacattgcgttggggatggagtacctgagcaatcgcaattttttacatcgcgatctagcagctcggaattgcatgttgcgagatgatatgacggtctgtgtcgccgattttgggctcagtaagaaaatttactcaggagattattacaggcaagggagaatcgccaagatgcccgtcaagtggatcgcgattgagtccctggccgatcgcgtgtacacctctaaatcagacgtttgggctttcggtgtgacaatgtgggagattgcaacgagaggtatgactccttaccccggagtccagaatcacgagatgtacgactacctgctgcatggacaccggctcaagcagccagaagactgcctcgacgagttgtacgagattatgtacagctgctggcgaaccgaccccctcgaccggcctaccttttctgtgctgcgactgcagctggaaaagttgctggagtctctcccagatgttcggaaccaggctgatgtcatctacgttaatactcagctgttagagagcagtgaagggcttgctcagggttccactttggcacctctggacctgaacatcgaccccgatagcattatcgcctcctgcacacccagggcagccatatctgtcgttacagccgaagtacacgactccaaacctcacgaaggtaggtatatcctaaacggaggttctgaagagtgggaagacctgacttcagcaccttcggcggcagtcacagcagaaaagaattctgtccttcccggagagagactggttcgtaacggggttagttggtcacattcttccatgctgcccctgggctcatctctaccagacgagctgctgtttgccgacgactctagcgaaggatcggaagttctgatgtag

SEQ ID NO: 164119 - DNA, 2472 bp, Artificial Sequence
  derived and/or modified sequence
atgaagataaacaacgaagaaatagtttccgatcccatatacatcgaagttcagggccttcctcactttacaaagcagcccgagagcatgaacgtgacaagaaacaccgcattcaatctgacttgtcaagcagttggtccacctgaacctgttaatattttctgggtgcagaactcatccagagtgaacgaacaaccggaaaaaagtccaagtgtgctcactgtacctggattaacagagatggcagtctttagctgtgaggctcacaatgacaaagggttaacggtgagcaagggagtgcagatcaacataaaggcgattcccagtcctcccactgaggtgagcattcggaacagtaccgcgcacagtatccttatctcctgggtccctggttttgacggctattccccgttccggaactgttcaatacaggttaaagaggccgatcccctgagcaatggctcagtgatgattttcaacactagcgcgctgcctcacctgtatcaaatcaaacagttgcaggcccttgccaattattccataggcgtaagctgcatgaatgagattggatggtccgccgtaagtccgtggattctggctagtacgaccgagggggctccctctgtcgccccactcaatgtcactgtgtttctgaatgaatcatctgacaatgtggacattcgatggatgaaaccacccacaaaacagcaggatggggagcttgttggatacaggattagtcacgtgtggcagagcgcaggtatcagcaaggaactgctggaggaggtgggccaaaacgggagtcgggcacgtatatcggtccaagtgcataacgcaacatgtaccgtgagaattgccgctgtgacccggggtggcgtaggccctttcagcgaccccgtaaaaatctttatccccgctcatggctgggtcgattatgcgccaagttcgaccccagcgccaggcaatgctgaccccgttctgatcatattcggctgcttttgcggtttcatcctcataggattgattttgtacatcagtctggctattcgcaaaagggtgcaggaaaccaagtttggcaatgcgttcaccgaagaagatagtgaacttgtggtgaactatatagccaagaaaagcttttgtaggcgcgctatcgagctcaccctccacagcctcggagtgagcgaggagttacagaacaagctggaagacgttgtaatcgataggaatctcctgatcctgggcaagattctgggggagggcgaatttgggtctgttatggagggaaacctgaagcaggaggacggcacttcactaaaggtggccgtcaagaccatgaaactggataactcctcacagcgggagattgaggagttcttaagcgaagcagcttgcatgaaagacttttcccaccctaatgtcatacgtctgctgggcgtctgcatcgagatgtcctcccagggaattcccaaacccatggttatcctgcctttcatgaagtacggagacctccacacatatctgctgtactctaggctggaaactgggccaaagcacattccactgcagacattgctgaagttcatggtcgacattgctttagggatggagtacctaagcaaccggaactttttacatcgcgacctggctgcccgaaactgtatgctgagggatgacatgacagtgtgcgttgcagattttggactgtctaagaaaatttacagcggagactattatcgccagggacgcattgctaaaatgcctgtgaagtggattgcaatagaatcccttgccgatagggtatatacatccaaaagcgatgtctgggcgttcggtgtgactatgtgggaaatcgcgactagaggaatgactccgtatcctggggttcagaaccacgagatgtatgactacctgttgcatggacatagattaaagcagcccgaggattgtctggacgaactgtacgagattatgtactcatgctggagaacagacccactcgaccggcctacatttagtgtcctgcggttgcaactcgaaaaactgctcgaatctcttcccgacgtacggaatcaagcagatgtgatatacgtgaacacacagctcctggagtcgtccgaaggtcttgcacagggctccaccttggccccactcgatctgaacattgatccggacagtattatcgcttcttgtactcctagggccgcaatctctgtggtaaccgccgaagtgcacgatagtaaaccccacgagggcaggtacattttgaacggcggatctgaggaatgggaagatttgactagtgctccatccgccgcagttaccgctgagaagaactccgtgttacctggcgagcggctggttaggaatggcgtaagctggagccacagttccatgctccctctcggctcgagcctgcccgacgagctccttttcgcagacgattctagcgagggtagcgaagtgttaatgtag

SEQ ID NO: 164120 - DNA, 3000 bp, Artificial Sequence
  derived and/or modified sequence
atgggccctgccccattgccactattgctgggactcttcctgcccgcactgtggagaagagccatcaccgaggccagagaagaggccaagccttatcctctgttccccggtccatttcccggatcgcttcaaaccgaccacacacccttactttccctgccccatgccagtgggtaccagcctgccctgatgttttctccgactcagccaggcaggccccacactggcaacgtggcaatcccacaggttacctcagttgaatctaaacctcttcctccactggctttcaagcacactgtggggcacataattctctctgaacataagggtgtgaagttcaattgctctattagtgtacccaatatttaccaggacacgaccatcagctggtggaaagatggaaaggagctcctcggagcccatcacgctattacccaattctacccggatgatgaggtgacggccattattgctagtttctccattacaagtgttcagcggtccgataatggaagctatatatgcaaaatgaagattaataatgaggagatagtcagcgaccctatttatatagaagtgcagggcctcccacatttcactaaacaacctgaaagcatgaacgtgactcggaacaccgcctttaaccttacttgccaggcagtcgggcctcccgaaccagtgaatatcttttgggtccagaattctagtcgagtgaatgagcagcctgagaagagccctagcgttctgacagtgccgggattgacagagatggctgtctttagctgcgaagcgcataacgataagggccttacagtcagcaaaggggtccagataaacatcaaggccatcccaagtccgccaacagaagtgtccatacggaacagtacagcccattccattctgattagttgggtgccagggtttgatggctactctcccttcaggaactgctcaatccaggttaaggaggcagatcctctgagtaatggctcagttatgatctttaatacctccgctttgccccatctatatcagataaaacaactgcaggctctcgcaaattactcaattggggttagctgcatgaatgaaattgggtggtcggcagtcagcccatggatccttgcctcgactactgaaggtgcaccgagtgtcgcacccctgaacgtgaccgtgttcctgaatgagtcatccgacaatgtcgacattcggtggatgaagccgcctacaaaacagcaggacggagaattggtgggataccggatctcccacgtctggcagtcggccggtatctccaaggaactactggaggaggtgggccagaatggctcccgcgcacgcatcagtgtccaggtacacaatgctacttgtaccgttaggatcgccgctgttacgaggggaggcgttggccctttctcggatcccgttaaaatcttcattccagcccacggttgggtggactatgctcccagtagtacaccggcacctggcaacgccgatcctgtgctgattatttttggatgcttctgtgggtttatattaatcggcctgatcctgtacatctcattagcgatcagaaagcgcgtacaggagaccaaattcggcaatgcctttactgaggaggattctgagctggttgtcaattacatcgcgaagaagtcgttttgtcggcgagcaatcgaattgacactccacagcctgggagtgtctgaggagctgcaaaataagctggaagacgtcgtgattgacaggaatctactaattttgggaaaaatcctcggcgaaggggagtttgggtctgtaatggagggaaatctgaaacaggaagatggtacctccctgaaagttgcagtcaagacgatgaaactggacaactcgtcacagcgtgaaatcgaagagtttctgtcggaagccgcatgtatgaaagatttttcccaccccaacgtgattaggctgctcggagtttgcatagagatgtcctcacaaggcatccctaaaccaatggtgattcttccttttatgaagtatggggatctgcacacataccttttgtactcacggttggaaaccggacccaaacacatcccgttgcagaccctgctcaaattcatggtggatatcgcgcttggtatggaatacctgagtaaccggaattttctgcatagagatctcgccgcacgaaattgtatgctgcgagacgacatgacagtctgcgtcgccgactttggactgtctaagaaaatctattctggagattactatcggcagggaagaatagctaaaatgcccgttaagtggatcgccattgagtccctagctgatagggtttacaccagcaagtccgatgtgtgggcctttggagtgaccatgtgggaaattgcaacaaggggaatgaccccctatccaggtgtccagaaccatgaaatgtacgattatttgctacacggccatcgcttaaagcaacccgaggattgtctcgacgagctctatgaaatcatgtattcctgctggcgcactgatcccctagataggccaacctttagcgtactgaggcttcagctcgagaagcttctggagtctcttcccgacgtgcgaaatcaagcagacgtgatatatgttaacacccagctgctagaaagctccgagggcttggcccagggctccactctagccccactggacctgaacatagaccccgacagtattattgcttcctgcacacccagagctgctatctctgttgttaccgctgaggtgcacgactccaagccacacgaggggcgttatatcctgaacggcggatccgaagagtgggaagatctgacatccgccccatcagccgctgttaccgctgagaagaattcggtcctacccggagagcgcctggtgcgtaacggcgtgtcgtggagtcactcttctatgctcccactaggatcgtcactccctgacgaacttctgtttgcagacgacagctccgaaggctcggaggtgcttatgtag

SEQ ID NO: 164121 - protein, 292 aa, Artificial Sequence
  derived and/or modified sequence
MTRTYENFQYLENKVKVQGFKNGPLPLQSLLQRLCSGPCHLLLSLGLGLLLLVIICVVGFQNSKFQRDLVTLRTDFSNFTSNTVAEIQALTSQGSSLEETIASLKAEVEGFKQERQAVHSEMLLRVQQLVQDLKKLTCQVATLNNNGEEASTEGTCCPVNWVEHQDSCYWFSHSGMSWAEAEKYCQLKNAHLVVINSREEQNFVQKYLGSAYTWMGLSDPEGAWKWVDGTDYATGFQNWKPGQPDDWQGHGLGGGEDCAHFHPDGRWNDDVCQRPYHWVCEAGLGQTSQESH

SEQ ID NO: 164122 - DNA, 879 bp, Artificial Sequence
  derived and/or modified sequence
atgactagaacgtacgaaaacttccagtacttggagaataaggtgaaagtccaggggttcaagaatggcccccttccactccagtctttgctgcaacgcctctgtagtggcccttgtcatctgctcttatccctgggtctgggtctcttgctacttgtgattatttgcgtggtcgggtttcagaacagtaaattccagagggatctcgttaccctcaggacagacttttccaattttacatctaataccgttgcggagatccaagctctcacctcccagggatcttccctggaggaaacgatcgccagcttgaaggctgaggtcgaaggatttaagcaagaacgtcaggccgtccatagcgaaatgctgctgagagtccaacagctagtgcaggatttaaagaagctaacatgtcaggttgctacactgaataacaacggagaggaggctagcactgagggtacctgctgccctgttaactgggtggagcatcaagattcttgctattggttctcccattctgggatgtcatgggctgaggccgagaagtattgccagctcaagaatgcacacttagtggtaataaatagtagagaggagcagaattttgtacagaagtatctgggatccgcatacacctggatggggctttctgatccagagggtgcttggaagtgggtcgacgggactgactacgcaacaggattccaaaattggaagcctggacaaccagatgactggcagggacacgggcttggcggcggggaggactgcgctcacttccacccggacggcagatggaatgatgatgtgtgtcaaagaccatatcactgggtttgtgaggccgggctgggacagacttctcaggagagtcattag

SEQ ID NO: 164123 - DNA, 879 bp, Artificial Sequence
  derived and/or modified sequence
atgaccaggacatacgagaattttcagtaccttgagaacaaagtgaaggtgcagggatttaagaatggacctctcccactgcagtcgctactccagaggttatgctccgggccatgtcacttgctgttgagcctgggcctcgggctgctgttactagtcattatttgcgtggtggggtttcaaaactcgaagttccaacgggatctcgtgaccttacggaccgacttttccaactttacaagtaatacagtggccgaaatccaggccttaacatctcagggatcctctctagaggaaaccattgcaagccttaaagccgaggttgaggggtttaaacaggagcgccaggctgtgcactctgaaatgctcctgagggttcaacagctagtacaggacctgaaaaagctgacgtgtcaagtagccactctgaacaataacggcgaggaggcgagtaccgaggggacttgttgtccagtgaactgggtggaacatcaggattcttgttactggttctcacattcagggatgtcatgggccgaggccgagaagtactgtcaactgaagaacgcacatcttgttgtgatcaatagcagggaggagcagaactttgtccaaaagtatcttggcagcgcttacacctggatgggactgtctgatccggagggtgcttggaagtgggtggatgggacagattatgccaccggatttcaaaactggaaaccagggcagccggatgattggcaagggcacgggctgggcgggggtgaagactgcgcgcattttcatcccgacggacgctggaatgatgatgtgtgccaacgcccataccactgggtgtgtgaggccggcttggggcagaccagccaggaatcacactag

SEQ ID NO: 164124 - DNA, 879 bp, Artificial Sequence
  derived and/or modified sequence
atgaccaggacctatgagaacttccagtacctggagaacaaggtgaaggtgcagggcttcaagaatggccccctgcccctgcagagcctgctgcagaggctgtgcagcggcccctgccacctgctgctgagcctgggcctgggcctgctgctgctggtgatcatctgtgtggtgggcttccagaacagcaagttccagagggacctggtgaccctgaggacagacttcagcaacttcaccagcaacacagtggccgagatccaggccctgaccagccagggcagcagcctggaggagaccatcgccagcctgaaggccgaggtggagggcttcaagcaggagcggcaggccgtgcacagcgagatgctgctgcgggtgcagcagctggtgcaggacctgaagaagctgacctgccaggtggccaccctgaacaacaacggggaggaggccagcacagagggcacctgctgccctgtgaactgggtggagcaccaggacagctgctactggttcagccacagcggcatgtcctgggccgaggccgagaagtactgccagctgaagaatgcccacctggtggtgatcaacagccgggaggagcagaactttgtgcagaagtacctgggcagcgcctacacctggatgggcctgagtgaccctgagggcgcctggaagtgggtggatggaacagattatgccaccggcttccagaactggaagccaggccagccagatgactggcagggccacggcctgggcggcggggaggactgtgcccacttccacccagatggccgctggaatgatgatgtgtgccagaggccctaccactgggtgtgtgaggccggcctgggccagaccagccaggagagccactag

SEQ ID NO: 164125 - DNA, 879 bp, Artificial Sequence
  derived and/or modified sequence
atgacccggacctacgagaacttccagtacctggagaacaaggtgaaggtccagggattcaagaatggtcccttgcctctgcaatcgctcctacagagactctgcagcgggccctgccacctactgttaagtctggggctgggtctgctcctattagttattatctgtgtcgtgggctttcagaactctaagtttcagcgtgatctggtcactcttcgcactgacttctctaattttacatctaacactgtcgctgagatacaagcgctgactagtcaggggtcttctttggaggagacaattgcctctctcaaagcagaagttgaggggttcaagcaggaaagacaagcggtccactccgagatgctcctgcgggtgcaacagctcgttcaggacctgaaaaaactgacgtgccaggttgctactctcaataacaatggtgaagaggcgagcaccgaaggaacctgctgtcctgttaactgggttgagcaccaggatagctgttattggttctcacactcaggcatgtcctgggccgaggccgagaagtattgccagctgaaaaatgcgcatctcgtggttatcaattcccgcgaagagcagaatttcgttcagaagtacctcggttctgcatacacctggatggggctctccgatcctgagggagcttggaaatgggttgatggaacggattacgctacaggatttcaaaattggaagcccggccagcctgatgattggcaggggcacggcttgggaggcggagaggactgcgcgcacttccacccggacggcaggtggaatgacgatgtgtgtcagaggccctaccactgggtgtgcgaagccggcctgggacagacaagccaagaaagccactag

SEQ ID NO: 164126 - DNA, 879 bp, Artificial Sequence
  derived and/or modified sequence
atgacccggacctacgagaacttccagtacctggagaacaaggtgaaagtacagggctttaaaaacgggcccctgcccctgcagagcctactgcagaggctatgctccgggccctgccatctgcttttgagcctgggactaggcttactattgcttgtgattatctgcgtggttggcttccagaattcaaaattccagcgcgacctggttactttgagaaccgatttctcaaactttacctctaacactgtcgccgagatccaggctcttacatcccaaggctcctccctagaagagactatcgcgtcactcaaagcagaagtcgagggattcaagcaggaacggcaagcagttcactcagaaatgcttttaagggtgcagcagctggtgcaggatcttaaaaagctaacttgtcaggtcgccaccttaaacaataatggcgaagaggcttccacagaaggtacctgttgccccgtaaactgggtggagcaccaagacagctgttattggttctcacatagcggtatgtcctgggctgaggccgagaagtattgtcagctaaagaatgcgcacctggtggtgatcaacagccgggaagagcaaaacttcgtgcagaagtatctcggatccgcatacacctggatgggcttatccgacccagagggagcctggaagtgggtagacggcacagactatgccactgggtttcagaattggaagcccggtcagccagatgattggcagggacacggtctgggcggaggcgaggattgcgcccatttccatcctgacggtcgctggaacgatgacgtctgtcagaggccgtatcactgggtttgcgaggcgggattgggccagacttcccaggaaagtcactag

SEQ ID NO: 164127 - DNA, 879 bp, Artificial Sequence
  derived and/or modified sequence
atgacgagaacgtatgagaacttccagtacctcgagaataaagtgaaggtgcagggcttcaaaaacggacccttaccgttgcagtccctcctgcagcggctctgcagtgggccttgccacctcttgctgagcttaggcttaggcctgctgctcctggtgattatttgcgtagtgggcttccagaactctaagtttcaacgagatctggtgacattaaggactgatttctctaatttcacaagcaatacggttgcagagatacaggccctgacgtcacagggatcctcacttgaggagactatcgcatctctcaaggccgaggtagaagggttcaagcaggaaaggcaagctgttcactccgaaatgcttctgcgcgtgcagcaactagtccaggacctgaagaagctcacttgtcaggtggcaactttgaacaataacggagaggaagccagtaccgaggggacctgctgcccagtgaactgggtggagcatcaggactcctgctactggttttctcactctggaatgagctgggctgaggccgagaagtattgccagctcaaaaatgcccacttggtggtgatcaattccagggaagagcagaatttcgtccagaagtacttgggcagtgcatacacatggatggggctgtccgatcctgaaggagcctggaagtgggtggacggaacagactacgcgacagggtttcagaattggaagcccggtcagccagatgactggcagggacatggcctagggggtggagaggactgcgcacatttccatcccgatggcagatggaacgacgacgtatgtcagcgtccatatcattgggtatgtgaggccggtctcggacagaccagccaggagtcccattag

SEQ ID NO: 164128 - DNA, 879 bp, Artificial Sequence
  derived and/or modified sequence
atgaccaggacctacgaaaacttccagtatctggagaacaaggtaaaggtccagggctttaagaatgggccactgcccctgcagagtctccttcaacgcctgtgtagtgggccttgccacctgttacttagcctgggactgggacttctcctccttgtgattatttgcgtggtgggttttcagaactcgaaatttcagcgggacttagtcaccttgagaacagactttagtaattttacctccaacacagtggcagagattcaggccttgactagtcaagggtcatcactggaggaaacgatcgcttctttgaaggccgaagttgaggggttcaagcaagaacggcaggccgtccatagtgagatgttactccgcgttcagcagcttgtgcaggatctcaaaaagctgacatgtcaggtagcgacactgaataataatggggaagaagcctctactgagggcacctgctgtcctgtgaactgggtagagcatcaggactcctgttattggttctcacactcaggaatgtcctgggccgaggccgaaaagtattgtcagctgaagaacgcacatctcgtcgtcatcaatagcagagaggaacaaaactttgttcagaaatacctcggatccgcttatacctggatgggcctgagcgatcccgagggagcttggaagtgggtagatggaaccgattatgctaccggatttcagaactggaaacccggacagcctgatgactggcagggccacggactcggtggaggtgaggattgtgcacattttcatcccgacggacgttggaacgacgacgtgtgccaacgcccttatcattgggtctgtgaggctgggctgggacagacctcacaggagtcacattag

SEQ ID NO: 164129 - DNA, 1442 bp, Artificial Sequence
  derived and/or modified sequence
atggtctctgtgtgttctaatccctgttcattctcatttactgtctaaagttgaggagatgggatgtcccagatgatagggctcctgggatttcagacccaagaccagcaggactccagtcacctctaccccagctctccaggacacagcgctcccaactctgagtgacgtcccacctctggtccttgcagcacaaccaacgtgggaatcacaccctccagacctcccacagctccaccccagactgggcgccggccctgcctccatttcagctgtgacaacctcagagccgtgttggcccaagcatgacaaggacgtatgaaaacttccagtacttggagaataaggtgaaagtccaggggtttaaaaatgggccacttcctctccagtccctcctgcagcgtctctgctctgggccctgccatctcctgctgtccctgggcctcggcctcctgctgctggtcatcatctgtgtggttggattccaaaattccaaatttcagagggacctggtgaccctgagaacagattttagcaacttcacctcaaacactgtggcggagatccaggcactgacttcccagggcagcagcttggaagaaacgatagcatctctgaaagctgaggtggagggtttcaagcaggaacggcaggcagttcattctgaaatgctcctgcgagtccagcagctggtgcaagacctgaagaaactgacctgccaggtggctactctcaacaacaatggtgaggaagcctccactgaagggacctgctgccctgtcaactgggtggagcaccaagacagctgctactggttctctcactctgggatgtcctgggccgaggctgagaagtactgccagctgaagaacgcccacctggtggtcatcaactccagggaggagcagaattttgtccagaaatatctaggctccgcatacacctggatgggcctcagtgaccctgaaggagcctggaagtgggtggatggaacagactatgcgaccggcttccagaactggaagccaggccagccagacgactggcaggggcacgggctgggtggaggcgaggactgtgctcacttccatccagacggcaggtggaatgacgacgtctgccagaggccctaccactgggtctgcgaggctggcctgggtcagaccagccaggagagtcactgagctgcctttggtgggaccacccggccacagaaatggcggtgggaggaggactcttctcacgacctcctcgcaagaccgctctgggagagaaataagcactgggagattggaagcactgctaacattttgaatttttttctctttaattttaaaaagatggtatagtgttcttaagcttttattttttttccaacttttgaaagtcaacttcatgaaggtataatttttacataataaaaatgcactcatttaaagagt

SEQ ID NO: 164130 - DNA, 1698 bp, Artificial Sequence
  derived and/or modified sequence
ggtctctgtgtgttctaatccctgttcattctcatttactgtctaaagttgaggagatgggatgtcccagatgatagggctcctgggatttcagacccaagaccagcaggactccagtcacctctaccccagctctccaggacacagcgctcccaactctgagtgacgtcccacctctggtccttgcagcacaaccaacgtgggaatcacaccctccagacctcccacagctccaccccagactgggcgccggccctgcctccatttcagctgtgacaacctcagagccgtgttggcccaagcatgacaaggacgtatgaaaacttccagtacttggagaataaggtgaaagtccaggggtttaaaaatgggccacttcctctccagtccctcctgcagcgtctctgctctgggccctgccatctcctgctgtccctgggcctcggcctcctgctgctggtcatcatctgtgtggttggattccaaaattccaaatttcagagggacctggtgaccctgagaacagattttagcaacttcacctcaaacactgtggcggagatccaggcactgacttcccagggcagcagcttggaagaaacgatagcatctctgaaagctgaggtggagggtttcaagcaggaacggcaggcagttcattctgaaatgctcctgcgagtccagcagctggtgcaagacctgaagaaactgacctgccaggtggctactctcaacaacaatggtgaggaagcctccactgaagggacctgctgccctgtcaactgggtggagcaccaagacagctgctactggttctctcactctgggatgtcctgggccgaggctgagaagtactgccagctgaagaacgcccacctggtggtcatcaactccagggaggagcagaattttgtccagaaatatctaggctccgcatacacctggatgggcctcagtgaccctgaaggagcctggaagtgggtggatggaacagactatgcgaccggcttccagaactggaagccaggccagccagacgactggcaggggcacgggctgggtggaggcgaggactgtgctcacttccatccagacggcaggtggaatgacgacgtctgccagaggccctaccactgggtctgcgaggctggcctgggtcagaccagccaggagagtcactgagctgcctttggtgggaccacccggccacagaaatggcggtgggaggaggactcttctcacgacctcctcgcaagaccgctctgggagagaaataagcactgggagattggaagcactgctaacattttgaatttttttctctttaattttaaaaagatggtatagtgttcttaagcttttattttttttccaacttttgaaagtcaacttcatgaaggtataatttttacataataaaaatgcactcatttaaagagtagagatgactttgacaaatatgcatgcctaggtgactaccactccgatcgcaatagataacattgccatcgcccccaccagtcccctcatgcctctgggcagtccaaccacttccctgtttccaggccagtgatctacttctttttcactatttattggccttgcctcttctagagcttctagaacttcatataagtgaaatcatacactctcgtgtatatacttcatataagtgaatatatactctcgtgagaactt

SEQ ID NO: 164131 - DNA, 879 bp, Artificial Sequence
  derived and/or modified sequence
atgaccagaacctacgagaacttccagtacctggagaacaaggtgaaggtgcagggcttcaagaacggccccctgcccctgcagagcctgctgcagagactgtgcagcggcccctgccacctgctgctgagcctgggcctgggcctgctgctgctggtgatcatctgcgtggtgggcttccagaacagcaagttccagagagacctggtgaccctgagaaccgacttcagcaacttcaccagcaacaccgtggccgagatccaggccctgaccagccagggcagcagcctggaggagaccatcgccagcctgaaggccgaggtggagggcttcaagcaggagagacaggccgtgcacagcgagatgctgctgagagtgcagcagctggtgcaggacctgaagaagctgacctgccaggtggccaccctgaacaacaacggcgaggaggccagcaccgagggcacctgctgccccgtgaactgggtggagcaccaggacagctgctactggttcagccacagcggcatgagctgggccgaggccgagaagtactgccagctgaagaacgcccacctggtggtgatcaacagcagagaggagcagaacttcgtgcagaagtacctgggcagcgcctacacctggatgggcctgagcgaccccgagggcgcctggaagtgggtggacggcaccgactacgccaccggcttccagaactggaagcccggccagcccgacgactggcagggccacggcctgggcggcggcgaggactgcgcccacttccaccccgacggcagatggaacgacgacgtgtgccagagaccctaccactgggtgtgcgaggccggcctgggccagaccagccaggagagccactag

SEQ ID NO: 164132 - protein, 568 aa, Artificial Sequence
  derived and/or modified sequence
MLPGLAAAAAHRCSWSSLCRLRLRCRAAACNPSDRQEWQNLVTFGSFSNMVPCSHPYIGTLSQVKLYSTNVQKEGQGSQTLRVEKVPSFETAEGIGTELKAPLKQEPLQVRVKAVLKKREYGSKYTQNNFITGVRAINEFCLKSSDLEQLRKIRRRSPHEDTESFTVYLRSDVEAKSLEVWGSPEALAREKKLRKEAEIEYRERLFRNQKILREYRDFLGNTKPRSRTASVFFKGPGKVVMVAICINGLNCFFKFLAWIYTGSASMFSEAIHSLSDTCNQGLLALGISKSVQTPDPSHPYGFSNMRYISSLISGVGIFMMGAGLSWYHGVMGLLHPQPIESLLWAYCILAGSLVSEGATLLVAVNELRRNARAKGMSFYKYVMESRDPSTNVILLEDTAAVLGVIIAATCMGLTSITGNPLYDSLGSLGVGTLLGMVSAFLIYTNTEALLGRSIQPEQVQRLTELLENDPSVRAIHDVKATDLGLGKVRFKAEVDFDGRVVTRSYLEKQDFDQMLQEIQEVKTPEELETFMLKHGENIIDTLGAEVDRLEKELKKRNPEVRHVDLEIL

SEQ ID NO: 164133 - protein, 396 aa, Artificial Sequence
  derived and/or modified sequence
MWKQNLWKFGEALKLLPEKKLRKEAEIEYRERLFRNQKILREYRDFLGNTKPRSRTASVFFKGPGKVVMVAICINGLNCFFKFLAWIYTGSASMFSEAIHSLSDTCNQGLLALGISKSVQTPDPSHPYGFSNMRYISSLISGVGIFMMGAGLSWYHGVMGLLHPQPIESLLWAYCILAGSLVSEGATLLVAVNELRRNARAKGMSFYKYVMESRDPSTNVILLEDTAAVLGVIIAATCMGLTSITGNPLYDSLGSLGVGTLLGMVSAFLIYTNTEALLGRSIQPEQVQRLTELLENDPSVRAIHDVKATDLGLGKVRFKAEVDFDGRVVTRSYLEKQDFDQMLQEIQEVKTPEELETFMLKHGENIIDTLGAEVDRLEKELKKRNPEVRHVDLEIL

SEQ ID NO: 164134 - DNA, 1707 bp, Artificial Sequence
  derived and/or modified sequence
atgctgcccggcctggccgccgccgccgcccacagatgcagctggagcagcctgtgcagactgagactgagatgcagagccgccgcctgcaaccccagcgacagacaggagtggcagaacctggtgaccttcggcagcttcagcaacatggtgccctgcagccacccctacatcggcaccctgagccaggtgaagctgtacagcaccaacgtgcagaaggagggccagggcagccagaccctgagagtggagaaggtgcccagcttcgagaccgccgagggcatcggcaccgagctgaaggcccccctgaagcaggagcccctgcaggtgagagtgaaggccgtgctgaagaagagagagtacggcagcaagtacacccagaacaacttcatcaccggcgtgagagccatcaacgagttctgcctgaagagcagcgacctggagcagctgagaaagatcagaagaagaagcccccacgaggacaccgagagcttcaccgtgtacctgagaagcgacgtggaggccaagagcctggaggtgtggggcagccccgaggccctggccagagagaagaagctgagaaaggaggccgagatcgagtacagagagagactgttcagaaaccagaagatcctgagagagtacagagacttcctgggcaacaccaagcccagaagcagaaccgccagcgtgttcttcaagggccccggcaaggtggtgatggtggccatctgcatcaacggcctgaactgcttcttcaagttcctggcctggatctacaccggcagcgccagcatgttcagcgaggccatccacagcctgagcgacacctgcaaccagggcctgctggccctgggcatcagcaagagcgtgcagacccccgaccccagccacccctacggcttcagcaacatgagatacatcagcagcctgatcagcggcgtgggcatcttcatgatgggcgccggcctgagctggtaccacggcgtgatgggcctgctgcacccccagcccatcgagagcctgctgtgggcctactgcatcctggccggcagcctggtgagcgagggcgccaccctgctggtggccgtgaacgagctgagaagaaacgccagagccaagggcatgagcttctacaagtacgtgatggagagcagagaccccagcaccaacgtgatcctgctggaggacaccgccgccgtgctgggcgtgatcatcgccgccacctgcatgggcctgaccagcatcaccggcaaccccctgtacgacagcctgggcagcctgggcgtgggcaccctgctgggcatggtgagcgccttcctgatctacaccaacaccgaggccctgctgggcagaagcatccagcccgagcaggtgcagagactgaccgagctgctggagaacgaccccagcgtgagagccatccacgacgtgaaggccaccgacctgggcctgggcaaggtgagattcaaggccgaggtggacttcgacggcagagtggtgaccagaagctacctggagaagcaggacttcgaccagatgctgcaggagatccaggaggtgaagacccccgaggagctggagaccttcatgctgaagcacggcgagaacatcatcgacaccctgggcgccgaggtggacagactggagaaggagctgaagaagagaaaccccgaggtgagacacgtggacctggagatcctgtag

SEQ ID NO: 164135 - DNA, 1191 bp, Artificial Sequence
  derived and/or modified sequence
atgtggaagcagaacctgtggaagttcggcgaggccctgaagctgctgcccgagaagaagctgagaaaggaggccgagatcgagtacagagagagactgttcagaaaccagaagatcctgagagagtacagagacttcctgggcaacaccaagcccagaagcagaaccgccagcgtgttcttcaagggccccggcaaggtggtgatggtggccatctgcatcaacggcctgaactgcttcttcaagttcctggcctggatctacaccggcagcgccagcatgttcagcgaggccatccacagcctgagcgacacctgcaaccagggcctgctggccctgggcatcagcaagagcgtgcagacccccgaccccagccacccctacggcttcagcaacatgagatacatcagcagcctgatcagcggcgtgggcatcttcatgatgggcgccggcctgagctggtaccacggcgtgatgggcctgctgcacccccagcccatcgagagcctgctgtgggcctactgcatcctggccggcagcctggtgagcgagggcgccaccctgctggtggccgtgaacgagctgagaagaaacgccagagccaagggcatgagcttctacaagtacgtgatggagagcagagaccccagcaccaacgtgatcctgctggaggacaccgccgccgtgctgggcgtgatcatcgccgccacctgcatgggcctgaccagcatcaccggcaaccccctgtacgacagcctgggcagcctgggcgtgggcaccctgctgggcatggtgagcgccttcctgatctacaccaacaccgaggccctgctgggcagaagcatccagcccgagcaggtgcagagactgaccgagctgctggagaacgaccccagcgtgagagccatccacgacgtgaaggccaccgacctgggcctgggcaaggtgagattcaaggccgaggtggacttcgacggcagagtggtgaccagaagctacctggagaagcaggacttcgaccagatgctgcaggagatccaggaggtgaagacccccgaggagctggagaccttcatgctgaagcacggcgagaacatcatcgacaccctgggcgccgaggtggacagactggagaaggagctgaagaagagaaaccccgaggtgagacacgtggacctggagatcctgtag

SEQ ID NO: 164136 - DNA, 1707 bp, Artificial Sequence
  derived and/or modified sequence
atgcttcctggtctagctgccgctgccgcccacaggtgttcttggtcatccctctgtcgtctccggttgagatgcagggctgctgcatgtaacccctccgacagacaagagtggcaaaacctggtcacttttggaagcttctctaatatggttccctgctcacacccgtatatcgggaccttatcgcaggtgaagctatacagcactaacgtgcagaaagaaggccagggaagccaaacactgagggtggagaaagttcccagcttcgaaaccgctgagggaattggtaccgagctaaaagcacccctgaaacaggagcccctgcaggtgagagtgaaagccgtattgaagaagcgcgaatatgggtccaaatacactcagaacaatttcattaccggagtacgcgctattaacgagttttgtctgaagagtagcgacctggagcagttacgtaagatacggaggcggtcgccacacgaagacacagagagttttaccgtctatttgcggagtgatgtggaagccaaatctctcgaagtctggggcagccctgaagccctggctagggaaaagaagctccgcaaggaggccgaaatcgagtatcgagaaaggctgttccggaatcagaagattctgcgcgagtacagggactttcttggcaatactaaacctcggtcccggactgcctccgttttttttaaggggcctggcaaggtggtcatggtagctatttgtattaatggcctgaactgcttctttaagttcttagcttggatctacacgggatcagcctcgatgttttccgaggcgattcatagcttgtccgacacttgtaatcagggcctgctggccctgggtatctctaaaagcgtgcagactcctgacccctctcacccatatggattttctaacatgcgatatatctccagcctgatttccggagtaggtatcttcatgatgggagctggcctgagttggtaccatggggtcatgggtttgcttcaccctcagccaatcgaaagcctgttgtgggcgtattgcatactcgcaggaagcctagtgagcgagggagctacacttctggtggcagttaatgagctgcgtcggaatgcccgggccaaaggcatgagcttctacaaatacgtgatggaatctagggatccttccaccaacgttatcctgctagaggacactgccgcggtcctcggcgtgatcatagcggcgacatgcatgggattaacctctatcacaggtaaccctctctatgattccttaggttccctgggcgtggggaccctgctcggaatggtttctgcgtttctcatctacaccaatacggaagctctcctcggaaggtcaatccagcctgagcaggtccagcggctgaccgaactactggaaaatgacccttcagtgagagcgattcatgatgtgaaggcgactgatctgggcctcggaaaggtgaggtttaaggctgaggtcgattttgacggaagggtggttacgcggagctatttggagaaacaggattttgatcagatgctgcaagaaatccaggaggtgaaaactccagaagagctggagacatttatgctgaagcatggagagaacattattgacacactgggcgctgaagtcgataggcttgagaaagagctgaagaagagaaatcctgaagtaagacacgttgatctggagatcctgtag

SEQ ID NO: 164137 - DNA, 1191 bp, Artificial Sequence
  derived and/or modified sequence
atgtggaaacagaacctgtggaaatttggggaagcgctgaagctccttccagagaaaaaactgaggaaagaggccgagatagagtaccgggagcgcctgttcaggaaccagaagatattgcgcgaatatagagattttctaggcaacaccaagccccgcagtcggaccgcctcagttttctttaagggacctggcaaagtggtcatggtcgctatctgtattaacggccttaactgcttcttcaaatttttagcttggatttacactggctccgcgagtatgtttagtgaagcaatacatagcctgagtgacacatgtaaccaaggccttctggcactgggcatcagcaagtccgtccagactcctgacccctcgcatccatatggattttccaacatgcgttacatatcttctctgattagcggtgtgggaatcttcatgatgggagccggacttagctggtaccatggagttatgggacttctgcatcctcagcctattgaatccctcctttgggcatattgtatcctggcaggcagcttagtcagcgagggcgcgaccctccttgtggctgtgaacgaactgcggagaaacgctagagccaagggtatgtccttctataagtacgtgatggagtcgagagacccctctaccaacgtcattctactggaagataccgccgcagtgctgggcgtgataatcgctgcaacctgcatgggcctgacctccatcacaggtaatcctttatacgatagcctggggtctctcggggtgggcacactcctcggcatggtgagcgctttccttatatacactaatacggaagctttacttgggcggtccattcagccagagcaggttcagcgtttaactgaacttctggaaaatgatccgtcggtccgtgcaatccatgatgtcaaagcaacggatctcggtctcggcaaagtcagattcaaggccgaagtggattttgatggaagagttgtgacccgctcttacctggaaaagcaggacttcgatcagatgttgcaagagattcaggaggttaagactccagaggagttagaaacctttatgcttaagcacggtgagaacataatcgatactctaggagctgaggtcgacagactggagaaagagcttaagaagcgaaatccggaggtgagacatgtggacctcgaaatactctag

SEQ ID NO: 164138 - DNA, 1707 bp, Artificial Sequence
  derived and/or modified sequence
atgctgcccggcctggccgctgctgctgcccaccgctgctcctggagcagcctgtgccgcctgcggctgcgctgcagagctgctgcctgcaaccccagcgaccggcaggagtggcagaacctggtgaccttcggcagcttcagcaacatggtgccctgcagccacccctacatcggcaccctgagccaggtgaagctgtacagcaccaacgtgcagaaggagggccagggcagccagaccctgcgggtggagaaggtgcccagctttgaaacagctgagggcattggaacagagctgaaggcccccctgaagcaggagcccctgcaggtgcgggtgaaggctgtgctgaagaagcgggagtatggcagcaagtacacccagaacaacttcatcaccggggtgcgggccatcaatgagttctgcctgaagagcagtgacctggagcagctgaggaagatcagaagaagaagcccccatgaggacacagagagcttcaccgtgtacctgcggagtgatgtggaggccaagagcctggaggtgtggggcagccctgaggccctggcccgggagaagaagctgaggaaggaggccgagattgagtaccgggagcggctcttcaggaaccagaagatcctgcgggagtacagagacttcctgggcaacaccaagcccaggagcaggacagccagcgtcttcttcaagggccctgggaaggtggtgatggtggccatctgcatcaatggcctgaactgcttcttcaagttcctggcctggatctacacaggcagcgcctccatgttcagcgaggccatccacagcctgagtgacacctgcaaccagggcctgctggccctgggcatcagcaagtctgtgcagaccccagaccccagccacccctacggcttcagcaacatgagatacatcagcagcctcatctctggagtgggcatcttcatgatgggcgccggcctgtcctggtaccacggcgtgatgggcctgctgcacccccagcccatcgagagcctgctgtgggcctactgcatcctggccggcagcctggtgtctgagggcgccaccctgctggtggccgtgaatgagctgcggagaaatgcccgggccaagggcatgtccttctacaagtatgtgatggagagccgggaccccagcaccaacgtcatcctgctggaggacacagctgctgtgctgggcgtcatcatcgccgccacctgcatgggcctgaccagcatcactggaaaccccctgtatgacagcctgggcagcctgggcgtgggcaccctgctgggcatggtgtctgccttcctgatctacaccaacacagaggccctgctgggccgcagcatccagcctgagcaggtgcagaggctgacagagctgctggagaatgaccccagcgtgcgggccatccatgatgtgaaggccacagacctgggcctgggcaaggtgcgcttcaaggccgaggtggactttgatggccgggtggtgaccaggagctacctggagaagcaggactttgaccagatgctgcaggagatccaggaggtgaagaccccagaggagctggagaccttcatgctgaagcacggggagaacatcatcgacaccctgggcgctgaggtggaccggctggagaaggagctgaagaagaggaaccctgaggtgcgccacgtggacctggagatcctgtag

SEQ ID NO: 164139 - DNA, 1191 bp, Artificial Sequence
  derived and/or modified sequence
atgtggaagcagaacctgtggaagtttggagaggccctgaagctgctgcctgagaagaagctgaggaaggaggccgagattgagtaccgggagcggctcttcaggaaccagaagatcctgcgggagtacagagacttcctgggcaacaccaagcccaggagcaggacagccagcgtcttcttcaagggccctgggaaggtggtgatggtggccatctgcatcaatggcctgaactgcttcttcaagttcctggcctggatctacacaggcagcgcctccatgttcagcgaggccatccacagcctgagtgacacctgcaaccagggcctgctggccctgggcatcagcaagtctgtgcagaccccagaccccagccacccctacggcttcagcaacatgagatacatcagcagcctcatctctggagtgggcatcttcatgatgggcgccggcctgtcctggtaccacggcgtgatgggcctgctgcacccccagcccatcgagagcctgctgtgggcctactgcatcctggccggcagcctggtgtctgagggcgccaccctgctggtggccgtgaatgagctgcggagaaatgcccgggccaagggcatgtccttctacaagtatgtgatggagagccgggaccccagcaccaacgtcatcctgctggaggacacagctgctgtgctgggcgtcatcatcgccgccacctgcatgggcctgaccagcatcactggaaaccccctgtatgacagcctgggcagcctgggcgtgggcaccctgctgggcatggtgtctgccttcctgatctacaccaacacagaggccctgctgggccgcagcatccagcctgagcaggtgcagaggctgacagagctgctggagaatgaccccagcgtgcgggccatccatgatgtgaaggccacagacctgggcctgggcaaggtgcgcttcaaggccgaggtggactttgatggccgggtggtgaccaggagctacctggagaagcaggactttgaccagatgctgcaggagatccaggaggtgaagaccccagaggagctggagaccttcatgctgaagcacggggagaacatcatcgacaccctgggcgctgaggtggaccggctggagaaggagctgaagaagaggaaccctgaggtgcgccacgtggacctggagatcctgtag

SEQ ID NO: 164140 - DNA, 1707 bp, Artificial Sequence
  derived and/or modified sequence
atgctgcccggcctggccgccgccgccgcccaccggtgcagctggagcagtctctgcagattaagactccgttgtagggccgccgcatgtaatccgtcagatcgtcaggagtggcagaaccttgtgactttcggatcatttagcaacatggtgccttgcagtcacccctatattgggactctctctcaggtgaagttatactccacgaacgtgcagaaagagggacaagggtctcaaaccctacgcgtagaaaaagtgccaagcttcgagaccgccgagggcattggcactgagctcaaggcccctctcaaacaggagccccttcaggtgagggtgaaggcagttctaaaaaagcgggagtacggtagcaaatacacccaaaacaacttcattaccggagtacgcgctattaatgagttttgtttgaaatcctccgatctggaacaactacgcaagattcgccggcgttccccacatgaagataccgaaagctttaccgtttacctcaggagcgatgtcgaagcaaagtccctagaggtctggggtagtccagaagccctggcaagagaaaagaaactgcggaaagaagctgaaatagaatatcgtgaaaggctatttaggaatcaaaaaatcctcagggaataccgagactttctgggaaacaccaaaccccgctcacgcacagccagcgtattcttcaaaggacccggaaaggtagtgatggtggccatttgtattaatggcttgaactgcttcttcaaatttcttgcttggatatacaccggaagtgccagcatgtttagtgaggctatacactctctgtcagacacgtgcaatcaggggctgctcgccctggggatctccaaatccgtgcaaaccccagaccctagtcatccgtatggctttagtaatatgaggtacatatcttcactgatctccggggttggaatcttcatgatgggtgccggactttcctggtatcatggagttatgggcctgctgcacccacagccaattgagtcactcctgtgggcatactgcattctcgccggaagtttagtgagcgagggagcgacactgctggtggccgttaatgagctccggcggaatgccagagccaaggggatgagcttttacaagtatgtgatggaatctagagacccaagcaccaatgtcatcctcctcgaggacaccgccgctgtccttggcgtgatcatagccgccacctgcatgggtctaacctctatcactggtaaccccctgtatgattcactcgggagcctgggcgttggcacactgctggggatggtctcagcctttctaatttacactaataccgaggccttacttggacgcagtatccagcctgagcaggtacagcgcctcactgaactactcgagaacgatcctagcgttcgtgcgattcacgatgtgaaggcaactgacctggggctgggcaaggtacgtttcaaagccgaagtggacttcgacggacgtgtggtcactagaagttatctcgagaaacaggattttgaccagatgcttcaggagatccaggaagtcaaaaccccagaagagttagagacttttatgctgaagcacggggagaacattattgatacactcggcgccgaggttgaccgactcgagaaggagttaaagaagagaaaccctgaagtaagacatgtcgatctagaaattttatag

SEQ ID NO: 164141 - DNA, 1191 bp, Artificial Sequence
  derived and/or modified sequence
atgtggaagcagaacctgtggaagttcggcgaggccctgaagctgctgcctgagaagaaactccggaaggaagctgaaatagagtacagggagcggctgttcaggaaccagaagattcttagagaatacagggattttctgggtaataccaagccccggtccaggacagcctcagtgtttttcaagggtccaggaaaggtggtcatggtcgccatctgtattaacggccttaactgtttcttcaagttccttgcttggatttataccggcagcgcctccatgtttagtgaggcgattcattcactctcagacacctgtaaccaggggctacttgctctcggaatttccaaatccgtgcagacgccggacccctcacatccttatggcttctcgaatatgaggtacatctctagtctgattagcggcgtggggatttttatgatgggtgcaggcttgagttggtaccatggcgtgatggggcttctgcacccccaacctattgagagtctgctgtgggcttactgtattttggctggaagcttagtgagtgagggcgccactttgctcgtggctgtcaatgaactcagaagaaatgcaagggcaaaaggaatgtctttttacaagtatgtgatggagtctcgtgatccctctaccaacgtaatattgctggaggacactgccgcagtcctaggcgtcatcattgctgccacatgcatgggtctgacttccattacgggcaatccgctttacgatagcttaggcagtctcggagtcggcacgctgctcggaatggtcagcgcctttcttatttataccaacactgaagctcttcttggtcggtccatccagccagagcaggttcagcgtctcactgagttgctggaaaatgaccccagtgttagggccatacatgacgttaaggcaacagacctggggctcggcaaggtgaggtttaaggccgaagtggatttcgacggacgggtcgtcactcggagctatttggagaaacaagactttgatcagatgctgcaggagatccaggaagtgaagactccagaggagctggagacttttatgctgaagcatggcgaaaacataatagacaccctcggtgccgaagtcgatcgcttggagaaagagctgaaaaagaggaaccctgaggtgagacatgtggacctcgagatcctctag

SEQ ID NO: 164142 - DNA, 1707 bp, Artificial Sequence
  derived and/or modified sequence
atgttaccagggctggccgcagctgcagcccatcggtgttcatggagttctctttgtagactgagacttagatgtcgtgctgcagcctgcaatccttcagatcgccaggagtggcagaacctcgtgacctttgggagcttctccaacatggtcccctgctctcacccctacatcggcaccttaagccaggtcaaactttatagcacaaacgtgcagaaggaagggcaaggctcacagacgcttagagtagagaaagtaccctccttcgaaacggcagaaggtataggcactgaactaaaggccccactgaaacaagagccccttcaggtgagggttaaggcagtgttgaagaaacgggaatatggctccaaatatacacagaataattttattacgggagtgcgggcaattaatgaattttgtctcaaatcgtcagacctcgaacagttacgaaagataagaaggaggagtcctcatgaggacacagagtccttcaccgtatacctgcgctccgatgttgaggctaaatccctcgaagtctggggctcacctgaggcgctcgccagagagaaaaaactgaggaaagaggctgagatcgagtatagggagaggctgttccgaaatcaaaagattctccgcgagtatagagacttcttgggaaacacaaagcccagaagccgaaccgcttccgtgttcttcaaagggccaggcaaagttgtgatggtggcaatttgtatcaatgggctgaattgcttctttaaattcctggcctggatctacaccgggtcagcctccatgttttccgaggcaatccactccctctctgatacctgtaaccaggggctgctggctttaggaatttcaaaatcagtacaaactcccgatccaagccacccctatggtttttctaacatgcggtacattagcagtcttatttccggtgtcggcatcttcatgatgggcgcaggactcagctggtaccacggggtcatgggcctgttgcatcctcagcccattgagtcccttctgtgggcttactgtatactggcagggagcctggtaagcgaaggcgcaaccctcctggtcgccgtcaatgagctgcgcaggaacgccagagctaaggggatgagcttttacaagtacgttatggaatccagggacccttccactaacgtgatcctcctcgaggatactgctgcagtactcggagtgatcattgctgctacctgcatgggactgacgtcgattaccgggaatcctctgtacgactcactcgggtctctgggggtgggtacattactcggcatggtaagcgcctttcttatctatacgaacacagaggctctgctcggcagaagtatccagcctgagcaggtgcagagacttaccgaactgctggaaaacgacccatcagtccgggctatccacgacgtaaaagctaccgatctggggttaggtaaggtgcgctttaaggccgaggtcgactttgatggtagggttgtgacgcggtcttatcttgaaaagcaggattttgatcagatgctgcaggagatccaggaggtgaaaactcctgaagagctggagaccttcatgctcaaacatggggagaatataattgatacgctgggcgctgaagtggacaggctggaaaaggaactgaaaaagagaaaccctgaggtgaggcacgttgatctggaaatcctgtag

SEQ ID NO: 164143 - DNA, 1191 bp, Artificial Sequence
  derived and/or modified sequence
atgtggaaacaaaatctctggaagttcggtgaggcactgaaactgctgcccgagaaaaaactgcgcaaagaagcagagatcgaatatagggagcgcctctttcgcaaccaaaagattttacgtgaatatagggatttcctggggaataccaagcctagatctcggaccgccagtgtcttttttaagggccctggaaaggtcgtgatggtcgcaatctgtattaacgggctcaactgcttcttcaagtttctagcatggatttacactgggagcgccagtatgttttccgaagccatccattccctgtctgacacatgcaaccagggcctcctcgccctggggatttccaaatcggtccaaactccagatcccagtcacccctacggtttctctaacatgagatacatttcaagtctcatcagcggagtcggtatcttcatgatgggagccggactgtcatggtaccacggggtaatgggcctgttacatccacagcccatcgagtccctactatgggcatactgtatcttagctggttctttggtatcggaaggtgccaccctgctggtggcagtgaacgaactcaggcggaacgctagggcaaaaggcatgtccttttataagtacgtcatggagtccagggatccgtctacaaacgttatcctgctggaggatacagctgctgtcctgggcgttattatcgccgcaacatgcatgggactgacctcaatcaccggtaaccctctgtacgatagcctgggaagtcttggcgtggggactcttttgggcatggttagcgcatttctgatctacactaatactgaggcgcttttgggacggagcattcagcctgaacaggtgcaacgcctgacagagctcctggaaaacgatccctctgttcgtgccatccacgatgtaaaagccacagacctgggtcttggcaaggtgcggttcaaagctgaggtggactttgacgggcgtgtggtaacccgctcctatctggaaaagcaggatttcgaccagatgttacaggaaattcaggaggttaaaacacccgaagagttggaaacgttcatgcttaaacatggggagaacataatcgacactctgggggcagaggtggatcgactagagaaggagttgaaaaaacgcaatcccgaagtgcggcatgtggatctagaaattctgtag

SEQ ID NO: 164144 - DNA, 3295 bp, Artificial Sequence
  derived and/or modified sequence
acttccgctacctccacggcaggcgtcgctaaatgacgttgccgtttccgggtcacccaggcagcttgtggcggcgaagccatcggtgttcgctgatgtccagtctatggagtcagttggtaccggtggcggcgcggaggcagaaggcggtgtccgagtaggggcctctgccccaccaggatgttacccggcttggccgccgccgcggcccacagatgtagctggtcctccctgtgccggctccgtctgcgatgcagggcggcggcctgtaatcccagcgaccgccaggagtggcagaatttagtgacatttggaagcttttcaaacatggttccctgtagtcatccatatattggtaccctgagtcaagtaaagttgtactccacaaatgttcagaaagaaggacagggatcacaaacactcagagtggaaaaagtaccatcatttgaaacagcagaaggtataggcacagaactcaaagctccacttaagcaagaacctctccaagtaagagttaaagcagtccttaagaaaagggagtatggctcaaagtacactcagaataatttcatcactggagtcagagcgataaatgagttctgcctcaaatccagtgatctagaacaacttcgaaaaatcagacgacgaagtccccatgaagatactgagtcttttactgtatacttgagatcagatgtggaagcaaaatctttggaagtttggggaagccctgaagctcttgccagagagaaaaaattgcgtaaggaagcagaaatagaatacagagaaaggctatttagaaaccaaaaaatattaagagaatacagagatttcttgggaaataccaagccacgctccagaacagcatcagtgttttttaagggaccaggaaaagtggtgatggttgcaatttgcatcaatggattaaactgcttctttaaatttcttgcctggatttataccggttcagcaagtatgttctcagaagctatacactcattatctgatacttgtaatcagggtttactagcattgggcatcagtaagtctgttcaaacaccagatccttctcatccgtacggattttcaaatatgcgctatatttcttcgctaattagtggtgttggtattttcatgatgggtgcaggactatcttggtaccatggagtcatgggattgcttcatcctcaaccaatagaatcccttctatgggcatattgtattttagcaggatcattagtatctgaaggagcaacacttcttgttgctgtaaatgaacttcgtaggaatgctcgggctaaaggaatgtcattttacaagtatgtaatggaaagtcgtgatcctagtacaaatgtgatattattggaggatactgctgcagtcttgggagttataatagcagccacttgcatgggccttacttctataacaggcaatccactgtatgacagcctaggttctttgggtgtgggcaccttattaggcatggtctcagcattcctcatctacactaacacagaagcactcttagggcggtccatccagccagaacaagtacaacggctcactgaactcctggagaatgacccatcagtaagggcaattcatgatgttaaagccacagatctgggattaggtaaagtaagatttaaggcagaagtagattttgatgggcgagttgttacaagatcatatttggaaaaacaagattttgaccaaatgttacaagaaattcaagaagtgaaaactcctgaagaactagagacctttatgcttaaacatggagaaaatattattgatactttaggagctgaagtagatagacttgagaaggaactgaaaaaacgaaatcctgaagttcgacatgtagatttggagatactgtgagtttgatggaatgaatcacctgggtggggaccttggaaacaagtttgtccgtccactctacaaagtttcctcctctcctacactgaaagactcagtgccatgcagaagccttttttttaagatgaaggaaatattttatgtaaagagcaactcagcaggacacagaactaaaactactacttacatctaacagacacactacaagttgaatcaatttgaaaatcatgtttttatgcttccatagggaacattttggttatttaaattgttcataatgtcccatatttcacctgttcagtgtatactgtactttgcaatcatctttccttttttcacattggtaaaaataagtggcatccataggatcatgatttttaatttgttgcctctgaagatttcactccatcaagatctgccaatcttcaatattctggctaaatcttggtatgtggtttttaaacagtcactccgtttcaaagtctgtctttccttatagaatgtggaaattatttctccataccttgtgattttgacctgagtgctaagagaatcactctccttacctagttatctacaaatgttcattccagaaatgtttagttactgaattgaatgaagacatctcagtacactcttttaggtcatagtagttgccattttgtaaaatttcttttttcttctttgcttttttccccttatttggtttaatttttctaatgttaggagatatagtcctagatatttccatgggccagtgtgatgacttttttttaaatgaggttcagtaccataatgtttatttactggaagataatgcatttataagcattttaaaattctgtaaagtgggttagaaatatttataattttacaggcaggacagcatttgacttttatttaaaaggcggcactacttatgtaaatctgagctgtgggatatttcttgctttaagagagagacagaatctctcactgaaactcatggtcatgattttgtataatatagttcatactgtgtctgtgagtttcttcagttacaaatgggcatttagtatagttatattgactataacatgtaagtaaatagctttctactgaccctaagttatcaaggtggaaaaaaaacatgcaattcagtaattgaaaatgtggtgaaaagctgcagctgtcatcatcaaaacaactcataacatactttaaaatgttcaggtagcagtgagcattgttcatatgagaatggcggctgggtgatctctttgctgaattaatgagttcttaacatgtggacccaactgcctgtgtgagatctgtgtcttaaaacttactggaatggaaatctatgaattattgcaaattgtaatgctggaaacaaaaaataaatccttggttaaagggtttgtaatggtga

SEQ ID NO: 164145 - DNA, 2187 bp, Artificial Sequence
  derived and/or modified sequence
aggcagcttgtggcggcgaagccatcggtgttcgctgatgtccagtctatggagtcagttggtaccggtggcggcgcggaggcagaaggcggtgtccgagtaggggcctctgccccaccaggatgttacccggcttggccgccgccgcggcccacagatgtagctggtcctccctgtgccggctccgtctgcgatgcagggcggcggcctgtaatcccagcgaccgccaggagtggcagaatttagtgacatttggaagcttttcaaacatggttccctgtagtcatccatatattggtaccctgagtcaagtaaagttgtactccacaaatgttcagaaagaaggacagggatcacaaacactcagagtggaaaaagtaccatcatttgaaacagcagaaggtataggcacagaactcaaagctccacttaagcaagaacctctccaagtaagagcccaagaaaggaataatggcaaataagaatcatcaattgcattatcatttttagaagagtaaggcaattaaagaacaagaggcccacacttttcagctactgcttattcaaatccagttaaagcagtccttaagaaaagggagtatggctcaaagtacactcagaataatttcatcactggagtcagagcgataaatgagttctgcctcaaatccagtgatctagaacaacttcgaaaaatcagacgacgaagtccccatgaagatactgagtcttttactgtatacttgagatcagatgtggaagcaaaatctttggaagtttggggaagccctgaagctcttgccagagaaaaaattgcgtaaggaagcagaaatagaatacagagaaaggctatttagaaaccaaaaaatattaagagaatacagagatttcttgggaaataccaagccacgctccagaacagcatcagtgttttttaagggaccaggaaaagtggtgatggttgcaatttgcatcaatggattaaactgcttctttaaatttcttgcctggatttataccggttcagcaagtatgttctcagaagctatacactcattatctgatacttgtaatcagggtttactagcattgggcatcagtaagtctgttcaaacaccagatccttctcatccgtacggattttcaaatatgcgctatatttcttcgctaattagtggtgttggtattttcatgatgggtgcaggactatcttggtaccatggagtcatgggattgcttcatcctcaaccaatagaatcccttctatgggcatattgtattttagcaggatcattagtatctgaaggagcaacacttcttgttgctgtaaatgaacttcgtaggaatgctcgggctaaaggaatgtcattttacaagtatgtaatggaaagtcgtgatcctagtacaaatgtgatattattggaggatactgctgcagtcttgggagttataatagcagccacttgcatgggccttacttctataacaggcaatccactgtatgacagcctaggttctttgggtgtgggcaccttattaggcatggtctcagcattcctcatctacactaacacagaagcactcttagggcggtccatccagccagaacaagtacaacggctcactgaactcctggagaatgacccatcagtaagggcaattcatgatgttaaagccacagatctgggattaggtaaagtaagatttaaggcagaagtagattttgatgggcgagttgttacaagatcatatttggaaaaacaagattttgaccaaatgttacaagaaattcaagaagtgaaaactcctgaagaactagagacctttatgcttaaacatggagaaaatattattgatactttaggagctgaagtagatagacttgagaaggaactgaaaaaacgaaatcctgaagttcgacatgtagatttggagatactgtgagtttgatggaatgaatcacctgggtggggaccttggaaacaagtttgtccgtccactctacaaagtttcctcctctcctacactgaaagactcagtgccatgcagaagccttttttttaagatgaaggaaatattttatgtaaagagcaactcagcaggacacagaactaaaactactacttacatctaacagacacactacaagttgaatcaatttgaaaatcatgtttttatgcttccata

SEQ ID NO: 164146 - protein, 757 aa, Artificial Sequence
  derived and/or modified sequence
MSRKISKESKKVNISSSLESEDISLETTVPTDDISSSEEREGKVRITRQLIERKELLHNIQLLKIELSQKTMMIDNLKVDYLTKIEELEEKLNDALHQKQLLTLRLDNQLAFQQKDASKYQELMKQEMETILLRQKQLEETNLQLREKAGDVRRNLRDFELTEEQYIKLKAFPEDQLSIPEYVSVRFYELVNPLRKEICELQVKKNILAEELSTNKNQLKQLTETYEEDRKNYSEVQIRCQRLALELADTKQLIQQGDYRQENYDKVKSERDALEQEVIELRRKHEILEASHMIQTKERSELSKEVVTLEQTVTLLQKDKEYLNRQNMELSVRCAHEEDRLERLQAQLEESKKAREEMYEKYVASRDHYKTEYENKLHDELEQIRLKTNQEIDQLRNASREMYERENRNLREARDNAVAEKERAVMAEKDALEKHDQLLDRYRELQLSTESKVTEFLHQSKLKSFESERVQLLQEETARNLTQCQLECEKYQKKLEVLTKEFYSLQASSEKRITELQAQNSEHQARLDIYEKLEKELDEIIMQTAEIENEDEAERVLFSYGYGANVPTTAKRRLKQSVHLARRVLQLEKQNSLILKDLEHRKDQVTQLSQELDRANSLLNQTQQPYRYLIESVRQRDSKIDSLTESIAQLEKDVSNLNKEKSALLQTKNQMALDLEQLLNHREELAAMKQILVKMHSKHSENSLLLTKTEPKHVTENQKSKTLNVPKEHEDNIFTPKPTLFTKKEAPEWSKKQKMKT

SEQ ID NO: 164147 - protein, 216 aa, Artificial Sequence
  derived and/or modified sequence
FRTAKVENEDEAERVLFSYGYGANVPTTAKRRLKQSVHLARRVLQLEKQNSLILKDLEHRKDQVTQLSQELDRANSLLNQTQQPYRYLIESVRQRDSKIDSLTESIAQLEKDVSNLNKEKSALLQTKNQMALDLEQLLNHREELAAMKQILVKMHSKHSENSLLLTKTEPKHVTENQKSKTLNVPKEHEDNIFTPKPTLFTKKEAPEWSKKQKMKT

SEQ ID NO: 164148 - DNA, 2274 bp, Artificial Sequence
  derived and/or modified sequence
atgtcaagaaagatttccaaagagtccaagaaggtcaacatttcctcatccctcgagagtgaggatatttcactcgaaaccaccgttccaaccgacgatatcagctcatccgaggagagggaagggaaagtcaggatcacccgacagctcatcgagcggaaggagctgctgcataatatccaactactgaaaattgaactgtcacaaaaaactatgatgatagacaaccttaaagtggattatctcacaaaaatcgaagagctggaagaaaagttgaacgacgccctacaccagaaacagttgttaaccctgaggctcgataaccagctcgcatttcagcagaaggacgctagtaaataccaggagttgatgaaacaggaaatggaaaccattctgctgcgccagaagcagcttgaagaaacgaatctgcagcttagagagaaggccggcgacgtgcgccggaatctgcgagactttgaactgaccgaagagcagtacatcaaactcaaagcatttcctgaggatcagcttagcattcccgagtacgtaagtgtgcgcttctacgagctggtgaatccccttcgcaaggagatctgcgagctgcaagttaaaaagaatatcctggccgaggaattgagcaccaataagaatcagctgaaacaactgaccgaaacatatgaggaagacaggaagaactattcagaggtgcaaattcgatgccagaggctggctttggagctcgctgacactaaacagctgatccaacagggagattaccggcaggagaattatgacaaagttaagagtgagcgcgacgccttggagcaggaagtcatcgaactcagacgcaaacatgagatactggaggcctctcacatgatacagacaaaagagcggagcgaactgtctaaggaggtagttacattagaacagactgtaactttgttacagaaggacaaagagtacttgaaccgacagaatatggaactctccgtcaggtgtgcccatgaagaggatagattggagagactccaggcccaactggaagagtcaaagaaggctcgagaagaaatgtacgaaaagtacgtggcgtccagagaccattacaagacggagtacgaaaacaaactgcatgatgaacttgagcaaattagactgaaaaccaatcaagagattgatcagctgagaaacgccagcagggagatgtacgagcgggaaaatcgcaatttgagagaagcacgagacaacgcagtggctgaaaaggaaagagccgtgatggccgagaaagatgctctggaaaaacacgaccaactgcttgaccgataccgcgagctccagttgagcacagagtctaaagtgactgagttcctgcaccagtccaaacttaagagcttcgagagtgagcgcgtgcagttgctgcaggaagagactgcacggaacctgacccagtgccaactcgaatgcgagaaatatcagaagaagctcgaggtcctgacgaaggaattctactcactgcaggcaagctcagaaaagcggatcacagagcttcaggcacagaactcagagcatcaggcgaggctggacatctacgagaagctggagaaggaactcgacgaaattattatgcagactgccgagattgaaaacgaagacgaagctgagagagttctcttctcctatggatacggcgctaatgtgccaaccacagcaaaacggaggctaaagcagtcggtacacctggctcgcagggttctccagttggaaaagcagaattcgctgatacttaaggacctggagcacagaaaggatcaggttactcagctttctcaggagctggatagagctaattccctcctgaatcagacacagcagccatatcgttacttgatcgagagtgtgagacagcgggattctaagatcgattctctcacggaaagtattgcgcaacttgagaaggatgtcagtaacctgaataaggaaaagtcggcactcctgcagactaagaatcaaatggcactcgacctcgagcagttgctgaatcatcgtgaagaactcgcagccatgaaacagatacttgtgaagatgcatagcaagcacagcgagaattcattactgctgactaagactgaacccaagcacgtgacggagaaccagaaatccaaaactctcaatgtccccaaggagcatgaagataacatttttacaccaaaacccacattattcactaaaaaggaggccccagagtggagcaaaaagcagaaaatgaagacatag

SEQ ID NO: 164149 - DNA, 2274 bp, Artificial Sequence
  derived and/or modified sequence
atgagcaggaagatcagcaaggagagcaagaaggtgaacatcagcagcagcctggagagcgaggacatcagcctggagaccaccgtgcccacagatgacatcagcagcagcgaggagcgggagggcaaggtgcgcatcacccggcagctgattgaaaggaaggagctgctgcacaacatccagctgctgaagattgagctgagccagaagaccatgatgattgacaacctgaaggtggactacctgaccaagattgaggagctggaggagaagctgaatgatgccctgcaccagaagcagctgctgaccctgcggctggacaaccagctggccttccagcagaaggatgccagcaagtaccaggagctgatgaagcaggagatggagaccatcctgctgcggcagaagcagctggaggagaccaacctgcagctgcgggagaaggctggagatgtgagaagaaacctgcgggactttgagctgacagaggagcagtacatcaagctgaaggccttccctgaggaccagctgagcatcccagaatatgtgtctgtgcgcttctatgagctggtgaaccccctgaggaaggagatctgtgagctgcaggtgaagaagaacatcctggccgaggagctgagcaccaacaagaaccagctgaagcagctgacagagacctatgaggaggacaggaagaactacagcgaggtgcagatccgctgccagaggctggccctggagctggccgacaccaagcagctgatccagcagggcgactaccggcaggagaactatgacaaggtgaagtcagaaagagatgccctggagcaggaggtgattgagctgcggaggaagcatgagatcctggaggccagccacatgatccagaccaaggagaggtctgagctgagcaaggaggtggtgaccctggagcagacagtgaccctgctgcagaaggacaaggagtacctgaaccggcagaacatggagctgtctgtgcgctgtgcccacgaggaggaccggctggagcggctgcaggcccagctggaggagagcaagaaggcccgggaggagatgtatgagaagtatgtggccagccgggaccactacaagacagaatatgagaacaagctgcatgatgagctggagcagatccggctgaagaccaaccaggagattgaccagctgagaaatgccagccgggagatgtatgagcgggagaacagaaacctgcgggaggcccgggacaatgctgtggccgagaaggagagagctgtgatggccgagaaggatgccctggagaagcatgaccagctgctggaccgctaccgggagctgcagctgagcacagagagcaaggtgacagagttcctgcaccagagcaagctgaagagctttgaaagtgagcgggtgcagctgctgcaggaggagacagccaggaacctgacccagtgccagctggagtgtgagaagtaccagaagaagctggaggtgctgaccaaggagttctacagcctgcaggccagcagcgagaagaggatcacagagctgcaggcccagaacagcgagcaccaggcccggctggacatctatgagaagctggagaaggagctggatgagatcatcatgcagacagctgagattgaaaatgaagatgaagctgagcgggtgctcttctcctatggctacggggccaacgtgcccaccacagccaagaggcggctgaagcagagcgtgcacctggcccggcgggtgctgcagctggagaagcagaacagcctcatcctgaaggacctggagcacaggaaggaccaggtgacccagctgagccaggagctggaccgggccaacagcctgctgaaccagacccagcagccctaccgctacctgattgagagcgtgcggcagagggacagcaagattgacagcctgacagagagcatcgcccagctggagaaggatgtgagcaacctgaacaaggagaagagcgccctgctgcagaccaagaaccagatggccctggacctggagcagctgctgaaccaccgggaggagctggccgccatgaagcagatcctggtgaagatgcacagcaagcacagcgagaacagcctgctgctgaccaagacagagcccaagcacgtgacagagaaccagaagagcaagaccctgaatgtgcccaaggagcacgaggacaacatcttcacccccaagcccaccctcttcaccaagaaggaggcccctgagtggagcaagaagcagaagatgaagacctag

SEQ ID NO: 164150 - DNA, 2274 bp, Artificial Sequence
  derived and/or modified sequence
atgagccggaagatcagcaaggagagcaagaaggtgaacatcagctccagtcttgaatcagaggatatcagcttggaaactacagtgcctaccgacgatatcagctccagcgaggaacgtgaggggaaagtgcgtattactcggcagctcatagagaggaaggagctattgcacaatatacagctgctgaaaattgaactgagccagaaaaccatgatgatagataacctgaaggttgactacctgaccaagatcgaggaactggaggagaaattgaatgatgctctgcatcagaagcagctcctgactctgcgtctggataatcagcttgccttccagcagaaggacgcaagtaagtaccaagaactgatgaagcaggagatggaaacgattctcctacgccagaaacagctcgaggagaccaacctacagctgagggaaaaagcgggcgacgttcggagaaatctccgggatttcgagctgaccgaggagcagtacatcaaactcaaagcgttcccagaggatcaattatccattccagagtacgtatctgttagattttatgagctcgttaaccccctgagaaaggaaatctgcgaattacaggtgaaaaaaaacatccttgccgaagagctctccaccaataagaatcagctgaagcaactgactgagacctatgaggaggatagaaagaactactccgaggtgcagatccggtgccagcggcttgctctcgaactggcagacactaagcagctgattcaacagggggactatagacaggagaattacgacaaagtgaagagcgagcgcgatgccctcgaacaggaagtgatagagctccggcgtaaacatgaaatcctggaggcatcacatatgatccaaacaaaggagcgaagcgaactgagcaaggaggttgtcactcttgaacagaccgtcacactgctccagaaagacaaagaatacctcaacaggcagaatatggaattgtctgtgcgctgcgcccacgaggaggaccgactcgagcgactgcaggcgcagctggaggagagcaagaaagctcgcgaggagatgtacgaaaaatacgtcgcctctcgcgaccactataaaacagaatacgaaaataagttgcacgacgaactggaacagatcaggctgaagacaaatcaggaaatcgatcagctgagaaacgctagccgtgagatgtacgagagggagaatcgcaatctccgggaggctagagacaatgccgtggcagagaaggagcgcgccgtgatggccgagaaagacgctctggagaaacatgatcagctcttggaccgttaccgcgagttgcagttatcaaccgagagtaaagtcaccgagttccttcatcagagtaagctaaagagtttcgagagtgagcgagtccagctgctgcaggaggaaacagcaagaaatctgactcagtgtcagctcgaatgtgagaagtaccaaaagaagttggaggtactgaccaaagaattctactcccttcaggcatcctcagaaaagcgtattacagagcttcaagcgcagaactccgagcatcaggcccgcctagatatctacgaaaaactagagaaggagctagatgagatcattatgcagacagccgaaatcgagaacgaggacgaggccgagagggtactattttcctacgggtacggcgccaatgtgcccaccactgccaagaggcgcctgaaacagagcgtgcacctagcccgccgcgtcctccaactcgagaaacagaacagtctcatactaaaagatctggagcacaggaaagatcaagtaacccagctaagtcaggagctagaccgagcaaattcgttgttgaaccagacccagcaaccatacagatacctgattgagagcgttaggcagcgggatagcaaaatcgactccctgacagagtccattgcccagctcgagaaggacgtttccaacttgaataaggagaagtcagctcttctccaaactaagaaccagatggcactggatttagaacagcttctcaaccacagggaggagctcgctgcaatgaagcagattctcgttaagatgcactcaaaacacagcgaaaatagcttacttctcactaagacggagcctaagcatgttacggagaatcagaaatcaaagaccttaaacgtcccgaaagagcatgaagacaacatcttcaccccaaaaccgaccctattcactaagaaagaagccccagaatggagcaagaagcagaagatgaagacatag

SEQ ID NO: 164151 - DNA, 2274 bp, Artificial Sequence
  derived and/or modified sequence
atgtctcggaagatcagtaaggagtccaaaaaagtgaacatcagctcttctctggagtccgaagacatttcgttggagaccactgtacccacagatgatataagctcgtcagaggagagagaggggaaagtgcgcattactcgtcaacttatcgagcgcaaagaactgctgcacaacatccaacttctgaagatagagctgagccagaaaaccatgatgattgataaccttaaggttgactatcttaccaagattgaggaacttgaagaaaagctgaacgacgcgttgcaccaaaagcagctgttgaccttacgcctcgacaatcagctcgcctttcagcagaaggatgcctctaagtatcaggagctcatgaagcaggagatggagacaatactgctgcggcagaaacagctcgaggagaccaacctgcaactgagagagaaggcaggcgacgtgaggaggaacctccgggacttcgaactcactgaagagcaatacattaagctcaaggcatttcccgaggatcagttgtctattccggagtatgtctcagtgcgtttttatgagttggtcaatccacttcgaaaagagatctgtgaacttcaggtgaagaaaaatatcctggccgaagagttatccacgaataagaaccagttaaagcagctcactgagacttacgaagaggatagaaagaactactctgaagtccagattaggtgccaacggctcgccctagagctcgcagatacaaaacagctcatacagcagggtgactatagacaagagaactacgataaagtcaagtctgagcgcgatgctctggaacaggaagtgatcgagctgcgcagaaagcatgaaatcctggaagctagccacatgatccagaccaaggagcggtcagagctgtcaaaagaagtggtgaccttagagcagacagttacattactgcagaaagacaaggaatacttgaatcggcaaaacatggaattgagcgtacgttgtgcgcatgaagaagatagactcgagcgcctccaggctcaattagaggagagcaagaaggcacgagaagagatgtacgaaaagtatgtggcttcgcgcgatcattacaagacagaatatgaaaataagcttcatgacgagctcgagcagatcaggcttaagaccaatcaagagatcgaccagctcaggaacgcctcccgcgagatgtacgaaagagagaataggaacctgcgtgaagcaagggacaatgccgtcgccgagaaagaacgcgctgttatggctgagaaggatgccctggagaaacacgatcaactgttagacaggtacagagagctacagttgagtactgagagcaaggtgaccgagtttttacaccagtccaaactgaagtccttcgagagcgagcgcgtgcagctgctacaggaggagaccgcgcgtaatctgacccagtgccagctagagtgtgaaaaataccagaagaagttagaggtgcttaccaaggagttttactcgctccaagcttcatccgagaaaaggattaccgagctccaggctcaaaactcggagcatcaagctcgtctggatatctatgagaagttagaaaaggagttggacgagattattatgcagaccgccgagattgagaacgaagacgaagctgagagggtcctcttttcatacgggtatggcgctaacgtgccgacaacagccaagcgcaggcttaaacagtcagtacatctggcccgacgagtactgcagctggaaaagcagaatagtctgattctaaaggatctggagcacaggaaagaccaggttacgcaactgtcccaggaactggacagagccaacagtctgttgaaccaaactcaacagccgtacagatatctcatagagtccgtacgccagcgggacagtaagatcgactctctgactgaaagcatagctcagctcgagaaagatgtgagcaacctgaacaaagagaagtccgctctcctgcagaccaaaaaccagatggccctcgatttggaacagctgctgaatcaccgcgaggagctggccgcaatgaaacagatcctggtgaagatgcactctaaacatagcgagaactccctactgctaacaaagactgaaccaaagcacgttaccgaaaatcagaagtctaagacactaaacgtgcctaaagagcatgaagataacatctttactccaaagccaaccctgtttaccaagaaggaggcccctgaatggtcaaagaagcagaagatgaaaacctag

SEQ ID NO: 164152 - DNA, 3146 bp, Artificial Sequence
  derived and/or modified sequence
gtggcctaggcggggcttccttctggacgccacctcacaacgtgtgttgctttccgctcctcggaacatccgggagagttgacttccggcggcttgtgggagtgctggttctgtcctccttgcgggtgcggagatggttgtcttggttacgggtcctaacggtcccctgccttgaaatcccttgttgagggcctgcaaccttgtgcttccgaccggagacgcctttggtccctcggtgtctgcactggctgctggtcaaggcttcagtgtggagtaattgacactttcgagaatattaaaatcaaattagagaagaaaactgatccataataataaaaatgtctcgaaaaatttcaaaggagtcaaaaaaagtgaacatctctagttctctggaatctgaagatattagtttagaaacaacagttcctacggatgatatttcctcatcagaagagcgagagggcaaagtcagaatcaccaggcagctaattgaacgaaaagaactacttcataatattcagttactaaaaattgagctatcccagaaaactatgatgatcgacaatttgaaagtggattatcttacaaagattgaagaattggaggagaaacttaatgatgcacttcaccagaagcagctactaacattgagattagacaaccaattggcttttcaacagaaagatgccagcaaatatcaagaattaatgaaacaagaaatggaaaccattttgttgagacagaaacaactagaagagacaaatcttcagctaagagaaaaagctggagatgttcgtcgaaacctgcgtgactttgagttgacagaagagcaatatattaaattaaaagcttttcctgaagatcagctttctattcctgaatatgtatctgttcgcttctatgagctagtgaatccattaagaaaggaaatctgtgaactacaagtgaaaaagaatatcctagcagaagaattaagtacaaacaaaaaccaactgaagcagctgacagagacatatgaggaagatcgaaaaaactactctgaagttcaaattagatgtcaacgtttggccttagaattagcagacacaaaacagttaattcagcaaggtgactaccgtcaagagaactatgataaagtcaagagtgaacgtgatgcacttgaacaggaagtaattgagcttaggagaaaacatgaaatacttgaagcctctcacatgattcaaacaaaagaacgaagtgaattatcaaaagaggtagtcaccttagagcaaactgttactttactgcaaaaggataaagaatatcttaatcgccaaaacatggagcttagtgttcgctgtgctcatgaagaggatcgccttgaaagacttcaagctcaactggaagaaagcaaaaaggctagagaagagatgtatgaaaaatatgtagcatccagagaccattataaaacagaatatgaaaataaactacatgatgaactagaacaaatcagattgaaaaccaaccaagaaattgatcaacttcgaaatgcctctagggaaatgtatgaacgagaaaacagaaatctccgagaagcaagggataatgctgtggctgaaaaggaacgagcagtgatggctgaaaaggatgctttagaaaaacacgatcagctcttagacaggtacagagaactacaacttagtacagaaagcaaagtaacagaatttctccatcaaagtaaattaaaatcttttgaaagtgagcgtgttcaacttctgcaagaggaaacagcaagaaatctcacacagtgtcaattggaatgtgaaaaatatcagaaaaaattggaggttttaaccaaagaattttatagtctccaagcctcttctgaaaaacgcattactgaacttcaagcacagaactcagagcatcaagcaaggctagacatttatgagaaactggaaaaagagcttgatgaaataataatgcaaactgcagaaattgaaaatgaagatgaggctgaaagggttcttttttcctacggctatggtgctaatgttcccacaacagccaaaagacgactaaagcaaagtgttcacttggcaagaagagtgcttcaattagaaaaacaaaactcgctgattttaaaagatctggaacatcgaaaggaccaagtaacacagctttcacaagagcttgacagagccaattcgctattaaaccagactcaacagccttacaggtatctcattgaatcagtgcgtcagagagattctaagattgattcactgacggaatctattgcacaacttgagaaagatgtcagcaacttaaataaagaaaagtcagctttactacagacgaagaatcaaatggcattagatttagaacaacttctaaatcatcgtgaggaattggcagcaatgaaacagattctcgttaagatgcatagtaaacattctgagaacagcttacttctcactaaaacagaaccaaaacatgtgacagaaaatcagaaatcaaagactttgaatgtgcctaaagagcatgaagacaatatatttacacctaaaccaacactctttactaaaaaagaagcacctgagtggtctaagaaacaaaagatgaagacctagtgttttggatgggaagcacctgtagaccattatatactcctgaagttctttttctgatggaaaacaaaattcagcttaatcgtgtactcagcattttttaaataacaatgtttatttgaactaatattaaattaacaaattcagtgtaatcaaaatgtgtaaagaacaatcaatatactttatttttttttctattttataaaataaatatatatgctatgctttaaattttggagctttcataaatgttcaatgcattttaagtgtgtggcttataaatattttggtatttttctatactacgtaaattctgagtttaaatgtcatacacaaatactaagacactttgcatttttaaaaattaagaatcatttgtgaagtccactacgaggtacttcaaaagcccagtaatggtggtcagataccatgtagatggatacagattgttgactcttttgaagttgtttttttcttatattttatattaccattaaccaataaaatctggcagaaagtctgctattccattggtaa

SEQ ID NO: 164153 - DNA, 2274 bp, Artificial Sequence
  derived and/or modified sequence
atgagcagaaagatcagcaaggagagcaagaaggtgaacatcagcagcagcctggagagcgaggacatcagcctggagaccaccgtgcccaccgacgacatcagcagcagcgaggagagagagggcaaggtgagaatcaccagacagctgatcgagagaaaggagctgctgcacaacatccagctgctgaagatcgagctgagccagaagaccatgatgatcgacaacctgaaggtggactacctgaccaagatcgaggagctggaggagaagctgaacgacgccctgcaccagaagcagctgctgaccctgagactggacaaccagctggccttccagcagaaggacgccagcaagtaccaggagctgatgaagcaggagatggagaccatcctgctgagacagaagcagctggaggagaccaacctgcagctgagagagaaggccggcgacgtgagaagaaacctgagagacttcgagctgaccgaggagcagtacatcaagctgaaggccttccccgaggaccagctgagcatccccgagtacgtgagcgtgagattctacgagctggtgaaccccctgagaaaggagatctgcgagctgcaggtgaagaagaacatcctggccgaggagctgagcaccaacaagaaccagctgaagcagctgaccgagacctacgaggaggacagaaagaactacagcgaggtgcagatcagatgccagagactggccctggagctggccgacaccaagcagctgatccagcagggcgactacagacaggagaactacgacaaggtgaagagcgagagagacgccctggagcaggaggtgatcgagctgagaagaaagcacgagatcctggaggccagccacatgatccagaccaaggagagaagcgagctgagcaaggaggtggtgaccctggagcagaccgtgaccctgctgcagaaggacaaggagtacctgaacagacagaacatggagctgagcgtgagatgcgcccacgaggaggacagactggagagactgcaggcccagctggaggagagcaagaaggccagagaggagatgtacgagaagtacgtggccagcagagaccactacaagaccgagtacgagaacaagctgcacgacgagctggagcagatcagactgaagaccaaccaggagatcgaccagctgagaaacgccagcagagagatgtacgagagagagaacagaaacctgagagaggccagagacaacgccgtggccgagaaggagagagccgtgatggccgagaaggacgccctggagaagcacgaccagctgctggacagatacagagagctgcagctgagcaccgagagcaaggtgaccgagttcctgcaccagagcaagctgaagagcttcgagagcgagagagtgcagctgctgcaggaggagaccgccagaaacctgacccagtgccagctggagtgcgagaagtaccagaagaagctggaggtgctgaccaaggagttctacagcctgcaggccagcagcgagaagagaatcaccgagctgcaggcccagaacagcgagcaccaggccagactggacatctacgagaagctggagaaggagctggacgagatcatcatgcagaccgccgagatcgagaacgaggacgaggccgagagagtgctgttcagctacggctacggcgccaacgtgcccaccaccgccaagagaagactgaagcagagcgtgcacctggccagaagagtgctgcagctggagaagcagaacagcctgatcctgaaggacctggagcacagaaaggaccaggtgacccagctgagccaggagctggacagagccaacagcctgctgaaccagacccagcagccctacagatacctgatcgagagcgtgagacagagagacagcaagatcgacagcctgaccgagagcatcgcccagctggagaaggacgtgagcaacctgaacaaggagaagagcgccctgctgcagaccaagaaccagatggccctggacctggagcagctgctgaaccacagagaggagctggccgccatgaagcagatcctggtgaagatgcacagcaagcacagcgagaacagcctgctgctgaccaagaccgagcccaagcacgtgaccgagaaccagaagagcaagaccctgaacgtgcccaaggagcacgaggacaacatcttcacccccaagcccaccctgttcaccaagaaggaggcccccgagtggagcaagaagcagaagatgaagacctag

SEQ ID NO: 164154 - protein, 860 aa, Artificial Sequence
  derived and/or modified sequence
MGWVGGRRRDSASPPGRSRSAADDINPAPANMEGGGGSVAVAGLGARGSGAAAATVRELLQDGCYSDFLNEDFDVKTYTSQSIHQAVIAEQLAKLAQGISQLDRELHLQVVARHEDLLAQATGIESLEGVLQMMQTRIGALQGAVDRIKAKIVEPYNKIVARTAQLARLQVACDLLRRIIRILNLSKRLQGQLQGGSREITKAAQSLNELDYLSQGIDLSGIEVIENDLLFIARARLEVENQAKRLLEQGLETQNPTQVGTALQVFYNLGTLKDTITSVVDGYCATLEENINSALDIKVLTQPSQSAVRGGPGRSTMPTPGNTAALRASFWTNMEKLMDHIYAVCGQVQHLQKVLAKKRDPVSHICFIEEIVKDGQPEIFYTFWNSVTQALSSQFHMATNSSMFLKQAFEGEYPKLLRLYNDLWKRLQQYSQHIQGNFNASGTTDLYVDLQHMEDDAQDIFIPKKPDYDPEKALKDSLQPYEAAYLSKSLSRLFDPINLVFPPGGRNPPSSDELDGIIKTIASELNVAAVDTNLTLAVSKNVAKTIQLYSVKSEQLLSTQGDASQVIGPLTEGQRRNVAVVNSLYKLHQSVTKVVSSQSSFPLAAEQTIISALKAIHALMENAVQPLLTSVGDAIEAIIITMHQEDFSGSLSSSGKPDVPCSLYMKELQGFIARVMSDYFKHFECLDFVFDNTEAIAQRAVELFIRHASLIRPLGEGGKMRLAADFAQMELAVGPFCRRVSDLGKSYRMLRSFRPLLFQASEHVASSPALGDVIPFSIIIQFLFTRAPAELKSPFQRAEWSHTRFSQWLDDHPSEKDRLLLIRGALEAYVQSVRSREGKEFAPVYPIMVQLLQKAMSALQ

SEQ ID NO: 164155 - protein, 823 aa, Artificial Sequence
  derived and/or modified sequence
MGWVGGRRRDSASPPGRSRSAADDINPAPANMEGGGGSVAVAGLGARGSGAAAATVRELLQDGCYSDFLNEDFDVKTYTSQSIHQAVIAEQLAKLAQGISQLDRELHLQVVARHEDLLAQATGIESLEGVLQMMQTRIGALQGAVDRIKAKIVEPYNKIVARTAQLARLQVACDLLRRIIRILNLSKRLQGQLQGGSREITKAAQSLNELDYLSQGIDLSGIEVIENDLLFIARARLEVENQAKRLLEQGLETQNPTQVGTALQVFYNLGTLKDTITSVVDGYCATLEENINSALDIKVLTQPSQSAVRGGPGRSTMPTPGNTAALRASFWTNMEKLMDHIYAVCGQVQHLQKVLAKKRDPVSHICFIEEIVKDGQPEIFYTFWNSVTQALSSQFHMATNSSMFLKQAFEGEYPKLLRLYNDLWKRLQQYSQHIQGNFNASGTTDLYVDLQHMEDDAQDIFIPKKPDYDPEKALKDSLQPYEAAYLSKSLSRLFDPINLVFPPGGRNPPSSDELDGIIKTIASELNVAAVDTNLTLAVSKNVAKTIQLYSVKSEQLLSTQGDASQVIGPLTEGQRRNVAVVNSLYKLHQSVTKVVSSQSSFPLAAEQTIISALKAIHALMENAVQPLLTSVGDAIEAIIITMHQEDFSGSLSSSGKPDVPCSLYMKELQGFIARVMSDYFKHFECLDFVFDNTEAIAQRAVELFIRHASLIRPLGEGGKMRLAADFAQMELAVGPFCRRVSDLGKSYRMLRSFRPLLFQASEHVASSPALGDVIPFSIIIQFLFTRAPAELKSPFQRAEWSHTRFSQWLDDHPSEKDRLLLIR

SEQ ID NO: 164156 - DNA, 2583 bp, Artificial Sequence
  derived and/or modified sequence
atggggtgggtaggggggcgccgcagagattctgcaagtccaccgggccgtagtcgctcagcagcagacgacattaatcctgcaccagccaatatggaaggaggaggcggcagcgtagccgttgccggtctcggagccagaggctcaggcgctgctgctgccacagtccgcgagctgttgcaggatgggtgctattctgactttctgaacgaggacttcgacgtgaaaacctacacttcccagtctattcatcaggcagtcattgccgaacaactggcaaaacttgcccaagggatatcccaacttgatcgagagctccatttgcaggtagttgctcgtcatgaagatctcctcgcgcaggccacagggatcgagtcgctggagggggtccttcagatgatgcagacccggattggagcgctgcagggggccgtggatcgtattaaagccaaaatcgttgagccttacaacaagatagttgcacggacagcgcagctggcccgattacaggtggcttgtgatcttctgcgcagaatcataaggatactgaatctgagtaagcgcctccaagggcaactgcagggcgggagtcgcgagatcaccaaggcagcacaatctctaaatgaactggactacttgtctcagggcatcgacttaagtggaattgaggtcatcgagaacgacctattgttcatcgctagagcccggttagaggtcgaaaaccaggcaaagcgcctccttgaacaagggctcgagactcagaatccaacacaggtgggcacagccctacaggtgttctacaatctggggactttgaaggataccattacttcagtggtggacggttactgcgcaacgttggaggagaatatcaattccgcactcgacatcaaggtcctcactcagccttcccagtccgctgtgcgaggggggcctggacgatcgacaatgcccacccctggcaatactgccgccttgcgcgcttctttttggacaaatatggaaaaattaatggaccacatctacgctgtttgcggccaagtgcaacatctccagaaggtgcttgctaaaaaaagagatccagtgagccacatctgttttatagaagaaattgtgaaggacggacaacccgaaatcttttacacattctggaactccgtaacacaggctcttagctctcagtttcacatggccaccaatagttccatgtttctgaagcaggcattcgagggggaatacccaaaactccttcggctgtacaatgatctatggaagcggctgcagcagtattctcaacatatacagggcaattttaacgcttctggaaccacggatctctatgtcgacctccagcatatggaagacgacgctcaggatattttcataccaaagaagcctgactatgaccctgaaaaggctctaaaggattctctgcaaccttacgaggccgcctacctctccaagtcactatcacggctcttcgacccaatcaatctggtgttcccccccgggggccgcaacccccccagcagcgatgaactcgacggcattattaaaacaatcgctagcgaacttaatgttgccgcagtggataccaatctgaccctggctgtgagtaaaaatgtggccaaaacgatccagctgtatagcgttaaatctgagcagctcctctccacccagggcgatgccagtcaggtgattggcccactgaccgaaggtcaacgcaggaatgtagccgtggtgaactcactttataaacttcatcagagtgtgacaaaagtggtctcctcccagtctagctttcccctggcggccgaacagaccatcatctctgctcttaaggccattcacgctctcatggagaacgcagtgcagcctctgctcacatctgtgggggacgccatcgaggccattataatcacaatgcatcaggaagattttagtggtagtctgagttcctctggaaagccggacgtgccatgtagtctttacatgaaggagctgcaaggcttcatcgccagggtgatgtctgactattttaagcactttgaatgcctcgattttgttttcgacaataccgaggcgatcgctcagagggccgtggagctattcatcaggcacgcatccttgatccgccccctgggcgagggggggaaaatgagacttgcggccgatttcgcccagatggagctcgctgtagggcctttttgtaggagagtatctgatctgggtaagagttatcggatgttgaggagcttcagaccactgctttttcaggcaagtgaacatgttgcttccagtcctgcactcggtgatgttattccttttagtataattattcagtttctgttcaccagagctcctgctgagcttaagtcgcctttccaacgggctgagtggtcacatacaagattttcacagtggcttgatgatcatccttctgagaaggatcgactcttactaattagaggcgcgttggaagcatatgtccagtcggtgcgcagccgcgaggggaaggagttcgcaccagtttatccaatcatggtgcaactcttacagaaagcaatgtccgcgcttcagtag

SEQ ID NO: 164157 - DNA, 2472 bp, Artificial Sequence
  derived and/or modified sequence
atgggatgggttgggggacgtcggagggactcagcctcccctccagggcgctcaaggagcgctgctgatgacatcaatccggccccagctaacatggaggggggcggaggatcagtggctgtagccggcttgggagcaaggggatctggggccgccgctgccacagtcagggagttgctgcaggacggatgctatagcgactttctgaacgaggattttgatgtgaaaacctatacgtcacaatccattcaccaggccgtgatagccgagcaactagccaaacttgcccagggcatttcccagctagacagggagttgcacctgcaggtcgtagctcgtcatgaagatctcctggctcaagcaacaggtattgaaagtctggagggagttctgcagatgatgcagacccgcattggggctttgcagggagccgtagaccggataaaagctaagatcgttgagccctacaataagatcgtggccagaaccgctcagcttgcgagattgcaggtagcatgtgacctccttcggagaattatccggatactcaatctgtcaaagaggctgcaggggcagctgcagggtggttccagagaaattacaaaagctgcccagtctctaaacgagctcgactatttaagccagggaattgatctttccggcattgaggttatcgaaaacgacctgctgttcattgctcgcgctagactagaggtggagaaccaggcaaagcgcctccttgagcagggactagagacacagaacccgacccaggttggtacggccctgcaggtcttctataatctgggaaccctcaaggacaccatcacatcggtggtcgacggctactgtgcgactctggaggagaacatcaacagcgctctggatatcaaagttctgacccagccctctcagagtgccgtgagaggggggcccgggagaagtacaatgcccacgccgggcaacaccgcagcccttagagcttcgttctggaccaacatggagaaacttatggatcatatctacgcggtgtgcgggcaggttcagcacctgcagaaagtcctcgcaaagaaacgggaccctgtgtcccacatatgctttatcgaggagatcgtcaaggatggccaaccagagattttctacaccttttggaacagcgtgactcaggcacttagcagtcagttccatatggcaactaactcttcaatgttccttaagcaagctttcgaaggagagtacccgaaactcctaagactgtacaacgacctctggaagcgtctgcagcaatacagtcaacacatccaaggaaacttcaacgcctcaggaaccaccgatctgtatgtagatctccagcatatggaagacgacgctcaagatatcttcatcccaaagaaacccgactatgacccagaaaaggctctgaaagatagcttacaaccatatgaggctgcttatcttagtaaatccctgagccgcttgttcgaccccataaatctcgtcttccctcccgggggccggaaccccccctcttcagacgagctggacgggatcattaaaacaatagcatcagaactgaacgtggctgcggtggatacgaacctaactctggccgtgtctaagaatgtggcaaaaacgatccagttgtattctgtaaaatctgaacagctgcttagtacccaaggtgacgcatcacaggtcattggccctttgaccgaaggccagcgccgcaacgtagctgtcgtgaacagcttatataaacttcatcagagcgtgaccaaagtggtcagctcccagagttcattcccattggccgccgagcagaccatcatctccgctctaaaagctatccatgccctgatggagaatgcagtgcagcctctcctgacgtccgtgggtgacgctatcgaggcaatcattatcaccatgcatcaggaggatttttcagggtccctgagctcttcgggcaaaccagacgtgccatgttcgttgtacatgaaagagctccaaggctttatcgccagggttatgtccgattattttaagcatttcgaatgcttagacttcgtctttgataataccgaagccatcgcccaacgcgctgtcgagctgttcattaggcacgcatcactcataaggcccctaggagagggtggtaaaatgcgcttggcagccgactttgctcaaatggagctggcagtgggccctttttgtcgccgggtttcagatctggggaagtcttacagaatgctgcgctccttccgccccctgttatttcaagcgtcagagcacgtagccagttcccctgcccttggcgacgtgattcccttctccatcattatccaattccttttcacaagggctccggctgaacttaagtcaccgttccagagagcagagtggtcgcacactcggttcagtcaatggctcgatgaccaccccagcgagaaagacaggctgctgcttatacgatag

SEQ ID NO: 164158 - DNA, 2583 bp, Artificial Sequence
  derived and/or modified sequence
atgggctgggtgggcggcagaagaagagattctgccagccccccaggccgcagccgctctgctgctgatgacatcaacccagccccagccaacatggagggcggcggcggctctgtggccgtggccggcctgggcgcccggggcagcggggctgctgctgccaccgtgcgggagctgctgcaggacggctgctacagcgacttcctgaatgaagattttgatgtgaagacctacaccagccagagcatccaccaggccgtgattgctgagcagctggccaagctggcccagggcatcagccagctggaccgggagctgcacctgcaggtggtggcccggcatgaggacctgctggcccaggccaccggcatcgagagcctggagggcgtgctgcagatgatgcagacccgcatcggggccctgcagggcgctgtggaccgcatcaaggccaagatcgtggagccctacaacaagatcgtggccaggacagcccagctggcccggctgcaggtggcctgtgacctgctgcggcgcatcatccgcatcctgaacctgagcaagaggctgcagggccagctgcagggcggcagccgggagatcaccaaggccgcccagagcctgaatgagctggactacctgagccagggcatcgacctgagcggcatcgaggtgattgaaaatgacctgctcttcatcgcccgggcccggctggaggtggagaaccaggccaagaggctgctggagcagggcctggagacccagaaccccacccaggtgggcacagccctgcaggtgttctacaacctgggcaccctgaaggacaccatcacctctgtggtggatggctactgtgccaccctggaggagaacatcaacagcgccctggacatcaaggtgctgacccagcccagccagagcgctgtgcggggcggccctggccgcagcaccatgcccaccccaggcaacacagctgccctgcgggccagcttctggaccaacatggagaagctgatggaccacatctatgctgtgtgtggccaggtgcagcacctgcagaaggtgctggccaagaagagggaccctgtgagccacatctgcttcatcgaggagatcgtgaaggatggccagcctgagatcttctacaccttctggaacagcgtgacccaggccctgagcagccagttccacatggccaccaacagctccatgttcctgaagcaggcctttgaaggagagtaccccaagctgctgcggctgtacaatgacctgtggaagaggctgcagcagtacagccagcacatccagggcaacttcaatgccagcggcaccacagacctgtatgtggacctgcagcacatggaggatgatgcccaggacatcttcatccccaagaagccagactatgaccctgagaaggccctgaaggacagcctgcagccctatgaagctgcctacctgagcaagagcctgagccggctgtttgaccccatcaacctggtgttccccccaggcggcaggaacccccccagcagtgatgagctggatggcatcatcaagaccatcgccagcgagctgaatgtggccgctgtggacaccaacctgaccctggccgtgtccaagaatgtggccaagaccatccagctgtacagcgtgaagtctgagcagctgctgagcacccagggagatgccagccaggtgattggccccctgacagagggccagaggagaaatgtggccgtggtgaacagcctgtacaagctgcaccagagcgtgaccaaggtggtgagcagccagagcagcttccccctggccgctgagcagaccatcatcagcgccctgaaggccatccacgccctgatggagaatgctgtgcagcccctgctgacctctgtgggagatgccatcgaggccatcatcatcaccatgcaccaggaggacttcagcggcagcctgagcagcagcggcaagccagatgtgccctgcagcctgtacatgaaggagctgcagggcttcatcgcccgggtgatgtctgactacttcaagcactttgagtgcctggactttgtgtttgacaacacagaggccatcgcccagagagctgtggagctgttcatcagacatgccagcctcatccggcccctgggggagggcggcaagatgaggctggccgctgactttgcccagatggagctggccgtgggccccttctgccggcgggtgtctgacctgggcaagagctacaggatgctgcggagcttccggcccctgctcttccaggccagcgagcacgtggccagcagccctgccctgggagatgtgatccccttcagcatcatcatccagttcctgttcacccgggccccagctgagctgaagagccccttccagagagctgagtggagccacacccgcttcagccagtggctggatgaccaccccagcgagaaggaccggctgctgctgatccggggggccctggaggcctacgtgcagagcgtgcgcagccgggagggcaaggagtttgcccctgtgtaccccatcatggtgcagctgctgcagaaggccatgtctgccctgcagtag

SEQ ID NO: 164159 - DNA, 2472 bp, Artificial Sequence
  derived and/or modified sequence
atgggctgggtgggcggcagaagaagagattctgccagccccccaggccgcagccgctctgctgctgatgacatcaacccagccccagccaacatggagggcggcggcggctctgtggccgtggccggcctgggcgcccggggcagcggggctgctgctgccaccgtgcgggagctgctgcaggacggctgctacagcgacttcctgaatgaagattttgatgtgaagacctacaccagccagagcatccaccaggccgtgattgctgagcagctggccaagctggcccagggcatcagccagctggaccgggagctgcacctgcaggtggtggcccggcatgaggacctgctggcccaggccaccggcatcgagagcctggagggcgtgctgcagatgatgcagacccgcatcggggccctgcagggcgctgtggaccgcatcaaggccaagatcgtggagccctacaacaagatcgtggccaggacagcccagctggcccggctgcaggtggcctgtgacctgctgcggcgcatcatccgcatcctgaacctgagcaagaggctgcagggccagctgcagggcggcagccgggagatcaccaaggccgcccagagcctgaatgagctggactacctgagccagggcatcgacctgagcggcatcgaggtgattgaaaatgacctgctcttcatcgcccgggcccggctggaggtggagaaccaggccaagaggctgctggagcagggcctggagacccagaaccccacccaggtgggcacagccctgcaggtgttctacaacctgggcaccctgaaggacaccatcacctctgtggtggatggctactgtgccaccctggaggagaacatcaacagcgccctggacatcaaggtgctgacccagcccagccagagcgctgtgcggggcggccctggccgcagcaccatgcccaccccaggcaacacagctgccctgcgggccagcttctggaccaacatggagaagctgatggaccacatctatgctgtgtgtggccaggtgcagcacctgcagaaggtgctggccaagaagagggaccctgtgagccacatctgcttcatcgaggagatcgtgaaggatggccagcctgagatcttctacaccttctggaacagcgtgacccaggccctgagcagccagttccacatggccaccaacagctccatgttcctgaagcaggcctttgaaggagagtaccccaagctgctgcggctgtacaatgacctgtggaagaggctgcagcagtacagccagcacatccagggcaacttcaatgccagcggcaccacagacctgtatgtggacctgcagcacatggaggatgatgcccaggacatcttcatccccaagaagccagactatgaccctgagaaggccctgaaggacagcctgcagccctatgaagctgcctacctgagcaagagcctgagccggctgtttgaccccatcaacctggtgttccccccaggcggcaggaacccccccagcagtgatgagctggatggcatcatcaagaccatcgccagcgagctgaatgtggccgctgtggacaccaacctgaccctggccgtgtccaagaatgtggccaagaccatccagctgtacagcgtgaagtctgagcagctgctgagcacccagggagatgccagccaggtgattggccccctgacagagggccagaggagaaatgtggccgtggtgaacagcctgtacaagctgcaccagagcgtgaccaaggtggtgagcagccagagcagcttccccctggccgctgagcagaccatcatcagcgccctgaaggccatccacgccctgatggagaatgctgtgcagcccctgctgacctctgtgggagatgccatcgaggccatcatcatcaccatgcaccaggaggacttcagcggcagcctgagcagcagcggcaagccagatgtgccctgcagcctgtacatgaaggagctgcagggcttcatcgcccgggtgatgtctgactacttcaagcactttgagtgcctggactttgtgtttgacaacacagaggccatcgcccagagagctgtggagctgttcatcagacatgccagcctcatccggcccctgggggagggcggcaagatgaggctggccgctgactttgcccagatggagctggccgtgggccccttctgccggcgggtgtctgacctgggcaagagctacaggatgctgcggagcttccggcccctgctcttccaggccagcgagcacgtggccagcagccctgccctgggagatgtgatccccttcagcatcatcatccagttcctgttcacccgggccccagctgagctgaagagccccttccagagagctgagtggagccacacccgcttcagccagtggctggatgaccaccccagcgagaaggaccggctgctgctgatcagatag

SEQ ID NO: 164160 - DNA, 2583 bp, Artificial Sequence
  derived and/or modified sequence
atgggctgggtgggcggccggcggcgggacagcgccagcccccccggccgatctaggtccgctgccgacgacatcaatcccgcccccgccaacatggagggggggggtgggagcgtagctgtcgctggtctaggtgctcgaggctccggtgctgccgcagctaccgtgcgcgaactgctgcaggacggatgctacagtgacttcctcaacgaagactttgatgtgaaaacctatacaagccagagcattcatcaggccgtgatcgccgaacaactagccaagctcgcccaaggtatatcccagctggaccgggagctgcatctgcaagttgtggcaagacatgaggacctgctggcacaggccacgggcatagagtcgctggagggcgtgctgcagatgatgcagactcgaatcggcgctttgcaaggggctgttgataggatcaaagcaaaaatcgtcgagccttacaacaagatcgtggcacgcaccgcccaactcgctaggctccaagtcgcatgtgatctcctcaggcggataatcaggattctgaaccttagcaagaggctacaggggcagctgcaggggggatctcgagagattaccaaggcggctcagagtctcaacgaactggattatctctctcaagggattgacctgtccgggatcgaagtgatcgagaatgacctgctgttcatcgccagagccaggttggaggtggaaaaccaagcaaaaagactactcgagcaggggcttgagacccagaatcctacccaggtgggcactgcccttcaggtcttctacaacctgggaaccctcaaagatacaatcacctccgtagtcgacggctactgcgccacgctggaagagaatattaactccgctctggatataaaggtcctgacacaacctagtcagagcgctgtgcggggcggccctggacgcagcactatgccgacacccggcaacactgccgcacttcgagcttccttctggaccaatatggaaaagttaatggaccacatttacgccgtgtgtggccaggtacagcatctacagaaggtattggccaagaagagggacccggtttcacatatatgtttcatcgaagaaatcgtcaaggacggccagcccgagattttctataccttctggaatagcgtcactcaggccctgagttcccaattccatatggcgaccaactcctctatgtttttgaagcaggctttcgaaggcgaatatccaaaactcttacgactttacaatgacctgtggaaaaggctgcagcagtactctcagcatattcagggcaacttcaacgctagcggtacaacagatttatacgtggatcttcaacatatggaggacgacgcgcaggacatatttatcccaaaaaaaccagactatgaccctgagaaggccttgaaggattcactgcagccatatgaggcggcttacttatccaagtctctgagccgattgttcgaccctattaacctggtattccccccaggcgggcgcaaccccccgtcttctgatgagttggatgggataatcaagactattgcttctgagcttaacgtcgccgctgtggacactaatctcaccctggccgtttcaaagaatgttgccaaaactatccagctatactccgtgaagagcgaacagctgctttcgacacagggcgacgcctcccaggtcattggccccctaacagagggacaaaggcgcaacgtggctgtggtcaacagtctgtacaagcttcaccagagcgtaactaaagtggtctcatcccagagttcatttccgctagctgccgagcaaaccattatctctgcactgaaggcaattcacgccctcatggaaaatgcagtccaacctttactcaccagcgtcggagacgctatcgaagccatcatcattaccatgcaccaagaggacttctctggcagcctatccagcagtgggaagccagatgtgccttgtagtctgtacatgaaagagttgcaaggctttattgctcgagtgatgtcagattattttaagcactttgaatgcctagactttgtgttcgacaatactgaggcgatagcgcagagagccgtcgagttgttcatccggcacgcaagtttgattcgtcccttgggagaaggggggaaaatgcggctggcagcagacttcgcgcaaatggagttggctgtggggccattctgtcgacgagtcagcgacctgggcaagtcttacagaatgctcagaagctttagaccgcttctcttccaggcttccgaacacgtcgcttcttctccagccctgggcgatgttattcccttttctatcatcatacagtttctttttacccgtgctcctgcagagctgaagtcaccatttcaacgagccgaatggagtcacaccagattttcccaatggctcgatgaccacccctcagaaaaggaccggctactgctgattcgaggagccctcgaggcttatgtgcagagcgtgcggtccagagaggggaaagagttcgcaccagtctaccctatcatggttcagctccttcagaaggccatgtccgcgctccagtag

SEQ ID NO: 164161 - DNA, 2472 bp, Artificial Sequence
  derived and/or modified sequence
atgggctgggtgggcggccggcggcgggacagcgccagcccccccgggcgaagcagaagcgccgctgacgatatcaatcccgccccggctaacatggagggtggcggggggtcagttgccgtcgctggactcggagcacgcggctcgggagccgcggctgctactgtacgggagttactccaggacggctgctactccgatttcttaaacgaagacttcgatgtgaaaacttataccagtcagtccattcatcaggctgtcatagcagagcagttggctaagttggcccagggtatatcccagcttgaccgggagcttcaccttcaggtagtggcccgccacgaggacctgctggctcaagctacgggaattgagtctctcgaaggggtgctccagatgatgcagacccgtatcggcgccctgcagggagcagttgaccggattaaggctaaaatcgtcgaaccctacaacaagatcgtggcccggacagctcagctggcccggctccaagtcgcgtgtgatctgctgagacgcatcattcgaatactgaacctgagcaaaagattgcagggacagttgcagggaggcagtcgggagatcaccaaggccgctcagtctctaaatgagctagactacttgtctcagggcatcgatctcagcgggatcgaagtgatcgaaaatgacctgttgtttatcgcaagggctcgccttgaggtcgagaatcaggcaaagagattgctggaacaggggctcgagacgcaaaacccgacgcaggttggcaccgccctccaggttttctataacttagggactttgaaggatacgatcacaagcgtcgtggacggatattgtgctaccctcgaagagaatatcaacagtgccctagatattaaggttttgactcaaccttctcagagtgccgtgcgcggcggtcctggtcgatccaccatgccaacccccgggaacacagcagccctgcgagcatctttttggactaacatggagaagctgatggatcatatatatgccgtgtgcggccaggtgcaacatctccagaaggtgctcgccaaaaagcgagaccccgtaagtcacatttgttttattgaagaaattgttaaggacggccagcccgaaatcttttacactttctggaatagtgttacgcaggcactctccagccagtttcatatggccacaaatagttccatgttccttaagcaagctttcgaaggcgaatatcctaagctgctccggttatataacgacctctggaaacgtctccaacagtatagccagcatattcaggggaatttcaacgctagcgggacaacagacctgtacgtggacctccagcacatggaggacgacgcgcaggatatttttattcctaaaaagcccgactatgatcctgaaaaagcactcaaggactcacttcagccttatgaagctgcttatttatcaaaaagcctgtcaaggctcttcgatcccattaacctggtcttcccacctgggggaagaaacccaccatcaagcgacgaattggacggcattattaagaccatcgcatccgaattaaacgtggccgccgttgatacaaacctgactctggctgtgtccaagaacgtggcgaaaactatccaactctattccgtcaagtccgagcaacttctgagtacgcagggagacgcctctcaagtgatcggcccccttacagaaggtcagcggcgcaatgtggcagtggtcaactccctgtacaagttgcaccaatctgtcacaaaggtcgtaagcagccagagttccttcccattggccgctgagcagactatcatcagcgccctgaaggccatccacgcactgatggaaaatgctgtgcagcccctcctgacttccgtgggcgatgctatcgaggcaataattatcacaatgcaccaggaggacttctctggttctcttagtagcagtggcaagccagacgtcccctgtagtctttatatgaaggagttgcaggggttcatcgcccgagtgatgtccgactatttcaagcactttgagtgcctggactttgtttttgataacactgaggccatagctcaaagagccgtcgaactgttcatccgccatgcctctctgattcgccccttgggagagggcggcaaaatgcgactggccgctgactttgcccagatggagctggcggttggcccattttgccgccgcgtgtcagacctgggcaagtcctatcgcatgttgaggtcattccgccctttattattccaggcttccgagcacgtcgcatcgtccccggcattgggtgacgtgatcccattttccataattattcagtttctgttcaccagggcaccggcagagttgaagagtcccttccagcgtgcagagtggtcacacactaggttttcacagtggctggatgaccatccaagtgaaaaagacagactgttgctgatcaggtag

SEQ ID NO: 164162 - DNA, 2583 bp, Artificial Sequence
  derived and/or modified sequence
atgggatgggtcggcggacgcaggagagatagcgccagcccaccaggcaggagtcggtccgctgctgatgacattaatcctgctcccgctaatatggagggagggggaggaagtgttgccgtagcgggtctgggggctcggggaagcggcgcagccgctgcgactgtgagggagctgctccaggacggatgttattctgattttctgaatgaggatttcgacgtgaagacgtataccagccaatccattcaccaagctgtgattgccgagcagttggccaagctggcccagggtatcagccaattagaccgagaactgcatctgcaggttgtagcccgacacgaggatctgctggcccaggctaccggaatcgagtccctggagggggttctccagatgatgcaaaccagaattggtgccctgcagggcgcagttgaccgaatcaaagccaaaatcgtggagccctacaataaaatcgtggctcgcaccgctcagttggccaggcttcaagtggcctgcgatctgctgagaagaatcattcgcatcctcaacctgtccaagcggctgcagggacaactgcagggaggctctcgtgaaatcactaaggccgctcagtccctgaatgagttggactatttgtcacagggtatagacctctccgggattgaggtgattgagaacgacctcctgtttattgcgcgagcccgactagaggtggagaaccaggccaagcgattactggagcagggtctcgagacacagaaccctacacaggtcggaacagcactacaggtattctataaccttggcacgttgaaggatacaattacaagcgtcgtggatggttactgtgcaacacttgaagagaatatcaattctgccctggacatcaaggtactgactcagccttcccagagcgccgtgcggggagggcctggtaggtctacaatgcctacacccggtaataccgctgcactgcgagccagcttttggactaatatggagaaactgatggatcacatatacgctgtctgcggccaagtgcaacaccttcagaaggttcttgcgaaaaaaagagaccctgtttcacacatttgttttatagaggaaatcgtcaaagacgggcagcctgagatcttctacacattttggaactctgtgacacaagctctaagttcacaatttcatatggctaccaattctagtatgttccttaaacaggcattcgaaggagagtaccctaaactcctgagactttataacgatttatggaaacgtctccagcagtacagtcagcacatacagggtaatttcaatgcaagcggaacaaccgacctgtatgttgacctgcagcatatggaggatgatgcgcaggacatcttcattcccaagaagccggactacgatccagaaaaagcactgaaagattcgctgcaaccttacgaggccgcatatctgagcaaatccttatcccgacttttcgatccaatcaatctggtgtttcctcccggtggcaggaacccccctagctccgatgaattggacggaatcattaagacaatcgcgtcagaattaaacgtggcggctgttgatacaaacctgactctcgctgtgtcgaagaacgtggccaagactattcaactgtactccgtgaaatctgaacagttgctgtcaacacaaggcgacgcatcccaggtcataggccctcttacagaggggcagagaaggaacgtcgccgtggtcaacagtctgtataagctacatcagagtgttacaaaggtcgtctcttctcagtcctctttccccctggccgctgagcagacaatcatctcagctctgaaggccattcacgcgttgatggagaacgctgtacagccgcttctgacttctgtgggcgatgcaatcgaggcaataatcatcacaatgcaccaggaggatttcagcggcagtctgtcctcatccgggaagcctgacgtaccttgtagcctttacatgaaggagctgcaggggtttattgccagggtaatgtcagattatttcaagcatttcgagtgtctggacttcgtgtttgacaataccgaggcaattgcacaaagggcagtcgaactctttatccgacacgcatcacttatccgtcctctgggagagggcggaaaaatgagactcgctgccgattttgctcagatggagctggccgtgggcccattctgccggagggtgagtgatctgggaaaatcttatcgcatgttgcgcagctttaggcccctgcttttccaagctagcgagcacgtggcaagttcacctgccttgggtgatgtgattcccttctcgatcatcattcagttcttgttcactagagcgcctgctgaactcaagagtcccttccagcgcgctgagtggtcccatacaagattttcacagtggctggacgatcatccgagcgagaaagatcgcttactgttaatccgaggagccctcgaagcctatgtgcagtcagtcagatcccgggaagggaaggaatttgcccctgtataccccattatggtgcagctgctacagaaggccatgtccgccctgcagtag

SEQ ID NO: 164163 - DNA, 2472 bp, Artificial Sequence
  derived and/or modified sequence
atggggtgggtggggggaagacgacgggatagtgcctctccaccaggaaggagccgcagtgcggctgatgacattaatccagcccctgctaacatggaggggggaggcggaagcgtggccgtggctggcctgggggctcgcggttcaggagccgcagccgcaacggtccgggagctgctgcaggatgggtgttacagtgatttcctgaacgaagacttcgacgttaaaacttacacaagccagagcattcaccaagcggtgatcgccgagcagctagcaaaactggcccagggaatcagccagctcgaccgcgagctgcacctccaagtcgtggccaggcacgaggatctgctcgcccaggcgacaggaattgaaagtcttgagggggtgttacaaatgatgcagacacgcatcggagccttgcagggagcagtggaccgtatcaaggcgaaaattgtagaaccctacaataagatagttgctcgcacagcccaattagctaggttgcaggtggcgtgcgacttgctgaggaggatcatccgcatccttaacctgtctaagcgactccagggccagctgcagggcggttccagggagattacaaaagccgctcaatccctcaacgagctcgattacttgtcacagggcatagatctcagcgggattgaggtgatagagaacgatctgctgttcatcgccagagctcggcttgaggttgagaatcaagcaaaaagactactggagcagggtctggagacgcagaatcctacgcaagtcggtacggcactgcaggtgttctacaatctaggtacactaaaagatacgattacatccgtggtagatggctactgcgccaccttagaggagaacataaattcagctctcgatattaaggtcttaactcagcctagccagtctgccgtacgcggtgggccaggcaggtctaccatgcctacccccggaaacacagccgcattacgtgcctccttctggaccaacatggaaaaactgatggaccacatctacgccgtgtgcggacaagttcagcacctacaaaaagtcttggcgaagaagagggatcctgtgagtcatatctgcttcattgaagagattgtcaaagatggtcaaccagagatattttacacattttggaactctgttactcaggcgctcagttcacagttccacatggctaccaactcgtccatgtttctgaaacaggcatttgaaggggagtatccaaagctcctcaggctgtataatgacctttggaaaaggctccaacagtatagccagcacattcagggcaactttaacgccagtggaaccaccgatctgtacgtagatttacagcacatggaagatgacgctcaagacatcttcattccaaagaaacctgattacgatcctgaaaaagcgctaaaggattccctgcagccttacgaggccgcatacctcagcaagagcttgtccagactgttcgaccccattaacttagtgtttccaccagggggaaggaatcctccttcaagcgatgaactagacggcatcattaagacgattgcttctgaacttaacgttgctgctgtagataccaatttgaccctcgctgtgtccaaaaatgtggcgaagacgatccaactttatagtgttaaaagcgaacagctcttatctactcagggcgatgcctctcaggtgattggccctctgacagaggggcagcggagaaacgtggcggttgtgaactcgctttacaaactccatcagagtgtaacaaaagttgtatcctcccaaagtagcttcccccttgcggctgaacagaccattatctcagccctgaaagccattcatgcactgatggagaatgccgtgcagcccctgctgacctctgtgggagatgctatcgaggccatcattatcactatgcatcaggaggactttagtggctcactgtcctcttccgggaaacctgatgtgccgtgcagcctgtacatgaaggaacttcaaggctttatcgcacgggtgatgagcgattacttcaaacattttgaatgtcttgatttcgtgttcgacaacacagaggctattgctcagagggcggtagagctgttcatcaggcacgccagcctcatccgccctctaggagagggaggaaagatgcgcctggccgctgacttcgcgcagatggaactagctgtaggccctttttgtaggcgcgtctccgacctcggaaagtcttaccgaatgttgaggagctttaggcccctactgtttcaggcaagcgagcacgtggcatcatcccctgctttaggtgatgtcataccgttttctattatcatccagttcctcttcaccagagctccggcagaactgaaaagtccttttcagagggccgagtggagccatactcggttctcacagtggctcgacgaccatccatctgagaaggatcggctgctgctcattagatag

SEQ ID NO: 164164 - DNA, 4060 bp, Artificial Sequence
  derived and/or modified sequence
attggtccttttatggttcagacttccttcttcatcgactctccctaattctcttcactgttcatccccagcaacttttcttcccaagcatttcctgcgggcttttattaccccaggagtgccaatcaaggcgtggaacagataaagctgtgtagcaactaacgcgtgactcttgtgagtgtggagggcaaacgaagctccctgaaacctccgctctgctctcctgccttacgccgcgcggcccctgttctgaggtttaatacttgcttcacagataagcgctgcggccacgttccggtgcccaccttctccttggctagggcacgacgccagcccagggggcgcggccctgagctgctgcgagagacagctgaaagcgccggcccgacggccttggctccctcggtgcgctgggcgcagagcactcggaccctgggcgcccactgctcgagtacctgcgcggctcctagccaggcttagcccaggcgcgggctgagagtcagttcgccaggtgggcctggagccatgggctgggtgggcgggcggcgccgggattctgcgtcaccacctgggcggagccgttctgctgctgacgacatcaacccggcacctgccaacatggaaggtggcggcggcagcgtcgctgtagctggcctcggagctcgaggctctggagcggctgcagctacagtccgggaacttctgcaggacgggtgttatagtgactttttaaacgaagactttgatgtaaagacttatacttctcaatctattcatcaagctgtaattgctgaacaactagcaaaacttgcccaaggaatcagtcagttggacagagaactacacttacaggttgttgcaagacatgaagatttactggcacaagcaactgggattgagtcgttggaaggtgttcttcagatgatgcagacgagaattggggctttacagggagctgttgataggataaaagcaaaaattgttgaaccatacaataagatagttgcccggactgcacaactagcaagacttcaggttgcctgtgatttgcttcggaggattattcgtatcttgaatctcagtaagagactccaaggacaactgcaagggggaagtagagagataacaaaagctgctcagagtctcaatgaacttgattatctttctcaaggaatagatctttctggaatagaagtgatagaaaatgatctactttttattgcaagagcccgacttgaagtggaaaatcaagctaagcgcctactagagcagggtttggagactcagaatccaactcaagtcggaacagctcttcaggttttctataatcttggaactttgaaggatactattaccagtgttgtggatggatattgtgctactttagaagaaaatatcaacagtgcattagacataaaagttttgactcagccttcccagtcagctgtgagagggggacctggacgatctaccatgccaaccccaggaaatactgcagctttgcgtgcctcattctggaccaatatggagaaacttatggatcatatttatgctgtttgtggacaggtacaacatctacaaaaagtattggccaagaagagagatcctgtttctcacatttgtttcattgaagaaatagttaaggatggacaaccggaaattttctacacattttggaattcagttactcaggcactttcttctcaatttcatatggcaacaaactcttcgatgtttttgaagcaggcatttgaaggagaataccctaaattattacgtctttataatgacttatggaagcgtcttcaacaatacagtcagcatatccaagggaattttaatgcaagtggaactacagacctctatgttgacctacaacacatggaagatgatgcacaagatatattcataccaaaaaagccagattatgatccagaaaaggctttgaaagactcactacaaccctatgaggctgcttatctatcaaaatccttatctcgactcttcgatcctatcaacttggtttttcccccgggtggtcgtaatcctccttcctctgatgaacttgatggtattattaaaactatagcaagtgaactaaatgttgctgctgttgatacaaacctcacattagctgtgtcaaaaaatgtggcaaagaccatccagttatacagtgtaaaatcagagcagcttctctccacacaaggagatgcaagtcaggtgattgggcctcttactgaaggacagagaagaaatgtggcagtagtgaattcattgtataagttgcaccaatcagtaacaaaggttgtttccagtcagagctcattcccactggcagctgagcaaactataatttcagctctaaaggctattcatgctcttatggaaaatgctgtgcaacccttactcacttctgtgggagatgctatagaggccataatcatcaccatgcatcaagaagacttttctgggtcattatccagctcaggaaaacctgatgttccttgttctctgtacatgaaggagctacaaggtttcattgccagagttatgagtgactattttaaacactttgaatgcttggattttgtctttgacaacactgaggctattgcccaaagagctgttgaactttttatccgccatgccagtctcataagacctcttggtgaaggtgggaaaatgcgacttgctgctgattttgcacagatggagttggctgtgggtccattctgtagacgagtatctgatttaggaaagtcctatcggatgctgagatcattcagacctctgctcttccaggcaagtgaacatgtagccagtagtcctgcattgggggatgtgattccgttcagcatcattattcagtttttgttcacgagagcacccgctgaactgaaatctcctttccagagggcagagtggtcccacacacgcttctctcagtggctggatgaccatccatctgaaaaggacaggctcctcctcatcaggggagccctggaagcttatgttcaatcagtgagaagtagagaaggcaaagaatttgcaccagtttatcccataatggttcagctgcttcaaaaggctatgtctgctcttcagtaatgacatgaaatctttgttcatctccactttgtgctaacccattcatagttggcagttaaacacatactccaaaagactgctactatctactattttaagaatgtaattgattgttcggtatttcctatcgacgtttatttacctctttagcacttatactttagcataaaaaatgttgagttatcaccacctttcaattccatggacctgatttttccagaaagatgttttcctctttcagatttttgtacaaggctaaaatgtctttcccatccataaccaagtcctcctatgggtacataaacccaaagtccccacttcttttaaagggatatgatcaagttataacatgtaccctgcttcccccaaccctgccttcttcactaaataagcatgtagctcagtggtttccaaatttggctgcacattcataccaatcaccaggggatttttttaaaatcctgatgcccaacttgcactccacattaattaacatgtctaggagtgggagcctgacagacaccactattaaaaaaaaaaaaaatccccaaaatgattccaatagacaacaaagttgaggaaccactggcacatcccaagctaagatacaaggttaaatggcctttttaagtatgtcatactggatctttaaataaagcaaggcttttgttacactttgtcatgttattaaaagcagacctttgggctgtttaaccgtgtaacaaaaatgccacgtgaaaaataaaaatttttattgtatagcaattctctataaatagtagataatctaagtccttattttctgatggctcttgttccactattaacattgtttttaatttttaaaatcctatcagcagcctcctaattagcagtgttaggaatttgccttatgttttccatctcatctcctgaacctgttattctgagaactcataaataaaattcagcc

SEQ ID NO: 164165 - DNA, 5418 bp, Artificial Sequence
  derived and/or modified sequence
ggtttaatacttgcttcacagataagcgctgcggccacgttccggtgcccaccttctccttggctagggcacgacgccagcccagggggcgcggccctgagctgctgcgagagacagctgaaagcgccggcccgacggccttggctccctcggtgcgctgggcgcagagcactcggaccctgggcgcccactgctcgagtacctgcgcggctcctagccaggcttagcccaggcgcgggctgagagtcagttcgccaggtgggcctggagccatgggctgggtgggcgggcggcgccgggattctgcgtcaccacctgggcggagccgttctgctgctgacgacatcaacccggcacctgccaacatggaaggtggcggcggcagcgtcgctgtagctggcctcggagctcgaggctctggagcggctgcagctacagtccgggaacttctgcaggacgggtgttatagtgactttttaaacgaagactttgatgtaaagacttatacttctcaatctattcatcaagctgtaattgctgaacaactagcaaaacttgcccaaggaatcagtcagttggacagagaactacacttacaggttgttgcaagacatgaagatttactggcacaagcaactgggattgagtcgttggaaggtgttcttcagatgatgcagacgagaattggggctttacagggagctgttgataggataaaagcaaaaattgttgaaccatacaataagatagttgcccggactgcacaactagcaagacttcaggttgcctgtgatttgcttcggaggattattcgtatcttgaatctcagtaagagactccaaggacaactgcaagggggaagtagagagataacaaaagctgctcagagtctcaatgaacttgattatctttctcaaggaatagatctttctggaatagaagtgatagaaaatgatctactttttattgcaagagcccgacttgaagtggaaaatcaagctaagcgcctactagagcagggtttggagactcagaatccaactcaagtcggaacagctcttcaggttttctataatcttggaactttgaaggatactattaccagtgttgtggatggatattgtgctactttagaagaaaatatcaacagtgcattagacataaaagttttgactcagccttcccagtcagctgtgagagggggacctggacgatctaccatgccaaccccaggaaatactgcagctttgcgtgcctcattctggaccaatatggagaaacttatggatcatatttatgctgtttgtggacaggtacaacatctacaaaaagtattggccaagaagagagatcctgtttctcacatttgtttcattgaagaaatagttaaggatggacaaccggaaattttctacacattttggaattcagttactcaggcactttcttctcaatttcatatggcaacaaactcttcgatgtttttgaagcaggcatttgaaggagaataccctaaattattacgtctttataatgacttatggaagcgtcttcaacaatacagtcagcatatccaagggaattttaatgcaagtggaactacagacctctatgttgacctacaacacatggaagatgatgcacaagatatattcataccaaaaaagccagattatgatccagaaaaggctttgaaagactcactacaaccctatgaggctgcttatctatcaaaatccttatctcgactcttcgatcctatcaacttggtttttcccccgggtggtcgtaatcctccttcctctgatgaacttgatggtattattaaaactatagcaagtgaactaaatgttgctgctgttgatacaaacctcacattagctgtgtcaaaaaatgtggcaaagaccatccagttatacagtgtaaaatcagagcagcttctctccacacaaggagatgcaagtcaggtgattgggcctcttactgaaggacagagaagaaatgtggcagtagtgaattcattgtataagttgcaccaatcagtaacaaaggttgtttccagtcagagctcattcccactggcagctgagcaaactataatttcagctctaaaggctattcatgctcttatggaaaatgctgtgcaacccttactcacttctgtgggagatgctatagaggccataatcatcaccatgcatcaagaagacttttctgggtcattatccagctcaggaaaacctgatgttccttgttctctgtacatgaaggagctacaaggtttcattgccagagttatgagtgactattttaaacactttgaatgcttggattttgtctttgacaacactgaggctattgcccaaagagctgttgaactttttatccgccatgccagtctcataagacctcttggtgaaggtgggaaaatgcgacttgctgctgattttgcacagatggagttggctgtgggtccattctgtagacgagtatctgatttaggaaagtcctatcggatgctgagatcattcagacctctgctcttccaggcaagtgaacatgtagccagtagtcctgcattgggggatgtgattccgttcagcatcattattcagtttttgttcacgagagcacccgctgaactgaaatctcctttccagagggcagagtggtcccacacacgcttctctcagtggctggatgaccatccatctgaaaaggacaggctcctcctcatcaggtaaagccaggtgctctgggggcacccatctggtctggaagcccaaggagggtggggatgcaagagaggatgaaggagcagtgcctgggggcatggacatgtgactgcaccttccagtggcgggccacctcactgcctaggcacgggtgctggagcaaccagcagttggaaatgttggccacaacatcttttgctttctttcattccaaaccttcatatccctgatgtgcaatcctgtgtcccatgcaaccctaaggaccatgcatttgtacctttgaaaatcatcatttgctatgaaaagttttgccctagctccgcatcttttacttcatttttatgtgctgcagttactgaattggtggaacacagatgtgagtgaatttttaaaaatacccaagtgcgaaacagttctgaggaggaaacaagaacaacccagcagccacttggataccatggccctccagtagtgccccatgaatgcattcacatacatacgcatgtgctcttgcccacacgtgcacacacccccatgtaccccaaccatgcccagggtggggtgctttaactgtcatacatggcttattaagcaacactcttccctgcaactgctctcaccatcaccagagacctctcagccaccaaacattcccatttttaccttaccactctgtagctttagctacagttgaccgccatttccttctgtaaactcataaactgggactcagcacatttttattgatgctgagctcacattttatcagcatggtaggccctgggccaggaaccgaggatacgaagtaagccgagatatggccctgtcctctcagagcttgcattacaccacagccatctgtttctgttctaacttctctggccatttttttttgtgtgtcatttgctgaattatcttcttctagccattccttaaatgctatcatttcccatattttcttcttctcatcctgcctctgccttggttcccaggtgagcttgtccagacccatgcctctagtgccccttctatacttaagagccctcaggtctgtgactgcctctggatggggccttggcccagtaaacttgctatcatatgtcaccacccacagaaatctcaaccccagaatggtcaaaataattctaatcttttctctcaaaccttctcattctcttatactccctgtcttggttgggaggtcacaatcacctaactagccaagccggaaaacctttacatcatcattcaactcctctgtcatccttattcctcaaacccactctgttgcgtctctaaaatagctcttgaagtcattctcaactctcccaggggatcccaattctgttggtctgggcccactgcacccagtgatcctttgttagcctgtgtcaggtgatgagttgagttccctaaagccagagtggggctgacatgatgaggtggttctaaaccacatgtgcacacaagaatcatttacatagcttggaaaattcctagtgcccaggtctctcacccttgcctacctcagaatctccagggtaggcctgctatcaggatttctctatagctccccaagaaggtccagggtgcagccaagggcgtgaacccctgccatagtgggtcatatttcagttaggatgaaagactgctgaggaagctatgacaggtcagtaagaaccatcagcctgtcagctttgtttccagaagtgaccctgagccctcaagcttggtacccacatcccacatgagccactggccctctgggcgtatgtgtggataaagattagctcggaccctgctctttttccttgcttatctgttactcagctatgaacatctgacacagaaatgggagaggttaccagccccggtgaatgttcctggtaaaatctgccctcgggaaaggctttggatttgggtgaggagtttgggcctgggctaacacagggatttgcaatgtctgtgtggattatttttcccgagtcccaaagattcactcagctgcaacacactcagtcgtcttaaaaagaggattcagttaattgaacacgttcatttttctcatcttaacaagttggtcatttttgtcgtcttaacaagttggaatgagttcatccaaaacagttgtcctgctgtgtgtacatcacaaatctgttttcttttgcttctctttaaaaatgtctcctgagtgatttcatcagcagtgctgttgctaagcctatatttagcaactgaaaatcatgctcagaaatactgtcatgcttttttaaaaaggcatatccatccctccacacatggctgattccagaaccttcatgcccttagcaaaaaattgagctgtccttcagggtttcaaaaaaagtactgtactcctgctgcaccccaggctcttggcaaggaggggacttttgtcctagagaatgttctttcttatgtattattgcaaaacaattttgttcttgcatactgaagcatcactggatgaatttctttcccctgtagacaaaccgagggtgagtattgctctttaaatgtcagtaaatttgttttagcttctggggcaaaccttgttgtatactcattctgttcctcccagcataatatgttaggttgtcataaaatagggcaaattgaggatagtgtaactactgctgctgaataaatgggaaatagtgaacca

SEQ ID NO: 164166 - DNA, 2583 bp, Artificial Sequence
  derived and/or modified sequence
atgggctgggtgggcggcagaagaagagacagcgccagcccccccggcagaagcagaagcgccgccgacgacatcaaccccgcccccgccaacatggagggcggcggcggcagcgtggccgtggccggcctgggcgccagaggcagcggcgccgccgccgccaccgtgagagagctgctgcaggacggctgctacagcgacttcctgaacgaggacttcgacgtgaagacctacaccagccagagcatccaccaggccgtgatcgccgagcagctggccaagctggcccagggcatcagccagctggacagagagctgcacctgcaggtggtggccagacacgaggacctgctggcccaggccaccggcatcgagagcctggagggcgtgctgcagatgatgcagaccagaatcggcgccctgcagggcgccgtggacagaatcaaggccaagatcgtggagccctacaacaagatcgtggccagaaccgcccagctggccagactgcaggtggcctgcgacctgctgagaagaatcatcagaatcctgaacctgagcaagagactgcagggccagctgcagggcggcagcagagagatcaccaaggccgcccagagcctgaacgagctggactacctgagccagggcatcgacctgagcggcatcgaggtgatcgagaacgacctgctgttcatcgccagagccagactggaggtggagaaccaggccaagagactgctggagcagggcctggagacccagaaccccacccaggtgggcaccgccctgcaggtgttctacaacctgggcaccctgaaggacaccatcaccagcgtggtggacggctactgcgccaccctggaggagaacatcaacagcgccctggacatcaaggtgctgacccagcccagccagagcgccgtgagaggcggccccggcagaagcaccatgcccacccccggcaacaccgccgccctgagagccagcttctggaccaacatggagaagctgatggaccacatctacgccgtgtgcggccaggtgcagcacctgcagaaggtgctggccaagaagagagaccccgtgagccacatctgcttcatcgaggagatcgtgaaggacggccagcccgagatcttctacaccttctggaacagcgtgacccaggccctgagcagccagttccacatggccaccaacagcagcatgttcctgaagcaggccttcgagggcgagtaccccaagctgctgagactgtacaacgacctgtggaagagactgcagcagtacagccagcacatccagggcaacttcaacgccagcggcaccaccgacctgtacgtggacctgcagcacatggaggacgacgcccaggacatcttcatccccaagaagcccgactacgaccccgagaaggccctgaaggacagcctgcagccctacgaggccgcctacctgagcaagagcctgagcagactgttcgaccccatcaacctggtgttcccccccggcggcagaaacccccccagcagcgacgagctggacggcatcatcaagaccatcgccagcgagctgaacgtggccgccgtggacaccaacctgaccctggccgtgagcaagaacgtggccaagaccatccagctgtacagcgtgaagagcgagcagctgctgagcacccagggcgacgccagccaggtgatcggccccctgaccgagggccagagaagaaacgtggccgtggtgaacagcctgtacaagctgcaccagagcgtgaccaaggtggtgagcagccagagcagcttccccctggccgccgagcagaccatcatcagcgccctgaaggccatccacgccctgatggagaacgccgtgcagcccctgctgaccagcgtgggcgacgccatcgaggccatcatcatcaccatgcaccaggaggacttcagcggcagcctgagcagcagcggcaagcccgacgtgccctgcagcctgtacatgaaggagctgcagggcttcatcgccagagtgatgagcgactacttcaagcacttcgagtgcctggacttcgtgttcgacaacaccgaggccatcgcccagagagccgtggagctgttcatcagacacgccagcctgatcagacccctgggcgagggcggcaagatgagactggccgccgacttcgcccagatggagctggccgtgggccccttctgcagaagagtgagcgacctgggcaagagctacagaatgctgagaagcttcagacccctgctgttccaggccagcgagcacgtggccagcagccccgccctgggcgacgtgatccccttcagcatcatcatccagttcctgttcaccagagcccccgccgagctgaagagccccttccagagagccgagtggagccacaccagattcagccagtggctggacgaccaccccagcgagaaggacagactgctgctgatcagaggcgccctggaggcctacgtgcagagcgtgagaagcagagagggcaaggagttcgcccccgtgtaccccatcatggtgcagctgctgcagaaggccatgagcgccctgcagtag

SEQ ID NO: 164167 - DNA, 2472 bp, Artificial Sequence
  derived and/or modified sequence
atgggctgggtgggcggcagaagaagagacagcgccagcccccccggcagaagcagaagcgccgccgacgacatcaaccccgcccccgccaacatggagggcggcggcggcagcgtggccgtggccggcctgggcgccagaggcagcggcgccgccgccgccaccgtgagagagctgctgcaggacggctgctacagcgacttcctgaacgaggacttcgacgtgaagacctacaccagccagagcatccaccaggccgtgatcgccgagcagctggccaagctggcccagggcatcagccagctggacagagagctgcacctgcaggtggtggccagacacgaggacctgctggcccaggccaccggcatcgagagcctggagggcgtgctgcagatgatgcagaccagaatcggcgccctgcagggcgccgtggacagaatcaaggccaagatcgtggagccctacaacaagatcgtggccagaaccgcccagctggccagactgcaggtggcctgcgacctgctgagaagaatcatcagaatcctgaacctgagcaagagactgcagggccagctgcagggcggcagcagagagatcaccaaggccgcccagagcctgaacgagctggactacctgagccagggcatcgacctgagcggcatcgaggtgatcgagaacgacctgctgttcatcgccagagccagactggaggtggagaaccaggccaagagactgctggagcagggcctggagacccagaaccccacccaggtgggcaccgccctgcaggtgttctacaacctgggcaccctgaaggacaccatcaccagcgtggtggacggctactgcgccaccctggaggagaacatcaacagcgccctggacatcaaggtgctgacccagcccagccagagcgccgtgagaggcggccccggcagaagcaccatgcccacccccggcaacaccgccgccctgagagccagcttctggaccaacatggagaagctgatggaccacatctacgccgtgtgcggccaggtgcagcacctgcagaaggtgctggccaagaagagagaccccgtgagccacatctgcttcatcgaggagatcgtgaaggacggccagcccgagatcttctacaccttctggaacagcgtgacccaggccctgagcagccagttccacatggccaccaacagcagcatgttcctgaagcaggccttcgagggcgagtaccccaagctgctgagactgtacaacgacctgtggaagagactgcagcagtacagccagcacatccagggcaacttcaacgccagcggcaccaccgacctgtacgtggacctgcagcacatggaggacgacgcccaggacatcttcatccccaagaagcccgactacgaccccgagaaggccctgaaggacagcctgcagccctacgaggccgcctacctgagcaagagcctgagcagactgttcgaccccatcaacctggtgttcccccccggcggcagaaacccccccagcagcgacgagctggacggcatcatcaagaccatcgccagcgagctgaacgtggccgccgtggacaccaacctgaccctggccgtgagcaagaacgtggccaagaccatccagctgtacagcgtgaagagcgagcagctgctgagcacccagggcgacgccagccaggtgatcggccccctgaccgagggccagagaagaaacgtggccgtggtgaacagcctgtacaagctgcaccagagcgtgaccaaggtggtgagcagccagagcagcttccccctggccgccgagcagaccatcatcagcgccctgaaggccatccacgccctgatggagaacgccgtgcagcccctgctgaccagcgtgggcgacgccatcgaggccatcatcatcaccatgcaccaggaggacttcagcggcagcctgagcagcagcggcaagcccgacgtgccctgcagcctgtacatgaaggagctgcagggcttcatcgccagagtgatgagcgactacttcaagcacttcgagtgcctggacttcgtgttcgacaacaccgaggccatcgcccagagagccgtggagctgttcatcagacacgccagcctgatcagacccctgggcgagggcggcaagatgagactggccgccgacttcgcccagatggagctggccgtgggccccttctgcagaagagtgagcgacctgggcaagagctacagaatgctgagaagcttcagacccctgctgttccaggccagcgagcacgtggccagcagccccgccctgggcgacgtgatccccttcagcatcatcatccagttcctgttcaccagagcccccgccgagctgaagagccccttccagagagccgagtggagccacaccagattcagccagtggctggacgaccaccccagcgagaaggacagactgctgctgatcagatag

SEQ ID NO: 164168 - protein, 17 aa, Artificial Sequence
  derived and/or modified sequence
LSTSWTEEDVNDNTLFK

SEQ ID NO: 164169 - protein, 317 aa, Artificial Sequence
  derived and/or modified sequence
MVRARHQPGGLCLLLLLLCQFMEDRSAQAGNCWLRQAKNGRCQVLYKTELSKEECCSTGRLSTSWTEEDVNDNTLFKWMIFNGGAPNCIPCKETCENVDCGPGKKCRMNKKNKPRCVCAPDCSNITWKGPVCGLDGKTYRNECALLKARCKEQPELEVQYQGRCKKTCRDVFCPGSSTCVVDQTNNAYCVTCNRICPEPASSEQYLCGNDGVTYSSACHLRKATCLLGRSIGLAYEGKCIKAKSCEDIQCTGGKKCLWDFKVGRGRCSLCDELCPDSKSDEPVCASDNATYASECAMKEAACSSGVLLEVKHSGSCN

SEQ ID NO: 164170 - DNA, 1357 bp, Artificial Sequence
  derived and/or modified sequence
atggtccgcgcgaggcaccagccgggtgggctttgcctcctgctgctgctgctctgccagttcatggaggaccgcagtgcccaggctgggaactgctggctccgtcaagcgaagaacggccgctgccaggtcctgtacaagaccgaactgagcaaggaggagtgctgcagcaccggccggctgagcacctcgtggaccgaggaggacgtgaatgacaacacactcttcaagtggatgattttcaacgggggcgcccccaactgcatcccctgtaaagaaacgtgtgagaacgtggactgtggacctgggaaaaaatgccgaatgaacaagaagaacaaaccccgctgcgtctgcgccccggattgttccaacatcacctggaagggtccagtctgcgggctggatgggaaaacctaccgcaatgaatgtgcactcctaaaggcaagatgtaaagagcagccagaactggaagtccagtaccaaggcagatgtaaaaagacttgtcgggatgttttctgtccaggcagctccacatgtgtggtggaccagaccaataatgcctactgtgtgacctgtaatcggatttgcccagagcctgcttcctctgagcaatatctctgtgggaatgatggagtcacctactccagtgcctgccacctgagaaaggctacctgcctgctgggcagatctattggattagcctatgagggaaagtgtatcaaagcaaagtcctgtgaagatatccagtgcactggtgggaaaaaatgtttatgggatttcaaggttgggagaggccggtgttccctctgtgatgagctgtgccctgacagtaagtcggatgagcctgtctgtgccagtgacaatgccacttatgccagcgagtgtgccatgaaggaagctgcctgctcctcaggtgtgctactggaagtaaagcactccggatcttgcaactgaatctgcccgtaaaacctgagccattgattcttcagaactttctgcagtttttgacttcatagattatgctttaaaaaaatttttttaacttattgcataacagcagatgccaaaaacaaaaaaagcatctcactgcaagtcacataaaaatgcaacgctgtaatatggctgtatcagagggctttgaaaacatacactgagctgcttctgcgctgttgttgtccgtatttaaacaacagctcccctgtattcccccatctagccatttcggaagacaccgaggaagaggaggaagatgaagaccaggactacagctttcctatatcttctattctagagtggtaaactctctataagtgttcagtgttgacatagcctttgtgcaaaaaaaaaaaaaaaaaaa

SEQ ID NO: 164171 - DNA, 954 bp, Artificial Sequence
  derived and/or modified sequence
atggtgagggccaggcaccagccagggggactatgtcttctgctgctgctattgtgtcagttcatggaggaccgaagcgcacaagcagggaattgctggttgcggcaagcaaagaacgggcgttgccaggttctgtataaaaccgagctttcaaaggaggagtgctgtagtaccggccgcctgagcacaagctggacagaagaggatgtgaatgataacacgttatttaaatggatgatcttcaatggaggggcccccaactgtatcccttgcaaggagacttgcgaaaatgtggattgcggtcctgggaaaaaatgcagaatgaacaagaagaataaacctagatgcgtgtgcgccccagattgctccaacattacgtggaagggacccgtttgcggcctggatggcaagacttaccggaacgagtgtgccctcctgaaagctcgttgcaaagagcagcccgaacttgaagtgcagtatcaggggcggtgcaagaagacctgccgcgatgttttttgccccggcagttctacctgtgtcgttgatcagaccaataatgcgtattgcgtgacctgcaatcggatttgccctgagcctgccagcagtgagcagtacctgtgcggcaacgacggcgttacctactcaagtgcctgtcacctcaggaaggcaacatgcctgctgggaaggagcatcggactggcctatgaaggcaagtgcattaaagcaaaatcttgtgaagatatacagtgcaccggaggaaagaaatgtctgtgggactttaaggtaggccgcgggaggtgtagtctgtgcgacgaattatgtcctgacagtaagtccgacgaacctgtctgtgccagtgacaacgccacgtatgctagcgagtgcgcaatgaaggaagcggcatgcagcagcggtgttctgttggaagtgaagcactcaggatcttgtaattag

SEQ ID NO: 164172 - DNA, 954 bp, Artificial Sequence
  derived and/or modified sequence
atggtgcgggcccggcaccagcccggcggcctgtgcctgctgctgctgctgctgtgccagttcatggaggacagaagtgcccaggccggcaactgctggctgcggcaggccaagaatggccgctgccaggtgctgtacaagacagagctgagcaaggaggagtgctgcagcacaggccgcctgagcacctcctggacagaggaggatgtgaatgacaacaccctcttcaagtggatgatcttcaacggcggggcccccaactgcatcccctgcaaggagacctgtgaaaatgtggactgtggccctgggaagaagtgcaggatgaacaagaagaacaagccccgctgtgtgtgtgccccagactgcagcaacatcacctggaagggccctgtgtgtggcctggatggcaagacctacagaaatgaatgtgccctgctgaaggcccgctgcaaggagcagcctgagctggaggtgcagtaccagggccgctgcaagaagacctgcagagatgtgttctgccccggcagcagcacctgtgtggtggaccagaccaacaatgcctactgtgtgacctgcaaccgcatctgcccagagcccgccagcagcgagcagtacctgtgtggaaatgatggagtgacctacagcagcgcctgccacctgaggaaggccacctgcctgctgggccgcagcatcggcctggcctatgagggcaagtgcatcaaggccaagagctgtgaggacatccagtgcacaggaggcaagaagtgcctgtgggacttcaaggtgggccggggccgctgcagcctgtgtgatgagctgtgcccagacagcaagagtgatgagcctgtgtgtgccagtgacaatgccacctacgcctctgaatgtgccatgaaggaggccgcctgcagcagcggcgtgctgctggaggtgaagcacagcggcagctgcaactag

SEQ ID NO: 164173 - DNA, 954 bp, Artificial Sequence
  derived and/or modified sequence
atggtgcgggcccggcaccagcccggcggcctgtgcctgctgctgctcctgttgtgccaattcatggaggatcgctctgcccaggcggggaactgttggctgcgacaggccaagaatggcagatgtcaagtgctctacaaaactgaactgtccaaggaggaatgctgctccacgggccgactctccacaagttggaccgaggaagacgttaatgataacactctttttaagtggatgattttcaacggtggcgccccgaattgcatcccttgcaaggagacctgtgagaacgtcgattgcggccccggcaaaaaatgtcggatgaataaaaagaacaagccccgctgtgtgtgtgccccagattgctctaacataacttggaagggtcccgtgtgcggccttgacggaaaaacatatcgtaatgagtgcgcactgttaaaggctcgatgcaaggagcagcctgagctggaggtgcagtaccaaggaaggtgtaagaaaacttgcagagacgtcttttgccctgggtcaagcacctgcgtggtagaccagaccaacaatgcttattgcgtcacgtgtaacaggatctgtcctgaaccagcttccagcgaacaatacctctgcggcaatgacggggtcacttactcttctgcatgtcacttaaggaaagcaacttgcttgctcgggcggtccataggtctagcctatgaagggaagtgcattaaagccaagtcttgcgaagatattcaatgtacagggggaaaaaaatgcttgtgggattttaaagttggacgagggagatgtagtctatgtgacgagttatgtcctgattccaaatctgacgagcccgtgtgcgccagtgataatgccacttatgcttctgagtgcgcaatgaaagaggctgcttgctcttcgggtgtactgctggaggtaaaacacagtgggagctgcaattag

SEQ ID NO: 164174 - DNA, 954 bp, Artificial Sequence
  derived and/or modified sequence
atggtcagagccaggcatcagcccggaggtctgtgcctcctgctccttctcttatgtcagttcatggaggacagatccgctcaagcaggcaactgttggttgaggcaggcaaaaaatggcagatgccaggttctttataagaccgaattgtctaaggaagagtgctgctcaactgggagattgagcacgagctggaccgaggaagacgtaaatgataacactttgttcaagtggatgattttcaacggaggcgcacccaactgcattccttgcaaggagacttgcgagaacgtcgactgcggccctggcaagaagtgtagaatgaacaaaaagaacaaacccagatgtgtgtgtgccccagattgttcgaatatcacttggaagggaccagtgtgcggcctcgacggcaaaacataccggaatgaatgcgcacttctgaaggcacgatgcaaagagcagcctgaattagaagttcaatatcagggcaggtgcaagaaaacgtgccgcgatgtgttctgtcctggaagcagtacatgtgtggtcgatcagacaaataatgcatattgcgttacttgtaacaggatctgtcccgaacctgctagtagtgagcaatacctctgtggcaacgatggagtgacgtactccagtgcctgtcacctgagaaaagcaacatgtttgctggggcgatccattgggctggcttatgaagggaagtgcattaaagccaagtcttgcgaagatattcagtgtaccgggggaaaaaaatgtctctgggatttcaaggtaggccgtgggcgttgcagcctgtgcgacgaactttgccctgacagcaagtctgacgagccggtctgcgccagcgacaatgcaacatacgctagcgaatgcgccatgaaggaagcagcatgcagtagtggtgtgctgctcgaggtgaaacacagtgggagctgcaattag

SEQ ID NO: 164175 - DNA, 954 bp, Artificial Sequence
  derived and/or modified sequence
atggtgagagccagacaccagcccggcggcctgtgcctgctgctgctgctgctgtgccagttcatggaggacagaagcgcccaggccggcaactgctggctgagacaggccaagaacggcagatgccaggtgctgtacaagaccgagctgagcaaggaggagtgctgcagcaccggcagactgagcaccagctggaccgaggaggacgtgaacgacaacaccctgttcaagtggatgatcttcaacggcggcgcccccaactgcatcccctgcaaggagacctgcgagaacgtggactgcggccccggcaagaagtgcagaatgaacaagaagaacaagcccagatgcgtgtgcgcccccgactgcagcaacatcacctggaagggccccgtgtgcggcctggacggcaagacctacagaaacgagtgcgccctgctgaaggccagatgcaaggagcagcccgagctggaggtgcagtaccagggcagatgcaagaagacctgcagagacgtgttctgccccggcagcagcacctgcgtggtggaccagaccaacaacgcctactgcgtgacctgcaacagaatctgccccgagcccgccagcagcgagcagtacctgtgcggcaacgacggcgtgacctacagcagcgcctgccacctgagaaaggccacctgcctgctgggcagaagcatcggcctggcctacgagggcaagtgcatcaaggccaagagctgcgaggacatccagtgcaccggcggcaagaagtgcctgtgggacttcaaggtgggcagaggcagatgcagcctgtgcgacgagctgtgccccgacagcaagagcgacgagcccgtgtgcgccagcgacaacgccacctacgccagcgagtgcgccatgaaggaggccgcctgcagcagcggcgtgctgctggaggtgaagcacagcggcagctgcaactag

SEQ ID NO: 164176 - protein, 452 aa, Artificial Sequence
  derived and/or modified sequence
MAAAALRSGWCRCPRRCLGSGIQFLSSHNLPHGSTYQMRRPGGELPLSKSYSSGNRKGFLSGLLDNVKQELAKNKEMKESIKKFRDEARRLEESDVLQEARRKYKTIESETVRTSEVLRKKLGELTGTVKESLHEVSKSDLGRKIKEGVEEAAKTAKQSAESVSKGGEKLGRTAAFRALSQGVESVKKEIDDSVLGQTGPYRRPQRLRKRTEFAGDKFKEEKVFEPNEEALGVVLHKDSKWYQQWKDFKENNVVFNRFFEMKMKYDESDNAFIRASRALTDKVTDLLGGLFSKTEMSEVLTEILRVDPAFDKDRFLKQCENDIIPNVLEAMISGELDILKDWCYEATYSQLAHPIQQAKALGLQFHSRILDIDNVDLAMGKMMEQGPVLIITFQAQLVMVVRNPKGEVVEGDPDKVLRMLYVWALCRDQDELNPYAAWRLLDISASSTEQIL

SEQ ID NO: 164177 - DNA, 1359 bp, Artificial Sequence
  derived and/or modified sequence
atggccgccgccgccctgagaagcggctggtgcagatgccccagaagatgcctgggcagcggcatccagttcctgagcagccacaacctgccccacggcagcacctaccagatgagaagacccggcggcgagctgcccctgagcaagagctacagcagcggcaacagaaagggcttcctgagcggcctgctggacaacgtgaagcaggagctggccaagaacaaggagatgaaggagagcatcaagaagttcagagacgaggccagaagactggaggagagcgacgtgctgcaggaggccagaagaaagtacaagaccatcgagagcgagaccgtgagaaccagcgaggtgctgagaaagaagctgggcgagctgaccggcaccgtgaaggagagcctgcacgaggtgagcaagagcgacctgggcagaaagatcaaggagggcgtggaggaggccgccaagaccgccaagcagagcgccgagagcgtgagcaagggcggcgagaagctgggcagaaccgccgccttcagagccctgagccagggcgtggagagcgtgaagaaggagatcgacgacagcgtgctgggccagaccggcccctacagaagaccccagagactgagaaagagaaccgagttcgccggcgacaagttcaaggaggagaaggtgttcgagcccaacgaggaggccctgggcgtggtgctgcacaaggacagcaagtggtaccagcagtggaaggacttcaaggagaacaacgtggtgttcaacagattcttcgagatgaagatgaagtacgacgagagcgacaacgccttcatcagagccagcagagccctgaccgacaaggtgaccgacctgctgggcggcctgttcagcaagaccgagatgagcgaggtgctgaccgagatcctgagagtggaccccgccttcgacaaggacagattcctgaagcagtgcgagaacgacatcatccccaacgtgctggaggccatgatcagcggcgagctggacatcctgaaggactggtgctacgaggccacctacagccagctggcccaccccatccagcaggccaaggccctgggcctgcagttccacagcagaatcctggacatcgacaacgtggacctggccatgggcaagatgatggagcagggccccgtgctgatcatcaccttccaggcccagctggtgatggtggtgagaaaccccaagggcgaggtggtggagggcgaccccgacaaggtgctgagaatgctgtacgtgtgggccctgtgcagagaccaggacgagctgaacccctacgccgcctggagactgctggacatcagcgccagcagcaccgagcagatcctgtag

SEQ ID NO: 164178 - DNA, 1359 bp, Artificial Sequence
  derived and/or modified sequence
atggccgccgccgcattgcgcagcggttggtgcagatgtcctcgccggtgcctgggaagcggcatccagtttttgtcatcccataatttgccacatgggagtacgtaccagatgcgcagacccgggggcgagctgccgctttcaaagtcttactcaagcggaaaccgcaaggggttcctctctggtctgttggataacgttaagcaggagctggccaagaacaaggaaatgaaagaatcaattaagaagttcagagacgaagctcgtcgcctggaagagtctgatgtactccaggaggcccgcagaaagtacaaaactattgaatcagaaaccgtgcgcaccagcgaggttttgcggaagaagcttggggagttgactggcacggtgaaggagtcattacacgaggtttccaagtcagatctgggaagaaaaattaaggaaggggttgaggaagcagcaaagaccgccaagcaaagcgcagaatctgtgtccaagggcggcgaaaagcttggccgcacagcggccttccgagcactgtctcaaggcgttgagagcgtcaaaaaagagattgatgactccgtgctcgggcagaccggcccatatcgacgcccacagagattgagaaagcggactgagtttgcgggcgataaatttaaggaggaaaaagtgttcgaaccgaacgaggaagcccttggggttgtcctccacaaggactcaaagtggtaccagcaatggaaggatttcaaggagaacaacgtcgtgttcaacagattctttgagatgaaaatgaagtatgacgaatctgataatgctttcatccgcgcttcaagggcgttaacggataaagtgacggatttactcggtggtctcttcagtaaaaccgagatgtccgaggtgctgactgaaatcctgcgggtggaccccgcgtttgacaaggacagatttctgaaacagtgcgaaaatgacattatccccaacgtgctcgaggccatgatcagcggagaactggacatactgaaggactggtgttacgaggccacatattcccagctagcccatcctatccagcaggctaaggctctgggactgcagtttcatagcagaatcctcgacattgataatgtggacctggctatgggcaagatgatggagcaggggcctgtgttaatcatcacctttcaagctcagctagtcatggtggttcgtaatcccaaaggcgaagtggtggaaggagatccagacaaagtgttgagaatgctatacgtgtgggcactctgccgcgaccaagacgaacttaatccgtatgcagcatggcggctgctggatatatctgctagctccacagaacagatactctag

SEQ ID NO: 164179 - DNA, 1359 bp, Artificial Sequence
  derived and/or modified sequence
atggctgctgctgccctgcggagcggctggtgccgctgcccccggcgctgcctgggcagcggcatccagttcctgagcagccacaacctgccccacggcagcacctaccagatgagaagacctggaggagagctgcccctgagcaagagctacagcagcggcaacaggaagggcttcctgagcggcctgctggacaacgtgaagcaggagctggccaagaacaaggagatgaaggagagcatcaagaagttcagagatgaggcccggcggctggaggagagtgatgtgctgcaggaggcccggaggaagtacaagaccattgaaagtgaaacagtgaggaccagcgaggtgctgaggaagaagctgggggagctgaccggcaccgtgaaggagagcctgcacgaggtgtccaagagtgacctgggcaggaagatcaaggagggcgtggaggaggccgccaagacagccaagcagagcgctgagagcgtgtccaaaggaggagagaagctgggccgcacagctgccttccgggccctgagccagggcgtggagagcgtgaagaaggagattgatgattctgtgctgggccagacaggcccctaccgccggccccagaggctgaggaagaggacagaatttgctggggacaagttcaaggaggagaaggtgtttgagcccaatgaggaggccctgggcgtggtgctgcacaaggacagcaagtggtaccagcagtggaaggacttcaaggagaacaacgtggtgttcaaccgcttctttgagatgaagatgaagtatgatgaaagtgacaatgccttcatccgggccagccgggccctgacagacaaggtgacagacctgctgggcggcctcttcagcaagacagagatgtctgaggtgctgacagagatcctgcgggtggaccctgcctttgacaaggaccgcttcctgaagcagtgtgaaaatgacatcatccccaacgtgctggaggccatgatctctggagagctggacatcctgaaggactggtgctatgaggccacctacagccagctggcccaccccatccagcaggccaaggccctgggcctgcagttccacagccgcatcctggacatcgacaacgtggacctggccatgggcaagatgatggagcagggccctgtgctgatcatcaccttccaggcccagctggtgatggtggtgaggaaccccaagggggaggtggtggagggggaccctgacaaggtgctgaggatgctgtatgtgtgggccctgtgccgggaccaggatgagctgaacccctatgctgcctggaggctgctggacatcagcgccagcagcacagagcagatcctgtag

SEQ ID NO: 164180 - DNA, 1359 bp, Artificial Sequence
  derived and/or modified sequence
atggccgccgccgccctgcggagcggctggtgccggtgcccccggaggtgtctcggaagtggtatccagttcttatccagccacaatctgccccatgggtccacctaccaaatgaggagacccggcggcgaactgccactgagtaagtcttatagctctggcaaccgaaaaggctttttatcgggtctcctggataacgtcaaacaggaacttgcgaagaataaggagatgaaagagtccatcaaaaaattcagagatgaggcacgcaggcttgaagagagtgacgttcttcaggaagcacgcagaaaatacaagacaattgagtccgaaaccgttcggaccagcgaagtcctgagaaagaaactgggcgagcttacaggcacagtcaaggagagcttgcatgaggtcagcaagagtgacctgggaagaaaaattaaggaaggtgtggaagaagcagctaagactgccaaacagtcagcagagtctgtatcaaaggggggcgagaagctcggcagaaccgccgccttccgcgcgctgagccaaggtgtggagagcgtgaagaaagaaatcgacgactctgtcctcggtcagactggtccttatcggcggccccagcgcttaaggaagcgcaccgagtttgccggagataaattcaaagaagaaaaggtattcgagcccaacgaagaagcactgggcgtggttctgcacaaggactccaagtggtatcagcagtggaaggacttcaaggagaataatgttgtcttcaatcggttcttcgaaatgaaaatgaagtacgacgaaagcgacaatgcattcatcagggctagccgcgccctcactgacaaagtgacagacctgctgggaggtttattctccaaaactgagatgtccgaggtgttaaccgagatactcagagtcgatcccgccttcgacaaggaccgatttctgaagcaatgtgagaacgacattattcctaacgtgttggaggccatgatctctggagagttagatattctcaaagactggtgttatgaagctacatatagtcagctggcgcacccgatccaacaagcgaaggcgctgggcttacagttccatagcaggatcctggatatcgacaatgttgacctggccatgggtaaaatgatggaacaagggcccgtgcttatcatcaccttccaggcgcaactcgtcatggtggtgcgaaacccaaagggcgaggtagtggaaggtgaccctgataaagtgctgcgaatgctgtacgtctgggcactgtgccgggatcaggacgagctgaacccatacgccgcttggaggttactcgatatctctgcctcttcaacagaacaaatcctttag

SEQ ID NO: 164181 - DNA, 1359 bp, Artificial Sequence
  derived and/or modified sequence
atggccgcagctgccctaaggtccggatggtgtcggtgtcctcggcgttgcctcggatccgggatccagttcttgagctcccataacctgccacacgggtccacctatcaaatgagacgaccagggggagagctgccgttgtctaaaagctactcctccgggaaccggaagggttttctctctggcctgcttgataatgtcaaacaggagctcgccaagaataaagagatgaaagagtctatcaaaaaattccgcgatgaggcccgtagattggaagagtctgatgtccttcaggaggccagaaggaagtacaagacaatcgaatccgaaaccgtgcggactagcgaggtgctgcgaaaaaaactgggcgaactgacaggcaccgttaaagagtcccttcatgaggttagcaagagcgaccttggccgaaagattaaagagggggttgaggaggcagccaaaacggcaaagcagagtgccgaatctgtgtccaaaggtggagaaaaactagggaggactgccgcatttcgggcattgtcccagggagtcgagtcagttaagaaggagatcgatgactccgtcttaggccaaacaggcccatacaggaggccccagagactgcgcaagaggaccgagttcgcaggggataagttcaaagaggaaaaggttttcgaacctaatgaagaggcattgggggtggtcctgcacaaggactccaagtggtaccaacaatggaaagacttcaaggagaataatgtggtgttcaataggttctttgagatgaaaatgaagtacgacgagtcagacaatgctttcatccgagcttctagggcactgaccgacaaagtgaccgaccttctcggtggccttttttccaagacggaaatgtccgaagtccttactgaaattctcagagtagatcccgctttcgacaaggacagattcttgaaacagtgcgagaatgatataatcccaaacgtcttggaggccatgatatccggtgaactagacatcctgaaggattggtgctatgaggctacatattctcagctagcccatcctatccaacaagccaaagccctaggccttcagtttcactcacggattctcgatatcgacaatgtggatctggctatggggaaaatgatggagcagggtccagttctcattatcacctttcaagcgcagctggttatggtggtgagaaatcctaaaggcgaagtggtagaaggtgatcctgacaaggtgcttcgcatgctgtacgtgtgggccctgtgtcgcgaccaggacgaactcaatccgtatgctgcctggaggctgctcgatatttctgcctccagcacagagcagatcctgtag

SEQ ID NO: 164182 - DNA, 1999 bp, Artificial Sequence
  derived and/or modified sequence
aggcattccctacccttttaatgccccgccctatgacggacccaatcggagggctctccctacccgaaaccccgctcctggagcggcttttctcaggcttgcgcggctctaggccgaagcggcggatgacgcaaccgggccgcgccgcgagaaggtcacacgattctccaacatggcggcggcggccctgcggagtggctggtgccgctgtccacggagatgcctcggcagtggaatccaatttctttccagccacaacctaccccatgggtcgacctatcagatgcgccggccgggcggagagctgccactgtccaaatcatattcttctggaaacagaaaaggctttctgtccggcttgctagataatgtcaaacaagaattagccaaaaacaaagaaatgaaagaaagtataaaaaaattccgtgacgaggccagaaggctagaagaatcagacgtgctccaggaggccagaaggaaatacaaaaccatcgagtcagaaaccgtgcggacgagcgaggtgctacggaagaagcttggggagctgacgggcaccgtgaaggagagccttcacgaagtcagtaaaagtgatctcggccggaaaatcaaggagggcgtggaggaagcagccaagacggccaagcagtcggccgagtcggtatccaaaggcggggagaagctgggcaggacagcggccttcagagccctctcccagggggtggagtccgtgaagaaggaaattgacgacagcgtcctgggacagaccgggccctaccggaggccccagcgactccggaagagaacggagtttgcgggagataagttcaaggaggagaaagtgtttgagccaaacgaggaggccctgggggtcgtgctgcacaaggactccaagtggtaccagcagtggaaggacttcaaggagaacaacgtggtgtttaaccggttcttcgagatgaagatgaagtatgacgaaagcgacaacgcgttcatccgggcatcccgggcccttacggacaaggtcaccgacttgctggggggcctgttctccaagacagagatgtcggaggtgctcacggagatcctccgggtggacccggcctttgacaaggaccggtttctgaaacagtgcgagaacgacatcatccccaatgtcctggaggccatgatttctggagagcttgacattctcaaagactggtgctatgaagctacttacagccagctggcccaccccatccagcaggccaaggcactgggtctccagttccattctcgcatcctagacattgacaacgtcgacctggccatgggcaagatgatggagcaggggccggtgctgatcatcaccttccaggcacagctggtgatggtggtcaggaaccccaaaggcgaggtggtggagggtgacccggacaaggtgctgcggatgctgtacgtgtgggcgctctgccgagaccaggacgagctcaacccctacgcggcctggcggctcctggacatctcggcctccagcaccgagcagattctctgagtgtggtgccggagccaggtagccccggcctgggtcatcaggcacagaggcaccgcaacaccacctgcggcaactccagacctctgggaacaagactgcgggctctgcccccagctctgccaggacggctgcaagaccagctggcccgggaggggacaacgggctgttgcgggtgcgcggcagctggagacactcccccgcagggccaacccctgccctgttgctctgccctgcaggggtcccggcgcctggtcacctggggtgcacacaggtcacacagtgccaagaggccccagggcccagggactccccccacagcagggtgggacccgggacccgcggctcagtggcccgctagccacgtcagccaagccactttaggtccattttttaattttaacagtgctcttccatcttgtgcataagcctgagatttggaaagaataaaacaccgaattgcagaagagc

SEQ ID NO: 164183 - protein, 90 aa, Artificial Sequence
  derived and/or modified sequence
MPKRKAKGDAKGDKAKVKDEPQRRSARLSAKPAPPKPEPRPKKASAKKGEKLPKGRKGKADAGKDGNNPAKNRDASTLQSQKAEGTGDAK

SEQ ID NO: 164184 - DNA, 273 bp, Artificial Sequence
  derived and/or modified sequence
atgccaaaacgaaaggccaaaggagacgcaaagggggataaagctaaggtgaaggacgagcctcagcggaggtctgcacgtctgtccgctaagcctgccccacctaagcctgagccacgacctaagaaggcctctgctaagaaaggcgagaagctaccaaagggccgtaaagggaaagccgacgccggcaaggacggtaacaaccccgctaaaaaccgggacgcctctacccttcagagtcagaaagcagaaggcacgggggacgctaagtag

SEQ ID NO: 164185 - DNA, 273 bp, Artificial Sequence
  derived and/or modified sequence
atgccaaaacgtaaagccaaaggggatgcaaagggcgataaagccaaggtcaaggacgaaccccagcgaagatctgcccggctctccgccaagcctgcaccccccaagccagagccgcggcctaagaaagctagcgccaagaagggagaaaagttgcctaaaggacggaaaggtaaagctgatgccggcaaagacggcaataaccccgcaaaaaatcgggatgcctctacactgcagagccagaaggcagaagggaccggagatgctaagtag

SEQ ID NO: 164186 - DNA, 273 bp, Artificial Sequence
  derived and/or modified sequence
atgcccaagaggaaggccaagggagatgccaagggggacaaggccaaggtgaaggatgagccccagaggagaagtgcccggctgagcgccaagccagccccacccaagccagagccccggcccaagaaggccagcgccaagaagggggagaagctgcccaagggcaggaagggcaaggcagatgctgggaaggatggcaacaacccagccaagaacagagatgccagcaccctgcagagccagaaggccgagggcactggagatgccaagtag

SEQ ID NO: 164187 - DNA, 273 bp, Artificial Sequence
  derived and/or modified sequence
atgcccaagcggaaggccaagggcgacgccaagggcgacaaggccaaggtcaaggatgagccacagcggcgcagcgcaaggctttcggccaagcccgcgcctcctaagccagagcctcggcccaaaaaggcctcagcaaagaaaggagaaaaacttcccaagggccgcaaaggcaaggcggatgcaggtaaggacgggaataacccagctaagaacagagatgcctctaccttacagtcgcagaaagctgaaggaaccggagatgccaagtag

SEQ ID NO: 164188 - DNA, 273 bp, Artificial Sequence
  derived and/or modified sequence
atgcccaagcggaaggccaagggcgacgccaagggcgacaaggccaaggtaaaagacgagccccaaaggcggagtgctagactgagcgcaaaacccgcccctccaaaacctgagccccgtccaaaaaaggcttctgcaaagaagggcgagaaactgcccaagggccgaaaggggaaagcagacgccggaaaggacgggaacaacccagcgaagaatcgtgacgctagtaccctccagagccaaaaagccgaaggaacaggtgatgcaaagtag

SEQ ID NO: 164189 - DNA, 273 bp, Artificial Sequence
  derived and/or modified sequence
atgccaaagcgaaaggccaagggagacgctaaaggcgacaaagccaaggtgaaggatgagcctcagcgcagaagtgcccgtttgtccgccaagcctgcgcctcccaagccagagcctcgccctaaaaaggcaagcgccaagaagggagaaaagcttccaaagggccgaaaaggcaaagcagacgctggtaaggacgggaacaaccccgcaaaaaatagggatgccagtactctgcaatcccagaaagccgagggaaccggagatgctaaatag

SEQ ID NO: 164190 - DNA, 273 bp, Artificial Sequence
  derived and/or modified sequence
atgcccaagcggaaggctaagggggatgccaagggcgacaaggccaaagtaaaggacgaaccccagagacggtccgctagattgtcggcgaagccagccccacctaagcctgagcccagaccaaaaaaggcttcggcaaagaaaggagagaagctgccaaagggacggaaggggaaagccgacgccggaaaagatggaaacaacccagccaaaaacagagatgcaagcaccctacaaagccagaaggccgaaggtactggagacgccaagtag

SEQ ID NO: 164191 - DNA, 273 bp, Artificial Sequence
  derived and/or modified sequence
atgcccaagagaaaggccaagggcgacgccaagggcgacaaggccaaggtgaaggacgagccccagagaagaagcgccagactgagcgccaagcccgccccccccaagcccgagcccagacccaagaaggccagcgccaagaagggcgagaagctgcccaagggcagaaagggcaaggccgacgccggcaaggacggcaacaaccccgccaagaacagagacgccagcaccctgcagagccagaaggccgagggcaccggcgacgccaagtag

SEQ ID NO: 164192 - DNA, 1964 bp, Artificial Sequence
  derived and/or modified sequence
atcctcaccttccctcgccttcctgttcctggcggagccgggctccgctcgtcttctctgtcttagggctggtgctggccctgcccacgcctagggctccggcgcgtcacgggcctcagctgggattcccgcgcccctcggacggccacgagactcggacatctttccaggaacagcgtgaggaggacagaagcacccaacaggactgctcaagccacctgcgaacactgctgctaccatgcccaagagaaaggcaaaaggagatgctaaaggtgataaagcaaaggtgaaggatgagccacagaggagatcagctcggttgtctgctaaaccagctcctccaaaaccagagcccaggcctaaaaaggcctctgcaaagaagggagagaagcttcccaaagggagaaaggggaaagcagatgctggaaaggatgggaacaaccctgcaaaaaaccgagatgcctctacactccagtcccagaaagcggaaggcactggggatgccaagtgaaatgtacatttttgagagctctgtacttatagtgactctactgtttgaaatactatttttttaaatcaagttttataaaagtgtagaattttggcttttttaagttatgttgttagcacacaggacacttccttgttgtcttttgtggaaagggcaagtaccactaatagggtgtatctcagaaactgaattgaaataagggaaaataggattttctgtcctggtttttgaagattgttcttgattcccttgattcccaggagagattctctgacattcacgtgtcagccactttggcacggaagccttacagtgtggggaaccaaaacttcgtgtctcccctttccccgatgccatcagcatagacttgacttccttaaaccgagagttttgatgtggccttggcaaccctaaaatcagctgtgttaggtaacaaaactcaggctttctgttgatgacatcgagatggtgtcacttaaaagagccaagattcctgttttcagtttgtggattcatcctgctggttttactttagtccctccatgtcaaagtgggcctgagaaaagctcatacatgcctcatgtgaagtgtccaccctctctgaaaatctttcttgttcaaaacagcaacgacatatcttgttaacttttacggtgacttttggaggaggggagtttggaaattgtaaaatgttatagattgttgcctatttcctgctgaaagtaaatgtttttaaaaagtatcatataaagctgaatacaaattggtttggggggagatcctttcctacccaaagtcataaatatattctttactgccttgtggaaattttatagttttgcctttcacatttgtctttagtctgtcctgaactgatttttgtgaaaattatgagttagaaattcaacttaacatttttcatattcgaagtggttgtctctgcactatttactgaaaagttcatcctttccccagtgatttgtaacactgcctctttcataaattaaatttttgtgtatgtgtgtgggtcttttgatggtttctattctgactgacatcaatttgtctaatcttgtagcagtacagtacagtcctgattattgcaactttaggaaaaggtctgataaaaaccaagatgcctccacattttgtcataattgtaaccaatttcacctctgtctccagtatcaccacaaaattgttcttccttggagtgtcttggctattcttagccaactgttcctccatattacttctagaattagaccaacaatttataaatcaaacaaacccaagagcattgaaattttgattggatttgtattgaatttatagattaatctggtaaaccatgtcatctttacaatgttgtcttccaatacatgaatatggtacagctcttcatttacttaggcctttgaaatatctttcaataaagtttataattttctcc

SEQ ID NO: 164193 - DNA, 1192 bp, Artificial Sequence
  derived and/or modified sequence
gctggtgctggccctgcccacgcctagggctccggcgcgtcacgggcctcagctgggattcccgacatctttccaggaacagcgtgaggaggacagaagcacccaacaggactgctcaagccacctgcgaacactgctgctaccatgcccaagagaaaggcaaaaggagatgctaaaggtgataaagcaaaggtgaaggatgagccacagaggagatcagctcggttgtctgctaaaccagctcctccaaaaccagagcccaggcctaaaaaggcctctgcaaagaagggagagaagcttcccaaagggagaaaggggaaagcagatgctggaaaggatgggaacaaccctgcaaaaaaccgagatgcctctacactccagtcccagaaagcggaaggcactggggatgccaagtgaaatgtacatttttgagagctctgtacttatagtgactctactgtttgaaatactatttttttaaatcaagttttataaaagtgtagaattttggcttttttaagttatgttgttagcacacaggacacttccttgttgtcttttgtggaaagggcaagtaccactaatagggtgtatctcagaaactgaattgaaataagggaaaataggattttctgtcctggtttttgaagattgttcttgattcccttgattcccaggagagattctctgacattcacgtgtcagccactttggcacggaagccttacagtgtggggaaccaaaacttcgtgtctcccctttccccgatgccatcagcatagacttgacttccttaaaccgagagttttgatgtggccttggcaaccctaaaatcagctgtgttaggtaacaaaactcaggctttctgttgatgacatcgagatggtgtcacttaaaagagccaagattcctgttttcagtttgtggattcatcctgctggttttactttagtccctccatgtcaaagtgggcctgagaaaagctcatacatgcctcatgtgaagtgtccaccctctctgaaaatctttcttgttcaaaacagcaacgacatatcttgttaacttttacggtgacttttggaggaggggagtttggaaattgtaaaatgttatagattgttgcctatttcctgctgaaagtaaatgtttttaaaaagtatcatataaagctgaatacaaattggtttggggg

SEQ ID NO: 164194 - protein, 432 aa, Artificial Sequence
  derived and/or modified sequence
MSELKDCPLQFHDFKSVDHLKVCPRYTAVLARSEDDGIGIEELDTLQLELETLLSSASRRLRVLEAETQILTDWQDKKGDRRFLKLGRDHELGAPPKHGKPKKQKLEGKAGHGPGPGPGRPKSKNLQPKIQEYEFTDDPIDVPRIPKNDAPNRFWASVEPYCADITSEEVRTLEELLKPPEDEAEHYKIPPLGKHYSQRWAQEDLLEEQKDGARAAAVADKKKGLMGPLTELDTKDVDALLKKSEAQHEQPEDGCPFGALTQRLLQALVEENIISPMEDSPIPDMSGKESGADGASTSPRNQNKPFSVPHTKSLESRIKEELIAQGLLESEDRPAEDSEDEVLAELRKRQAELKALSAHNRTKKHDLLRLAKEEVSRQELRQRVRMADNEVMDAFRKIMAARQKKRTPTKKEKDQAWKTLKERESILKLLDG

SEQ ID NO: 164195 - protein, 369 aa, Artificial Sequence
  derived and/or modified sequence
MSELKDCPLQFHDFKSVDHLKVCPRYTAVLARSEDDGIGIEELDTLQLELETLLSSASRRLRVLEAETQILTDWQDKKGDRRFLKLGRDHELGAPPKHGKPKKQKLEGKAGHGPGPGPGRPKSKNLQPKIQEYEFTDDPIDVPRIPKNDAPNRFWASVEPYCADITSEEVRTLEELLKPPEDEAEHYKIPPLGKHYSQRWAQEDLLEEQKDGARAAAVADKKKGLMGPLTELDTKDVDALLKKSEAQHEQPEDGCPFGALTQRLLQALVEENIISPMEDSPIPDMSGKESGADGASTSPRNQNKPFSVPHTKSLESRIKEELIAQGLLESEDRPAEDSEDEVLAELRKRQAELKALSAHNRTKKHDLLR

SEQ ID NO: 164196 - protein, 95 aa, Artificial Sequence
  derived and/or modified sequence
MSELKDCPLQFHDFKSVDHLKVCPRYTAVLARSEDDGIGIEELDTLQLELETLLSSASRRLRVLEAETQILTDWQDKKGDRRFLKLGRDHELGAP

SEQ ID NO: 164197 - DNA, 2245 bp, Artificial Sequence
  derived and/or modified sequence
gtacccccatcctttctctcgcccctcctacccgcagctcctggcgctcggcggggctaactgcagcgcggagatctcggccgccaagctccgcctcccgccccgggctgtgccccggggctcgcctgaggccgaccacccgcaccccacctctagcggctttgctcgaggcccaccttcttcccacccccggcaaactccagtaggctcgccctcgctgactccccgcccccgcgtcaactgcaaggggcccgcccatagccagttccggggcggttgctcacatcgaccggaactccccgccccctcccgcggcccctggggccgtaggaggccgcagcgaggaggtagagggggcgggggtcgcactagggtgtccctagagaacgaggactctgaaggcgggacatttgggcgacccccgggcggggccagccattaaacagtcccacttctgtgccagacactgaactgggctcttgacgggcatcatctcttaatcctcagaacatcccagggagctccacaggatccccatatcctgggccatgagtgagttgaaagactgccccttgcagttccacgacttcaagtctgtggatcacctgaaggtctgtccccgctacacggcagtgctggcacgctctgaggatgatggcatcggcatcgaggagctggacaccctgcagctggagctggagaccctgctgtcttctgccagccggcgcctgcgtgtgcttgaggccgaaacccagatcctcaccgactggcaggataagaaaggtgacagacgattcctgaagctgggtcgagaccatgaacttggagctccccccaaacatgggaagcccaagaagcagaaactggaagggaaggcaggacatgggccgggccctggcccaggacggcccaaatccaaaaaccttcagcccaagatccaggaatatgaattcactgatgaccctatcgacgtgccacggatccccaaaaatgatgcccccaacaggttctgggcttcagtggagccctactgtgctgacatcaccagcgaggaggtccgcacacttgaggagttactgaagcccccagaagatgaggctgagcattacaagatcccacccctggggaagcactactcccagcgctgggcccaggaggacctgctggaggagcagaaggatggggcccgggcagcggctgtggctgacaagaagaaaggcctcatggggccactgaccgaactggacactaaagatgtggatgccctgctgaagaagtctgaggcccagcatgaacagccggaagatggatgcccctttggtgccctgacgcagcgcctcctgcaggccctggtggaggaaaatattatttcccctatggaggattctcctattcctgacatgtctgggaaagaatcaggggctgacggggcaagcacctcccctcgcaatcagaacaagcccttcagtgtgccgcatactaagtccctggagagccgcatcaaggaggagctaattgcccagggccttttggagtctgaggaccgccccgcagaggactccgaggatgaggtccttgctgagcttcgcaaacggcaggctgagctgaaggcacttagtgcccacaaccgcaccaagaagcacgacctgctgaggctggcaaaggaggaggtgagccggcaggagctgaggcagcgggtgcgcatggctgacaacgaggtcatggacgcctttcgcaagatcatggctgcccggcagaagaagcggactcccaccaagaaagaaaaggaccaggcctggaagactctgaaggagcgtgagagcatcctgaagctgctggatgggtagccctcacccctgcctcaggctgattatctggcctaggggaggggaagggaggcccacttccttctttgggcacaggaaacattggcctgtggctgtccctcaaatggcggcagtctctagagggccgtggcccttcccctgaggtcttttggcctagctctgtacaaccaggacacaggaagccctgctgggctagcctgaggcctagtctctgcttggtccccgagatggggttggaggggacttcgtttctgggtcttcctcttcccctctttaccatcccccactccctaatcccctacccctgtctccccttcaaggacttctcccttgtggttttgtaaagtgcaaacttaagaataaagtgactgctgtggtttttcaaaaaaaaaaaaaaa

SEQ ID NO: 164198 - DNA, 1299 bp, Artificial Sequence
  derived and/or modified sequence
atgagcgagctgaaggactgccccctgcagttccacgacttcaagagcgtggaccacctgaaggtgtgccccagatacaccgccgtgctggccagaagcgaggacgacggcatcggcatcgaggagctggacaccctgcagctggagctggagaccctgctgagcagcgccagcagaagactgagagtgctggaggccgagacccagatcctgaccgactggcaggacaagaagggcgacagaagattcctgaagctgggcagagaccacgagctgggcgccccccccaagcacggcaagcccaagaagcagaagctggagggcaaggccggccacggccccggccccggccccggcagacccaagagcaagaacctgcagcccaagatccaggagtacgagttcaccgacgaccccatcgacgtgcccagaatccccaagaacgacgcccccaacagattctgggccagcgtggagccctactgcgccgacatcaccagcgaggaggtgagaaccctggaggagctgctgaagccccccgaggacgaggccgagcactacaagatcccccccctgggcaagcactacagccagagatgggcccaggaggacctgctggaggagcagaaggacggcgccagagccgccgccgtggccgacaagaagaagggcctgatgggccccctgaccgagctggacaccaaggacgtggacgccctgctgaagaagagcgaggcccagcacgagcagcccgaggacggctgccccttcggcgccctgacccagagactgctgcaggccctggtggaggagaacatcatcagccccatggaggacagccccatccccgacatgagcggcaaggagagcggcgccgacggcgccagcaccagccccagaaaccagaacaagcccttcagcgtgccccacaccaagagcctggagagcagaatcaaggaggagctgatcgcccagggcctgctggagagcgaggacagacccgccgaggacagcgaggacgaggtgctggccgagctgagaaagagacaggccgagctgaaggccctgagcgcccacaacagaaccaagaagcacgacctgctgagactggccaaggaggaggtgagcagacaggagctgagacagagagtgagaatggccgacaacgaggtgatggacgccttcagaaagatcatggccgccagacagaagaagagaacccccaccaagaaggagaaggaccaggcctggaagaccctgaaggagagagagagcatcctgaagctgctggacggctag

SEQ ID NO: 164199 - DNA, 1299 bp, Artificial Sequence
  derived and/or modified sequence
atgtctgagctgaaggattgtccgctacaattccacgacttcaagagcgtggaccatctgaaggtatgtccacgttacaccgcagttcttgcccggagcgaggacgatggcataggcatcgaagagttggatactttacagctagaacttgagaccctgttaagttctgccagccggcgactcagagtccttgaggcagagacccagatcctgactgactggcaagataaaaaaggtgatcggcgctttctgaagttggggcgggatcatgagctgggggccccgccaaaacatggcaagcctaaaaagcagaaactcgaaggcaaggcaggtcacggaccaggaccgggccctgggagaccaaagtctaagaatctccaacctaaaatccaagaatatgaatttaccgacgacccaatcgacgtcccccgaattcctaagaatgacgcaccaaatcgattctgggcttctgtggaaccttattgcgctgacatcacatcggaagaagtgagaactcttgaggagctgttgaagccgcccgaggacgaggcagaacactacaagattccccctctggggaaacactatagccagaggtgggctcaagaggacctgctcgaggagcagaaggatggggcaagggctgcagctgtcgctgataagaagaaggggttgatgggacccctcaccgagttagatactaaggacgtggatgcactcctgaagaaatcagaggctcagcatgagcagccagaagacggatgtccgttcggtgccctcacccaacgattactccaggcccttgtggaagagaatatcattagcccaatggaagactccccaatcccagacatgtcaggaaaggaatccggagcggacggcgcatcaacttcccccaggaatcaaaacaagccattctccgtccctcataccaaatctctggaaagcaggatcaaggaggagctgattgcccagggcctgctagagagtgaagatcgccctgccgaagactcagaggatgaagttttagccgagttacggaaaagacaagcagaacttaaggccctctcagctcacaaccggactaaaaagcatgatttgcttagactggctaaggaagaagtgagccgccaggagctgcggcagcgcgtgcgtatggccgataatgaagtgatggacgccttccgcaagatcatggcagcccgacagaagaaacggacgcctacaaagaaggaaaaggaccaagcctggaagacgctaaaggagcgcgaaagcattttaaagctccttgacggctag

SEQ ID NO: 164200 - DNA, 1299 bp, Artificial Sequence
  derived and/or modified sequence
atgtccgagctgaaagattgtcccctacagtttcacgactttaaatccgtcgatcatctgaaagtgtgtcctcgctacaccgctgtgctcgcccgttcggaggatgacggtatcggcattgaagagctggataccctacaacttgaactggagaccttactaagtagcgccagtagacgcttgagagtgctggaggcagaaacacagattctgaccgactggcaggacaagaagggcgaccgacggtttctaaaattgggccgcgatcatgagctgggggcccctcccaagcacgggaagcccaagaaacagaagctcgaaggcaaggctggacatggccctggccccggcccaggacgccccaaatcaaaaaatctgcaacctaagatacaggaatatgaatttacagatgaccccatcgatgtcccacggatccccaaaaacgacgctcctaaccgattctgggcttcagtggaaccatattgcgccgacatcacctctgaggaggtgcgcaccttagaggagctgctgaagccacccgaagatgaagccgaacattacaaaataccacccctgggcaaacactactcccagaggtgggcacaagaggacttattggaagaacagaaggatggcgcaagggccgccgccgtggccgataagaagaaaggcctgatgggcccactcaccgagcttgataccaaggacgtggacgctcttctgaagaagagcgaggctcagcatgaacagccagaggatggttgtccattcggcgccctaactcagcgcttgctgcaagccctggtggaggagaacatcatatcacctatggaagatagccctattcctgacatgtcgggcaaagagagcggcgcagacggagcctccacttctcctcgcaaccagaataagccctttagcgtgccccatacgaagagcctagagagccgaattaaggaggagctcatcgcacagggactcctggagagcgaagaccgaccagcggaggacagcgaggacgaagttttggctgagctcagaaagagacaggcagagttgaaagccctgtccgcccacaaccgtactaaaaagcatgatctcctgaggctcgcgaaagaggaggtgagccgtcaggagctgaggcagcgagttaggatggccgataacgaggtgatggatgcttttcgcaagattatggccgctcgtcagaaaaaaaggactcctactaagaaagagaaggaccaggcatggaagaccttgaaggaacgtgaatcaattctcaagcttcttgatggctag

SEQ ID NO: 164201 - DNA, 1299 bp, Artificial Sequence
  derived and/or modified sequence
atgtctgagctgaaggactgccccctgcagttccatgacttcaagtctgtggaccacctgaaggtgtgcccccgctacacagctgtgctggcccggagtgaagatgatggcatcggcatcgaggagctggacaccctgcagctggagctggagaccctgctgagcagcgccagccggcggctgcgggtgctggaggccgagacccagatcctgacagactggcaggacaagaagggggaccggcgcttcctgaagctgggccgggaccacgagctgggcgccccacccaagcacggcaagcccaagaagcagaagctggagggcaaggccggccacggccctggccctggccctggccggcccaagagcaagaacctgcagcccaagatccaggagtatgagttcacagatgaccccattgatgtgccccgcatccccaagaatgatgcccccaaccgcttctgggcctctgtggagccctactgtgccgacatcaccagcgaggaggtgaggaccctggaggagctgctgaagcccccagaagatgaggccgagcactacaagatcccccccctgggcaagcactacagccagcgctgggcccaggaggacctgctggaggagcagaaggatggagcccgggctgctgctgtggccgacaagaagaagggcctgatgggccccctgacagagctggacaccaaggatgtggatgccctgctgaagaagtctgaggcccagcacgagcagccagaagatggctgcccctttggagccctgacccagaggctgctgcaggccctggtggaggagaacatcatcagccccatggaggacagccccatcccagacatgtctgggaaggagagcggggctgatggagccagcaccagccccaggaaccagaacaagcccttctctgtgccccacaccaagagcctggagagccgcatcaaggaggagctgattgcccagggcctgctggagagtgaagatagacctgctgaggacagtgaagatgaggtgctggccgagctgaggaagaggcaggccgagctgaaggccctgagcgcccacaacagaaccaagaagcatgacctgctgcggctggccaaggaggaggtgtcccggcaggagctgcggcagagggtgaggatggctgacaatgaggtgatggatgccttcaggaagatcatggccgcccggcagaagaagaggacccccaccaagaaggagaaggaccaggcctggaagaccctgaaggagcgggagagcatcctgaagctgctggatggatag

SEQ ID NO: 164202 - DNA, 1299 bp, Artificial Sequence
  derived and/or modified sequence
atgagcgagctgaaggactgccccctgcagttccacgacttcaagtctgtggaccatttaaaagtgtgcccgaggtataccgccgtcttggcaagaagtgaagatgatggaatcggaatagaagaactggacaccttacagctggagctggagacacttctgtcatctgcatcccgtcggctgcgagtcctggaggccgagacccagatcctgaccgattggcaggataaaaaaggggatcggcgcttcttaaagttaggaagggatcatgagctgggggctcccccgaagcatggtaaacccaagaagcagaaacttgagggcaaagcaggccacggtccaggcccgggccccggcaggcctaaatcaaaaaatcttcagcctaagattcaggaatatgaattcacggacgatccgattgacgtgccgagaattcccaagaacgatgcccccaacaggttttgggcttccgtggagccctattgcgcagatataaccagcgaagaagtgagaaccttggaggagctgctgaaaccaccagaggatgaagccgaacactataaaatccctcccctaggcaagcactactctcagcgatgggcccaggaggacttgttagaggagcagaaagatggggctcgagccgcagccgttgctgacaagaaaaaaggcttaatgggacctctaaccgaactggacaccaaagacgtggacgctctcctgaagaagtcagaggcccagcatgagcagcctgaggatgggtgtcccttcggagctttgacccagagactgcttcaagccctggtggaagagaacattatttccccaatggaggattctccgattccggatatgtcgggtaaggagagtggcgctgatggggcctccactagtccccgtaaccagaacaagccctttagtgttcctcatacgaagagtttggagagtagaattaaggaagagttgatcgcacagggcctgcttgagagcgaggatcgccccgctgaggatagtgaggatgaggtcctcgccgagctccggaagagacaggcagaactgaaagcccttagcgctcacaacaggaccaaaaagcacgacttactacgcctcgccaaagaagaagtgtctaggcaggagttgcgtcagcgggttcggatggcagacaacgaagtgatggatgccttcaggaagattatggccgcccgccagaagaaacgaactcctacaaagaaggaaaaggaccaagcatggaagactttgaaagagcgagaaagtatacttaaactcctggacgggtag

SEQ ID NO: 164203 - DNA, 1299 bp, Artificial Sequence
  derived and/or modified sequence
atgagcgagctgaaggactgccccctgcagttccacgacttcaagtccgtagaccacctcaaagtatgtccgcgctacaccgcggttctagcccgtagtgaagatgacggcatcgggatcgaggagctggacacgctgcagctcgagctggaaactctacttagcagcgcatccaggcggctgcgggtgctagaggccgaaacacagatcctgaccgattggcaggacaagaaaggagaccgcagatttctgaaactgggccgcgaccacgagctgggagccccgcccaaacatggtaagcctaagaaacagaagctcgaaggcaaggccggtcacgggcccgggcccgggccgggacggcccaagagcaagaacttgcagcctaaaattcaagagtacgagtttacagatgatcccattgacgtgcctcgaatcccgaaaaatgatgctccaaatcggttttgggcgtcagtggagccctactgtgctgatataacctctgaggaggtccgaacattggaagaactgctgaagccccccgaggacgaagctgagcattacaagattcctccattgggaaaacattactcacagaggtgggcacaggaagatctgcttgaagagcagaaagacggggcaagagccgccgccgttgcagataaaaagaaaggactgatgggaccactgacggaactcgacactaaggatgtggacgctcttttgaagaagtctgaggctcagcacgaacaaccagaagatggttgccctttcggggctctgacccagaggctgctccaggccctggtcgaggaaaatatcatttctcccatggaggattctcctatcccggatatgtcaggaaaagaaagcggcgctgatggagcctctacctcccctagaaatcagaacaaaccattctccgtgcctcatactaaaagtctcgagagtcggattaaggaggagctgattgcacaaggactgttggaaagcgaagaccgtcctgccgaggatagcgaggatgaggtgctggccgagctgagaaagaggcaagccgaactgaaggctctatccgcacataaccgcacaaagaaacacgacctgctcaggctggcgaaagaagaggtctccaggcaggagctgcggcagcgcgtgcgcatggcggacaacgaagtgatggacgccttccgcaaaataatggctgctcgccagaaaaagagaaccccaaccaagaaagagaaagaccaggcctggaagacccttaaggagagagaaagtattctcaagctgctggacggatag

SEQ ID NO: 164204 - DNA, 1299 bp, Artificial Sequence
  derived and/or modified sequence
atgtcagagctgaaagactgcccgctgcagttccacgatttcaagtctgttgaccacttaaaggtgtgccccaggtatacggctgtgttggccaggtcagaggatgacggcattggaatcgaggaactggatacccttcagttggagctcgagacgctcttgtcaagtgctagccggagattgcgcgttttggaagccgagacgcaaattttaacagattggcaggacaaaaagggagacagacgctttctgaaactcgggagggatcacgagctgggtgctcccccaaaacacggaaagccaaaaaaacagaagctagagggaaaggccggacacggcccaggtccaggacctggcaggcctaagtccaagaacctgcaacccaaaattcaggagtatgagttcacagatgatccaatcgatgtgccacgcatcccaaaaaatgatgcacctaacagattttgggcatctgtggaaccttactgcgccgatatcactagtgaagaggtgaggaccttggaagaactgctgaaaccccctgaggatgaggcagaacactacaagatcccacccttggggaaacattacagtcagcgatgggcacaagaggacttgctggaagaacagaaggatggcgctagggctgctgccgttgccgataagaaaaaaggcctgatgggacctttgacagagctggataccaaagacgtggacgcccttctgaaaaagtccgaagcgcagcatgagcagcccgaagatggctgtccctttggagccttgactcaacgacttctccaggctctcgtagaagagaatattatctcccccatggaggattctcccataccagatatgtctggaaaggagagcggggcagacggcgcttctacgtcacctagaaaccagaacaaaccattcagtgttccccacactaaaagcttagagagtcgcattaaggaagagttaatagctcagggcctgctggagtccgaggatcggcctgctgaggactccgaggacgaggtgctggctgaactccggaagcgccaggccgagctgaaggctctgtctgcccacaatcgcacaaagaaacatgatcttctacggctcgcgaaagaggaagtgtcccgtcaggagctaaggcagagggtgcgcatggcagacaatgaggttatggatgctttcagaaaaattatggctgctcggcaaaagaaacgtacaccaaccaagaaggagaaagatcaagcttggaagaccctcaaggagagggaaagtattctgaaacttctggacggttag

SEQ ID NO: 164205 - DNA, 1299 bp, Artificial Sequence
  derived and/or modified sequence
atgtctgaactgaaggactgtcctcttcagttccatgatttcaagtctgtcgaccatcttaaggtatgtcctagatataccgcggtcttggccaggagtgaggatgatgggattggcatcgaggagctagacacactgcagttggaattagaaactctgctttcgagtgcttcgagacgcctgagggtcctagaggcagaaactcagattcttaccgattggcaggacaaaaaaggagataggcgatttcttaagctgggaagggatcatgaattgggagctccaccaaagcacggaaaacctaagaaacagaagctggaaggcaaagccggacacggccctgggcctggccctggaagaccaaaatcaaagaatctgcagcccaagatacaggaatatgagttcaccgatgacccgatcgacgtacctcggattcccaaaaacgacgcacctaaccgattttgggcctcagtggagccgtattgtgctgacataacatccgaggaagttcgcactctggaggaattgctcaagccacccgaagacgaagccgaacactataaaattccaccgctgggtaaacactacagtcagagatgggcccaagaggacctgctcgaggaacagaaggacggtgcaagagcagccgctgtcgcagataaaaagaaaggcctgatgggccctctcaccgagctggacaccaaggatgtggatgctttgctgaaaaagtctgaggctcagcatgaacagcccgaagatggctgcccattcggcgctctgactcagagactgctacaggccctggtcgaggaaaacatcataagtcctatggaggatagtcctatccccgacatgtctggtaaagaatccggggcagacggagcatcaacctccccacgaaaccagaacaagcccttttccgtgccgcacacaaaaagtcttgaaagccggatcaaggaagagcttatcgcacaaggactcctggagagcgaagaccgcccagcggaggacagcgaggatgaggtgctggcggagctgcgcaaacggcaggcagaactgaaagcgcttagtgcccacaacagaaccaaaaagcatgacttactgcggcttgccaaggaagaagtgtctagacaggaactcagacagcgggtgagaatggctgacaatgaggtcatggacgcatttcggaaaatcatggccgctcgccagaagaaacgtacccccacaaaaaaagagaaggatcaggcatggaagaccctgaaagagcgcgaatctatccttaagctccttgacgggtag

SEQ ID NO: 164206 - DNA, 2355 bp, Artificial Sequence
  derived and/or modified sequence
cttccggttctgtacccccatcctttctctcgcccctcctacccgcagctcctggcgctcggcggggctaactgcagcgcggagatctcggccgccaagctccgcctcccgccccgggctgtgccccggggctcgcctgaggccgaccacccgcaccccacctctagcggctttgctcgaggcccaccttcttcccacccccggcaaactccagtaggctcgccctcgctgactccccgcccccgcgtcaactgcaaggggcccgcccatagccagttccggggcggttgctcacatcgaccggaactccccgccccctcccgcggcccctggggccgtaggaggccgcagcgaggaggtagagggggcgggggtcgcactagggtgtccctagagaacgaggactctgaaggcgggacatttgggcgacccccgggcggggccagccattaaacagtcccacttctgtgccagacactgaactgggctcttgacgggcatcatctcttaatcctcagaacatcccagggagctccacaggatccccatatcctgggccatgagtgagttgaaagactgccccttgcagttccacgacttcaagtctgtggatcacctgaaggtctgtccccgctacacggcagtgctggcacgctctgaggatgatggcatcggcatcgaggagctggacaccctgcagctggagctggagaccctgctgtcttctgccagccggcgcctgcgtgtgcttgaggccgaaacccagatcctcaccgactggcaggataagaaaggtgacagacgattcctgaagctgggtcgagaccatgaacttggagctccccccaaacatgggaagcccaagaagcagaaactggaagggaaggcaggacatgggccgggccctggcccaggacggcccaaatccaaaaaccttcagcccaagatccaggaatatgaattcactgatgaccctatcgacgtgccacggatccccaaaaatgatgcccccaacaggttctgggcttcagtggagccctactgtgctgacatcaccagcgaggaggtccgcacacttgaggagttactgaagcccccagaagatgaggctgagcattacaagatcccacccctggggaagcactactcccagcgctgggcccaggaggacctgctggaggagcagaaggatggggcccgggcagcggctgtggctgacaagaagaaaggcctcatggggccactgaccgaactggacactaaagatgtggatgccctgctgaagaagtctgaggcccagcatgaacagccggaagatggatgcccctttggtgccctgacgcagcgcctcctgcaggccctggtggaggaaaatattatttcccctatggaggattctcctattcctgacatgtctgggaaagaatcaggggctgacggggcaagcacctcccctcgcaatcagaacaagcccttcagtgtgccgcatactaagtccctggagagccgcatcaaggaggagctaattgcccagggccttttggagtctgaggaccgccccgcagaggactccgaggatgaggtccttgctgagcttcgcaaacggcaggctgagctgaaggcacttagtgcccacaaccgcaccaagaagcacgacctgctgaggctggcaaaggaggaggtgagccggcaggagctgaggcagcgggtgcgcatggctgacaacgaggtcatggacgcctttcgcaagatcatggctgcccggcagaagaagcggactcccaccaagaaagaaaaggaccaggcctggaagactctgaaggagcgtgagagcatcctgaagctgctggatgggtagccctcacccctgcctcaggctgattatctggcctaggggaggggaagggaggcccacttccttctttgggcacaggaaacattggcctgtggctgtccctcaaatggcggcagtctctagagggccgtggcccttcccctgaggtcttttggcctagctctgtacaaccaggacacaggaagccctgctgggctagcctgaggcctagtctctgcttggtccccgagatggggttggaggggacttcgtttctgggtcttcctcttcccctctttaccatcccccactccctaatcccctacccctgtctccccttcaaggacttctcccttgtggttttgtaaagtgcaaacttaagaataaagtgactgctgtggtttttcaaaaaaagcatccagtctttgaatgtctgttacagtggggaggaaggaaccagtgtgggtggtaaggtttgtggggggtatgcttggtggctctcagcccatggccactaaccc

SEQ ID NO: 164207 - DNA, 1617 bp, Artificial Sequence
  derived and/or modified sequence
accatctatgctccgagcggggtagagagcccttacgaacgcttgggccttccggaagttttccacctagggctgtctcggtatttttaaattcttgcactcgagtcactatttaagctcctccaggaatgggtgcagcttccctttgtgccttcggccttcttgtcacctttgccacagcctcccccagctccacaggatccccatatcctgggccatgagtgagttgaaagactgccccttgcagttccacgacttcaagtctgtggatcacctgaaggtctgtccccgctacacggcagtgctggcacgctctgaggatgatggcatcggcatcgaggagctggacaccctgcagctggagctggagaccctgctgtcttctgccagccggcgcctgcgtgtgcttgaggccgaaacccagatcctcaccgactggcaggataagaaaggtgacagacgattcctgaagctgggtcgagaccatgaacttggagctccccccaaacatgggaagcccaagaagcagaaactggaagggaaggcaggacatgggccgggccctggcccaggacggcccaaatccaaaaaccttcagcccaagatccaggaatatgaattcactgatgaccctatcgacgtgccacggatccccaaaaatgatgcccccaacaggttctgggcttcagtggagccctactgtgctgacatcaccagcgaggaggtccgcacacttgaggagttactgaagcccccagaagatgaggctgagcattacaagatcccacccctggggaagcactactcccagcgctgggcccaggaggacctgctggaggagcagaaggatggggcccgggcagcggctgtggctgacaagaagaaaggcctcatggggccactgaccgaactggacactaaagatgtggatgccctgctgaagaagtctgaggcccagcatgaacagccggaagatggatgcccctttggtgccctgacgcagcgcctcctgcaggccctggtggaggaaaatattatttcccctatggaggattctcctattcctgacatgtctgggaaagaatcaggggctgacggggcaagcacctcccctcgcaatcagaacaagcccttcagtgtgccgcatactaagtccctggagagccgcatcaaggaggagctaattgcccagggccttttggagtctgaggaccgccccgcagaggactccgaggatgaggtccttgctgagcttcgcaaacggcaggctgagctgaaggcacttagtgcccacaaccgcaccaagaagcacgacctgctgaggctggcaaaggaggaggtgagccggcaggagctgaggcagcgggtgcgcatggctgacaacgaggtcatggacgcctttcgcaagatcatggctgcccggcagaagaagcggactcccaccaagaaagaaaaggaccaggcctggaagactctgaaggagcgtgagagcatcctgaagctgctggatgggtagccctcacccctgcctcaggctgattatctggcctaggggaggggaagggaggcccacttccttctttgggcacaggaaacattggcctgtggctgtccctc

SEQ ID NO: 164208 - protein, 161 aa, Artificial Sequence
  derived and/or modified sequence
MAGRKLALKTIDWVAFAEIIPQNQKAIASSLKSWNETLTSRLAALPENPPAIDWAYYKANVAKAGLVDDFEKKFNALKVPVPEDKYTAQVDAEEKEDVKSCAEWVSLSKARIVEYEKEMEKMKNLIPFDQMTIEDLNEAFPETKLDKKKYPYWPHQPIENL

SEQ ID NO: 164209 - protein, 102 aa, Artificial Sequence
  derived and/or modified sequence
MAGRKLALKTIDWVAFAEIIPQNQKAIASSLKSWNETLTSRLAALPENPPAIDWAYYKANVAKAGLVDDFEKKFNALKVPVPEDKYTAQVDAEEKEDKKKKK

SEQ ID NO: 164210 - DNA, 486 bp, Artificial Sequence
  derived and/or modified sequence
atggccggcagaaagctggccctgaagaccatcgactgggtggccttcgccgagatcatcccccagaaccagaaggccatcgccagcagcctgaagagctggaacgagaccctgaccagcagactggccgccctgcccgagaacccccccgccatcgactgggcctactacaaggccaacgtggccaaggccggcctggtggacgacttcgagaagaagttcaacgccctgaaggtgcccgtgcccgaggacaagtacaccgcccaggtggacgccgaggagaaggaggacgtgaagagctgcgccgagtgggtgagcctgagcaaggccagaatcgtggagtacgagaaggagatggagaagatgaagaacctgatccccttcgaccagatgaccatcgaggacctgaacgaggccttccccgagaccaagctggacaagaagaagtacccctactggccccaccagcccatcgagaacctgtag

SEQ ID NO: 164211 - DNA, 309 bp, Artificial Sequence
  derived and/or modified sequence
atggccggcagaaagctggccctgaagaccatcgactgggtggccttcgccgagatcatcccccagaaccagaaggccatcgccagcagcctgaagagctggaacgagaccctgaccagcagactggccgccctgcccgagaacccccccgccatcgactgggcctactacaaggccaacgtggccaaggccggcctggtggacgacttcgagaagaagttcaacgccctgaaggtgcccgtgcccgaggacaagtacaccgcccaggtggacgccgaggagaaggaggacaagaagaagaagaagtag

SEQ ID NO: 164212 - DNA, 486 bp, Artificial Sequence
  derived and/or modified sequence
atggccggacgaaagcttgctctgaaaacaattgattgggtagcctttgcggaaattataccccagaaccagaaggcaattgcctcctcactgaagtcatggaacgagaccctgacatctcggctagcggccctgcccgagaacccccccgcaatagattgggcctattacaaggccaatgtcgccaaggcaggactggtcgacgatttcgagaaaaaatttaatgctctgaaggttcccgttcccgaggacaaatatactgcacaagtggacgccgaggaaaaggaggacgtgaaaagctgtgcagaatgggtgagcctcagtaaggctagaattgtggaatacgagaaagagatggaaaaaatgaagaatttgattccattcgatcaaatgactattgaggacctaaatgaagcatttcctgaaaccaaactggacaagaagaagtacccatactggccccaccagccgatcgaaaacctctag

SEQ ID NO: 164213 - DNA, 309 bp, Artificial Sequence
  derived and/or modified sequence
atggcgggtcgaaagttagcccttaaaactatcgactgggtggcctttgccgagatcattcctcagaaccagaaggcgatagccagttcacttaaatcttggaacgagacacttaccagccggctggcagccctccctgagaatccccccgctatcgactgggcgtactacaaagcaaatgtagcaaaggccgggctggtagatgatttcgaaaagaaattcaacgctcttaaagtaccggtgcctgaagataagtatactgcgcaggtggatgccgaagagaaggaagacaagaagaagaagaaatag

SEQ ID NO: 164214 - DNA, 486 bp, Artificial Sequence
  derived and/or modified sequence
atggccggcaggaagctggccctgaagaccatcgactgggtggcctttgctgagatcatcccccagaaccagaaggccatcgccagcagcctgaagtcctggaatgagaccctgaccagccggctggccgccctgcctgaaaatcctccagccatcgactgggcctactacaaggccaacgtggccaaggccggcctggtggatgactttgagaagaagttcaatgccctgaaggtgcctgtgcctgaggacaagtacacagcccaggtggatgctgaggagaaggaggatgtgaagagctgtgccgagtgggtgtccctgagcaaggcccgcatcgtggagtatgagaaggagatggagaagatgaagaacctgatcccctttgaccagatgaccatcgaggacctgaatgaggccttccctgagaccaagctggacaagaagaagtacccctactggccccaccagcccatcgagaacctgtag

SEQ ID NO: 164215 - DNA, 309 bp, Artificial Sequence
  derived and/or modified sequence
atggccggcaggaagctggccctgaagaccatcgactgggtggcctttgctgagatcatcccccagaaccagaaggccatcgccagcagcctgaagtcctggaatgagaccctgaccagccggctggccgccctgcctgaaaatcctccagccatcgactgggcctactacaaggccaacgtggccaaggccggcctggtggatgactttgagaagaagttcaatgccctgaaggtgcctgtgcctgaggacaagtacacagcccaggtggatgctgaggagaaggaggacaagaagaagaagaagtag

SEQ ID NO: 164216 - DNA, 486 bp, Artificial Sequence
  derived and/or modified sequence
atggccggccggaagctggccctgaagaccatcgactgggtggccttcgccgaaatcatccctcagaaccagaaggccatcgcctctagcctgaaaagctggaacgagactctcacctcaaggcttgccgctctccccgagaatccacctgccatcgactgggcctattacaaagccaacgtggccaaggccgggctcgtcgacgatttcgaaaaaaagttcaatgctttgaaagtgcccgtacctgaagataagtacactgcccaggtggatgcggaagaaaaagaggatgtgaagtcttgcgctgaatgggtcagtctctcaaaggcccggattgtcgaatacgagaaagagatggagaaaatgaagaacttgatcccctttgaccagatgacgattgaggatctcaatgaagccttccccgagacgaaattagacaagaaaaagtatccatactggccacaccaacctatcgaaaatttatag

SEQ ID NO: 164217 - DNA, 309 bp, Artificial Sequence
  derived and/or modified sequence
atggccggccggaagctggccctgaagaccatcgactgggtggcctttgcagagatcattccgcaaaatcagaaggcaattgccagctcattaaaatcctggaacgaaaccttgacttcaagactcgctgcactgcctgaaaatccacccgccatcgattgggcttactacaaggctaatgttgcaaaagctggcctggttgatgatttcgaaaagaagttcaatgccctgaaagtgcccgttccagaagataagtatacagcacaggtcgacgccgaagaaaaagaagataagaagaagaaaaagtag

SEQ ID NO: 164218 - DNA, 486 bp, Artificial Sequence
  derived and/or modified sequence
atggccggacggaaactggcccttaaaactatcgattgggttgctttcgcagagataatcccgcagaaccagaaggccatagcttcctctctaaagagttggaacgaaactctgacgtcccggttggcggcacttccagaaaatcctccggctatcgactgggcctactataaggccaacgtggccaaagcagggttggtggacgattttgagaaaaagttcaacgctcttaaagtcccggtgcctgaggacaagtacaccgctcaggtcgacgccgaggagaaggaagatgtaaagtcttgcgccgagtgggtgtcactcagcaaggccagaatcgttgaatatgagaaagagatggaaaagatgaaaaacctgatacccttcgatcaaatgaccatcgaggatctgaatgaagcctttccagagaccaagctcgacaagaagaagtatccgtattggcctcatcagcctatagagaatctttag

SEQ ID NO: 164219 - DNA, 309 bp, Artificial Sequence
  derived and/or modified sequence
atggctggacgtaagctggctctgaagacaattgactgggtagcatttgctgagataattccacaaaaccagaaggctattgcatctagtctgaaaagttggaacgagacgttaacttcccggcttgccgcactgcccgaaaacccacccgctattgattgggcttattataaagccaacgtcgccaaggcaggtctggttgacgattttgagaaaaagttcaatgccttgaaggtgcccgtgcctgaagacaagtacactgcacaggtggatgctgaagagaaagaggataaaaaaaagaagaaatag

SEQ ID NO: 164220 - DNA, 622 bp, Artificial Sequence
  derived and/or modified sequence
tgacccacttccgttacttgctgcggaggaccgtgggcagccagggtcggtgaaggatcccaaaatggctgggcgaaaacttgctctaaaaaccattgactgggtagcttttgcagagatcataccccagaaccaaaaggccattgctagttccctgaaatcctggaatgagaccctcacctccaggttggctgctttacctgagaatccaccagctatcgactgggcttactacaaggccaatgtggccaaggctggcttggtggatgactttgagaagaagtttaatgcgctgaaggttcccgtgccagaggataaatatactgcccaggtggatgccgaagaaaaagaagatgtgaaatcttgtgctgagtgggtgtctctctcaaaggccaggattgtagaatatgagaaagagatggagaagatgaagaacttaattccatttgatcagatgaccattgaggacttgaatgaagctttcccagaaaccaaattagacaagaaaaagtatccctattggcctcaccaaccaattgagaatttataaaattgagtccaggaggaagctctggcccttgtattacacattctggacattaaaaataataattatacagtt

SEQ ID NO: 164221 - DNA, 370 bp, Artificial Sequence
  derived and/or modified sequence
tgacccacttccgttacttgctgcggaggaccgtgggcagccagggtcggtgaaggatcccaaaatggctgggcgaaaacttgctctaaaaaccattgactgggtagcttttgcagagatcataccccagaaccaaaaggccattgctagttccctgaaatcctggaatgagaccctcacctccaggttggctgctttacctgagaatccaccagctatcgactgggcttactacaaggccaatgtggccaaggctggcttggtggatgactttgagaagaagtttaatgcgctgaaggttcccgtgccagaggataaatatactgcccaggtggatgccgaagaaaaagaagataagaaaaagaaaaaa

SEQ ID NO: 164222 - protein, 207 aa, Artificial Sequence
  derived and/or modified sequence
MSSDRQRSDDESPSTSSGSSDADQRDPAAPEPEEQEERKPSATQQKKNTKLSSKTTAKLSTSAKRIQKELAEITLDPPPNCSAGPKGDNIYEWRSTILGPPGSVYEGGVFFLDITFSSDYPFKPPKVTFRTRIYHCNINSQGVICLDILKDNWSPALTISKVLLSICSLLTDCNPADPLVGSIATQYLTNRAEHDRIARQWTKRYAT

SEQ ID NO: 164223 - protein, 175 aa, Artificial Sequence
  derived and/or modified sequence
MSSDRQRSDDESPSTSSGSSDADQRDPAAPEPEEQEERKPSATQQKKNTKLSSKTTAKLSTSAKRIQKELAEITLDPPPNCSAGPKGDNIYEWRSTILGPPGSVYEGGVFFLDITFSSDYPFKPPKVTFRTRIYHCNINSQGVICLDILKDNWSPALTISKVLLSICSLLTDCNP

SEQ ID NO: 164224 - DNA, 624 bp, Artificial Sequence
  derived and/or modified sequence
atgagcagcgacagacagagaagcgacgacgagagccccagcaccagcagcggcagcagcgacgccgaccagagagaccccgccgcccccgagcccgaggagcaggaggagagaaagcccagcgccacccagcagaagaagaacaccaagctgagcagcaagaccaccgccaagctgagcaccagcgccaagagaatccagaaggagctggccgagatcaccctggaccccccccccaactgcagcgccggccccaagggcgacaacatctacgagtggagaagcaccatcctgggcccccccggcagcgtgtacgagggcggcgtgttcttcctggacatcaccttcagcagcgactaccccttcaagccccccaaggtgaccttcagaaccagaatctaccactgcaacatcaacagccagggcgtgatctgcctggacatcctgaaggacaactggagccccgccctgaccatcagcaaggtgctgctgagcatctgcagcctgctgaccgactgcaaccccgccgaccccctggtgggcagcatcgccacccagtacctgaccaacagagccgagcacgacagaatcgccagacagtggaccaagagatacgccacctag

SEQ ID NO: 164225 - DNA, 528 bp, Artificial Sequence
  derived and/or modified sequence
atgagcagcgacagacagagaagcgacgacgagagccccagcaccagcagcggcagcagcgacgccgaccagagagaccccgccgcccccgagcccgaggagcaggaggagagaaagcccagcgccacccagcagaagaagaacaccaagctgagcagcaagaccaccgccaagctgagcaccagcgccaagagaatccagaaggagctggccgagatcaccctggaccccccccccaactgcagcgccggccccaagggcgacaacatctacgagtggagaagcaccatcctgggcccccccggcagcgtgtacgagggcggcgtgttcttcctggacatcaccttcagcagcgactaccccttcaagccccccaaggtgaccttcagaaccagaatctaccactgcaacatcaacagccagggcgtgatctgcctggacatcctgaaggacaactggagccccgccctgaccatcagcaaggtgctgctgagcatctgcagcctgctgaccgactgcaacccctag

SEQ ID NO: 164226 - DNA, 624 bp, Artificial Sequence
  derived and/or modified sequence
atgtctagcgatagacagaggtctgacgatgagagtccctccaccagcagtggatcttccgatgcagaccagcgagaccctgcagcacctgagccagaggaacaggaggaacgaaaaccctcagcaactcagcagaagaaaaacaccaaactgtcctccaaaacaacagcgaaactctccactagcgctaaacggatacagaaggagctcgctgaaattacgctggacccaccaccaaattgttccgctggccccaaaggcgataatatttacgaatggcgcagtactatactaggcccaccaggctccgtgtatgaggggggggtgttttttctggacattaccttcagtagcgactacccttttaagccaccgaaggtcacatttcgcacgcggatttatcactgcaacatcaattctcaaggggtcatctgtctggacattttgaaggataactggtcacctgcactgacaattagcaaagttctcctgagtatatgctcgctgctcactgactgtaatccggcagaccctctggtcggtagcattgccacccagtacctcactaatcgagcagaacacgataggatcgcccgtcaatggaccaagaggtacgccacctag

SEQ ID NO: 164227 - DNA, 624 bp, Artificial Sequence
  derived and/or modified sequence
atgtcgtccgatcgacagcggtctgacgacgagagtccaagcacatccagtggctcctccgatgctgatcagcgcgacccagctgccccagagcccgaagagcaggaagagcggaagccgagtgccacccaacagaagaaaaataccaagctgtcatcaaagaccactgctaagctgtctaccagcgcaaagagaattcagaaggagctggcagagatcaccctagaccccccaccaaattgcagtgccgggcccaagggcgacaatatctacgaatggcgctctactatcctcggacccccaggatctgtctacgagggaggcgtgttttttcttgacataacattttctagtgactacccgtttaaaccccctaaggttacatttaggacccggatctaccattgcaacattaattctcagggagttatctgcttggatatactgaaggataactggtcgcccgccctgactattagcaaagtcctgctttccatttgctctctgctgacagattgcaacccagcggaccctctggtcggttcaatcgccacacagtatttgaccaatcgagcagagcacgaccgaattgctcggcagtggacaaaacggtacgcaacctag

SEQ ID NO: 164228 - DNA, 624 bp, Artificial Sequence
  derived and/or modified sequence
atgtcttctgatagacagagaagtgatgacgagtccccttccacgagctcgggctccagtgacgccgatcaacgagatcccgcagctcccgagcccgaagaacaagaggagaggaaaccctccgccactcagcaaaaaaagaataccaaattgtccagcaaaactaccgccaaattatccacttctgccaagcggatccagaaagagttggccgagatcacgcttgacccaccgccaaattgttctgcgggcccaaagggggacaacatatacgagtggcgaagcaccatcctggggcctccggggtctgtctatgaagggggcgtatttttcctcgacatcacgttttcaagcgactaccctttcaagccaccaaaggtgacctttcgaacaaggatttaccactgtaacattaactcacaaggagtgatctgcctcgacatactgaaagacaactggtccccagccttaacaatcagcaaagtgctgctttcaatttgctccctgctcactgattgcaatcccgctgatccactggttgggtctatcgctacgcagtaccttaccaatagggctgagcacgaccgcatcgcccggcagtggacaaaacgatatgccacatag

SEQ ID NO: 164229 - DNA, 624 bp, Artificial Sequence
  derived and/or modified sequence
atgtcttcagatcgccagcggagcgacgacgaatccccttcaacgagctcagggagctccgacgctgaccagcgtgaccccgctgctcccgagccagaggagcaagaagaacggaagccctcagccacacagcagaaaaaaaacacgaagttaagttctaaaactactgccaaactaagcacaagtgccaagcggatacagaaagaattggctgagatcacattagaccccccacctaattgctctgcaggacccaagggcgataacatatacgagtggcgctccacaatactgggacctcctggatcagtctatgaaggcggcgtgttttttttagacatcacattttcctcggattacccattcaagccgcctaaagtgacctttcggactcgcatttaccattgcaatatcaatagccaaggagttatctgcctcgatattctgaaagacaactggtctccagctctcaccatctcaaaagtcctgttaagcatttgctcccttctgacagactgtaatcctgctgatccgctagtaggcagcattgccacacagtacctaactaacagggcagaacatgataggatcgcacgccagtggacaaagaggtatgccacctag

SEQ ID NO: 164230 - DNA, 528 bp, Artificial Sequence
  derived and/or modified sequence
atgtcctctgaccgccagcgatccgacgacgagagccccagcacctcttctggctcctcagacgctgatcagcgagatccagcagcccccgagccggaagaacaggaagaaaggaagcctagcgcaacacagcagaaaaagaacaccaaactttcaagcaaaaccaccgccaagttaagtactagcgctaagcgaattcagaaggagctggcggaaattaccctagacccgccccccaattgttctgccggccccaaaggagataacatttatgaatggagaagcaccattttgggtccacctggaagtgtttacgagggcggggtattctttctggatatcaccttcagttccgactaccctttcaagccgccaaaggtgacctttcggactcgtatatatcactgcaacattaattcgcagggggtcatctgcctggacattctgaaagacaactggtccccagccctgaccatatcaaaggtattgttatcaatctgttcactactaacggattgtaatccttag

SEQ ID NO: 164231 - DNA, 528 bp, Artificial Sequence
  derived and/or modified sequence
atgagcagcgatcgccagcggtccgacgatgaatctccatccaccagcagtggaagttcagatgccgaccaaagagacccagctgcaccggagcccgaggagcaagaagaacgcaagccctccgccacgcagcagaaaaagaacactaagctgagctccaagaccaccgcaaaactttcaacgagtgctaagaggattcagaaagaactcgccgagatcacactggaccccccacctaattgctctgcaggacccaagggagacaatatttacgaatggaggtctacgatcctcggccccccgggcagtgtgtatgaggggggcgttttcttcctcgacataacattttcaagtgactacccatttaagccacctaaggtaaccttcaggaccaggatttatcactgtaacattaattcccaaggcgtgatctgcttggatatactgaaggataactggtcccctgctctaacaatctcaaaggtccttctgtccatctgttccctgctgacagactgcaacccatag

SEQ ID NO: 164232 - DNA, 528 bp, Artificial Sequence
  derived and/or modified sequence
atgtcctcggacagacaaaggtccgacgacgagtccccctccaccagttcgggatcaagcgatgcagaccagcgcgatcctgctgcaccagagcccgaagaacaggaggagagaaaaccgtcagccacccagcagaagaagaacacgaagctgtcatctaaaaccacggcaaagctctccacaagcgccaagagaattcagaaagaattagctgagatcacccttgatcctccccccaactgtagcgcaggtcctaagggcgacaatatctatgagtggcgcagcacaatcttgggacctccgggcagcgtgtatgaagggggggtctttttcctggacattacctttagcagcgattatcctttcaagccacccaaggtcactttccggacacgtatctaccattgcaacatcaactcccaaggcgtgatatgtctggatatccttaaagataattggagccccgcactcaccattagtaaggtgctgctgtcgatctgcagtctactgacagactgtaatccttag

SEQ ID NO: 164233 - DNA, 624 bp, Artificial Sequence
  derived and/or modified sequence
atgagcagtgaccggcagaggagtgatgatgagagccccagcaccagcagcggcagcagtgatgctgaccagagggaccctgctgcccctgagcctgaggagcaggaggagaggaagcccagcgccacccagcagaagaagaacaccaagctgagcagcaagaccacagccaagctgagcaccagcgccaagaggatccagaaggagctggccgagatcaccctggaccccccacccaactgcagcgctggccccaagggggacaacatctatgagtggaggagcaccatcctgggccccccaggctctgtgtatgaaggaggagtcttcttcctggacatcaccttcagcagtgactaccccttcaagccacccaaggtgaccttccgcacccgcatctaccactgcaacatcaacagccagggcgtcatctgcctggacatcctgaaggacaactggagccctgccctgaccatcagcaaggtgctgctgagcatctgcagcctgctgacagactgcaacccagctgaccccctggtgggcagcatcgccacccagtacctgaccaacagagctgagcatgacagaattgcccggcagtggaccaagagatatgccacctag

SEQ ID NO: 164234 - DNA, 528 bp, Artificial Sequence
  derived and/or modified sequence
atgagcagtgaccggcagaggagtgatgatgagagccccagcaccagcagcggcagcagtgatgctgaccagagggaccctgctgcccctgagcctgaggagcaggaggagaggaagcccagcgccacccagcagaagaagaacaccaagctgagcagcaagaccacagccaagctgagcaccagcgccaagaggatccagaaggagctggccgagatcaccctggaccccccacccaactgcagcgctggccccaagggggacaacatctatgagtggaggagcaccatcctgggccccccaggctctgtgtatgaaggaggagtcttcttcctggacatcaccttcagcagtgactaccccttcaagccacccaaggtgaccttccgcacccgcatctaccactgcaacatcaacagccagggcgtcatctgcctggacatcctgaaggacaactggagccctgccctgaccatcagcaaggtgctgctgagcatctgcagcctgctgacagactgcaacccctag

SEQ ID NO: 164235 - DNA, 624 bp, Artificial Sequence
  derived and/or modified sequence
atgagcagcgaccggcagcggagcgacgacgagagccccagcacctcatctggctcctccgatgccgatcaaagggatccggccgcaccggaaccagaggagcaggaagaacgcaaaccgtcggctacccagcagaagaagaataccaagttgagtagcaaaactacggccaagctgagcacatcagcaaaaagaatccagaaagaattagcagagattaccctggaccccccgcctaattgcagcgccgggcctaagggagataatatttatgaatggagaagcaccatcctgggccctcctggcagcgtttacgaggggggggtgttttttcttgatatcacgttttcgtcagactacccattcaagccaccaaaggtgactttccgtacccgcatctaccattgtaatattaatagccagggcgtgatttgcctggacattctgaaagataattggtccccagctctgacgataagcaaggtgttattgagcatctgctcattgctgacagactgtaaccccgcagaccctcttgtcggctctattgcgacacagtacctcactaacagggctgaacatgatcgcatcgccagacaatggactaagcgatatgcgacgtag

SEQ ID NO: 164236 - DNA, 624 bp, Artificial Sequence
  derived and/or modified sequence
atgagcagcgaccggcagcggagcgacgacgagagccccagcaccagctcgggcagctccgatgcggaccagagggatccagccgcacctgaacctgaagaacaagaggagcgcaagccctcagcaactcagcagaagaagaacaccaaactttccagtaaaactaccgccaagctttcaacaagcgccaagcgcatccagaaggaactcgccgagatcacacttgatccaccaccaaattgcagcgccggtcctaaaggagataatatttatgagtggcggtccaccattctagggccccccggatccgtatatgagggcggcgtgttttttctcgatattaccttctcatcggattaccctttcaaacctcctaaagtcaccttcaggactcgaatctaccattgcaacatcaattctcagggggttatctgcctagatatcttaaaggacaactggagcccggcgttgacaattagcaaggtgctcctctccatctgctctttgctgacagattgtaatcccgccgacccgctcgttggaagtatcgccacgcagtacctgaccaatagagcagaacacgatcgaatagcccgacagtggactaagcgctatgccacgtag

SEQ ID NO: 164237 - DNA, 624 bp, Artificial Sequence
  derived and/or modified sequence
atgagcagcgaccggcagcggagcgacgacgagagccccagcacctcctcaggaagtagtgacgcagatcagcgggatcccgctgcccccgaaccagaggagcaagaagagaggaagccgagtgctacacagcagaaaaaaaatacaaaactgtctagcaagacaaccgcaaagctttcgacctctgctaagagaatccagaaggaactggccgaaattacattggacccacccccaaattgcagtgcaggccctaaaggtgataacatctacgagtggcggagcaccattctgggccccccgggatccgtgtatgaaggaggggtttttttcctggacatcaccttctcatcggactacccctttaagccacccaaagtgacgttccgaaccaggatctaccactgtaacattaactcccagggggttatttgcctggatatactgaaggataactggtcgccagcactgaccatttccaaggtcctactcagcatatgctcgctgctgactgattgcaaccctgccgaccccctcgtgggcagtatagctactcagtacctaacaaacagagctgaacacgacaggattgcaagacagtggactaaacggtacgctacttag

SEQ ID NO: 164238 - DNA, 624 bp, Artificial Sequence
  derived and/or modified sequence
atgagcagcgaccggcagcggagcgacgacgagagccccagcaccagttcaggcagttccgatgccgaccagcgagatccagcagctcccgagcctgaggaacaagaggagcgaaaaccaagcgccacacagcaaaagaaaaataccaaactctcctccaaaaccacggcaaagctctcaacttcagccaagaggattcaaaaagaactggctgagatcaccctggacccaccacctaattgttcagcaggccctaaaggcgataacatttacgaatggagaagcaccattctcggtcctccaggctctgtttatgagggaggcgtcttcttcctggatatcaccttcagttccgactatccatttaaaccccctaaggtgacatttaggaccagaatttaccattgcaacattaattcccagggagtcatctgtttggacatactgaaagacaattggtctccagctctcactatcagtaaagtgctcttgtctatctgctcattgctcacagactgcaatccagccgacccgctcgtcggttctatagcaactcaatacttaactaatcgagcagaacacgatagaatagcccgccaatggactaaacgctatgcaacatag

SEQ ID NO: 164239 - DNA, 528 bp, Artificial Sequence
  derived and/or modified sequence
atgagcagcgaccggcagcggagcgacgacgagagccccagcacctctagcggctctagcgatgccgaccagagggacccggcagcacctgaacccgaggagcaggaggagaggaagcccagcgcgacccagcagaagaaaaatactaagctgtcctctaaaaccactgctaagcttagtacttccgcaaagagaattcaaaaggagctggctgagataactttagacccccccccaaattgcagcgctgggccaaagggggataatatttacgaatggaggagtaccattctgggaccacctggcagcgtctacgaaggcggcgtgttcttcctggatatcacattcagctctgattacccctttaagccacctaaagttaccttcaggacccgcatatatcactgcaatattaatagccagggggtaatatgtcttgacatcctaaaggataattggtcacccgctctgacgatcagtaaggtgctgctctcaatctgttctctgctgacagactgcaatccctag

SEQ ID NO: 164240 - DNA, 528 bp, Artificial Sequence
  derived and/or modified sequence
atgagcagcgaccggcagcggagcgacgacgagagccccagcacctcctcgggaagttctgacgctgatcagcgggacccagcagctccagagccagaggaacaggaagaacggaagccaagtgctacccagcaaaagaagaatacaaagttgagctccaagaccaccgcaaagctgtcgacctctgctaaacgcattcaaaaggagctggctgagatcaccctggaccctccacctaattgtagcgctgggcctaagggggataacatctacgaatggcgctctaccattctgggaccgccaggaagtgtctacgagggaggagtatttttcctcgacatcactttttcttccgactatcctttcaaaccccccaaagtgaccttcagaacgcggatttaccattgcaatatcaatagtcagggcgtcatttgtctcgacatccttaaggacaattggtctccagctctcaccatttcgaaagtgctgctgagcatctgttccctgcttacagattgcaatccttag

SEQ ID NO: 164241 - DNA, 528 bp, Artificial Sequence
  derived and/or modified sequence
atgagcagcgaccggcagcggagcgacgacgagagccccagcaccagcagtggctcaagcgacgcagaccaacgggacccggctgcacccgagcccgaggaacaggaggagcggaaacctagcgccacccaacaaaaaaagaatactaaactgagtagcaaaacaaccgccaaactgagcacctcagcaaaacgtatccaaaaagaactcgcagaaataactcttgacccccctcctaactgttccgccggtccaaagggtgataatatctacgagtggcgttctactatcttaggacctccgggctcagtgtatgagggaggtgtatttttcctggatatcacattctcgtctgactacccctttaaacctcccaaggtgacttttcggaccaggatctaccattgtaacattaactcacaaggcgttatctgcttagacattttgaaggacaattggtcacctgccctgactatttccaaggtgttgttatctatctgttcgctgctaactgattgcaacccgtag

SEQ ID NO: 164242 - DNA, 624 bp, Artificial Sequence
  derived and/or modified sequence
atgagcagcgaccgccaacgctccgacgatgagagcccatccaccagttcggggtccagcgacgcagaccaaagagaccctgccgctcctgagcccgaagaacaggaggaaagaaagccctccgcgactcagcagaagaagaacacaaagctgagctccaagaccactgcaaagctctctacttctgccaagagaatccagaaggaacttgccgagatcacgctcgacccccctccgaactgcagcgccggaccaaagggtgacaatatttacgagtggagatccactattctgggtccgcctggcagcgtctacgagggaggagttttcttcctagacatcactttttcttccgattaccccttcaaacctcccaaggtcaccttccggacacgcatttaccactgcaacattaactcgcaaggcgtgatctgtcttgatatcttgaaagacaactggtcaccagccttgacgatttccaaagtcctgctctcgatctgttctctgctgactgactgcaatcctgccgaccccttagtgggctccatagccacccagtatctgaccaatcgggctgagcatgatcggattgcaaggcaatggactaagcgctatgcaacgtag

SEQ ID NO: 164243 - DNA, 624 bp, Artificial Sequence
  derived and/or modified sequence
atgagctcagatcggcagcgatctgatgatgagagcccttctacctcttcagggtcctcagacgcggatcaaagagacccagccgctcccgaacctgaagaacaggaggaaagaaagcccagcgccacacagcagaaaaaaaacactaaattatcttctaagacaacagccaagctctcaacctcggccaaaagaattcaaaaagaattggcagaaatcaccctggaccctcctcccaattgctccgctggccctaaaggcgacaatatctacgaatggagatccactatattgggcccaccgggatcagtgtacgaggggggagttttttttctggacatcacattcagctctgattaccccttcaaaccccctaaggtcacgttccggactcggatataccattgcaacatcaattcacaaggcgtgatttgcctcgacattctgaaggacaactggtccccagctcttaccatttcaaaagttcttttgtctatctgtagcctactgacagactgtaaccccgctgatccactggtcggctctatcgctactcagtatctgacgaatcgggcagaacacgatcgaatcgcaagacagtggaccaaaaggtatgctacatag

SEQ ID NO: 164244 - DNA, 624 bp, Artificial Sequence
  derived and/or modified sequence
atgagcagcgataggcagcggtccgatgatgagtcccctagcacctcttctggctcctctgacgccgaccagagagaccctgctgcgcctgagccagaggaacaggaggagcgcaagccatccgccacacagcaaaaaaagaataccaaattaagtagcaaaaccaccgctaaactgtccacatcagctaagcggattcagaaagaactcgcagaaatcactctggatcctccacccaactgctctgcaggcccaaaaggcgacaacatctatgagtggaggagcaccattcttggaccacccggaagtgtctacgaggggggagttttttttcttgacattaccttcagctccgactatccattcaagccccctaaagtcacttttcgaacaaggatctaccactgcaacattaatagtcaaggcgttatttgcctcgacatactcaaggacaactggtcgcccgcattgacaatttcaaaagtccttctttccatctgctctctgctcacggactgtaatcccgcagatccgctcgtgggatccatcgctacacagtacttgaccaaccgggctgaacacgacaggattgctaggcagtggactaagagatacgctacgtag

SEQ ID NO: 164245 - DNA, 624 bp, Artificial Sequence
  derived and/or modified sequence
atgtcttctgaccggcagaggtccgatgacgagtcaccaagcactagcagcgggtcatctgatgcggatcaaagagatcctgctgccccagaaccggaggaacaggaagaacgtaagccatccgccacccaacaaaaaaaaaataccaagctcagcagtaagaccacagccaagctgagtaccagcgccaagcgcatccagaaggaattggcggaaatcactttagacccaccgccaaattgtagtgcgggacctaagggagataatatctacgagtggcgttctaccattttaggcccaccagggtctgtgtatgagggtggggtctttttcttagacatcaccttttcctccgactatcccttcaagccgcctaaagtgacattcagaacacgaatctaccactgcaacattaattctcaaggggtaatatgccttgatatcctgaaagataattggagtcccgcactcacaataagtaaagtgcttttgtctatctgttctctgcttaccgattgcaatcccgcagaccctttggttggatctatcgcaactcaatacctgaccaaccgggctgagcacgacagaatagctaggcaatggacaaaacgttacgccacttag

SEQ ID NO: 164246 - DNA, 528 bp, Artificial Sequence
  derived and/or modified sequence
atgagttctgatagacagaggagcgatgatgagagcccttcaacatcgtccgggagctccgatgccgatcagagggaccccgcagctcctgagcccgaggaacaggaagaacgcaaaccatccgcaacacagcagaagaagaatactaagctctcaagcaaaactactgcgaagttgtccacgtctgctaaaaggatccagaaagagttggccgaaatcactttggaccctcctccaaattgtagcgccggtcctaagggggacaatatttacgagtggcggtccaccatcctgggaccaccgggatcggtctatgagggtggtgtcttctttctcgacattacattctcttcggattatccctttaagcctcctaaggtaacttttcggactagaatttatcactgtaacatcaactcgcaaggtgttatttgtctcgatatcctgaaggacaattggtcccctgcgctaaccattagcaaggtactgctcagcatctgcagcctgctgacagattgtaatccttag

SEQ ID NO: 164247 - DNA, 528 bp, Artificial Sequence
  derived and/or modified sequence
atgagcagtgaccgtcagaggtctgatgacgagagtccctctaccagctctgggtcatccgatgctgaccagcgagacccggcagcccctgagccagaagagcaggaagagagaaagccaagcgctacccagcaaaagaagaacacaaagctgtctagtaagacgactgccaagctcagcacatcagcaaaacgaatacagaaggaactcgctgagatcactctcgatccccctccaaactgctccgccggtcctaagggggataatatttatgagtggcgcagcacaatcttgggccctcccggatctgtgtatgagggaggtgtgttcttcctggacatcacattttctagtgactacccattcaaaccaccaaaggtgacattccgaaccaggatttatcactgtaacatcaacagccaaggagtgatctgtttggacatcctaaaagacaactggtctcctgctcttactatctcaaaagtcctcctgtctatttgttccctgttgaccgactgcaacccctag

SEQ ID NO: 164248 - DNA, 528 bp, Artificial Sequence
  derived and/or modified sequence
atgagttctgatcgacagcggtccgatgatgagagcccaagcacaagttctgggagcagcgatgctgaccaaagagacccggcagccccagagccagaagagcaggaggaacgtaaaccatctgcaacacagcagaagaagaataccaaactgagttccaaaaccactgctaagttgagcacgtccgcaaagcggatccagaaggaactggccgagattacgctcgatccaccacctaactgttcggctgggccaaaaggagataatatatatgagtggagatcaactatcctgggacctcccggaagcgtctacgaaggcggagttttctttctcgacatcactttctcctccgactatccatttaagccgccaaaggtaacgtttagaacacgcatctatcattgtaatataaactcccagggagtgatttgtcttgatattctgaaagacaattggtccccagcccttacgattagcaaggttctgttgtccatctgtagcctgttgactgattgcaacccttag

SEQ ID NO: 164249 - DNA, 1377 bp, Artificial Sequence
  derived and/or modified sequence
gcaggggccagcccgccgggtccccgccgcgctctttgtcctggccgcgcgcgggcggacgcgtgcacccccagggtgaggggaggtgtggagagcgcgcacgggagcgcgcgggaacagctcgcgcccgccgggcgtcggcggcgcgcgcccctccgccaggcaagcagcgagcacgcgcgtcgccgccgagttttccaagagataacttcaccaagatgtccagtgataggcaaaggtccgatgatgagagccccagcaccagcagtggcagttcagatgcggaccagcgagacccagccgctccagagcctgaagaacaagaggaaagaaaaccttctgccacccagcagaagaaaaacaccaaactctctagcaaaaccactgctaagttatccactagtgctaaaagaattcagaaggagctagctgaaataacccttgatcctcctcctaattgcagtgctgggcctaaaggagataacatttatgaatggagatcaactatacttggtccaccgggttctgtatatgaaggtggtgtgttttttctggatatcacattttcatcagattatccatttaagccaccaaaggttactttccgcaccagaatctatcactgcaacatcaacagtcagggagtcatctgtctggacatccttaaagacaactggagtcccgctttgactatttcaaaggttttgctgtctatttgttcccttttgacagactgcaaccctgcggatcctctggttggaagcatagccactcagtatttgaccaacagagcagaacacgacaggatagccagacagtggaccaagagatacgcaacataattcacataatttgtatgcagtgtgaaggagcagaaggcatcttctcactgtgctgcaaatctttatagcctttacaatacggacttctgtgtatatgttatactgattctactctgcttttatcctttggagcctgggagactccccaaaaaggtaaatgctatcaagagtagaactttgtagctgtagattagttatgtttaaaacgcctacttgcaagtcttgcttctttgggatatcaaaatgtattttgtgatgtactaaggatactggtcctgaagtctaccaaatattatagtgcattttagcctaattcattatctgtatgaagttataaaagtagctgtagatggctaggaattatgtcatttgtattaaacccagatctatttctgagtatgtggttcatgctgttgtgaaaaatgttttaccttttacctttgtcagtttgtaatgagaggatttccttttaccctttgtagctcagagagcacctgatgtatcatctcaaacacaataaacatgctcctgaagg

SEQ ID NO: 164250 - DNA, 1556 bp, Artificial Sequence
  derived and/or modified sequence
tcacttggcgcccggcgcggcgagcgctacccgcggcccccgcgcggccctccccacaaagggccgcggagctgcgtggccgccgccgccggccgtggctcgcctccgcgggcgcggaaatttgttgcacttcttggggctttgtttatttgtttgttttttctctgggtttcttatttttttcgttattttggacaaaatgtcggtccgtgatataaaaattgagcgaggaaccttggtggcattgggagctttgcagaaggtgcagtttgaattctgcttttcccagggtggcagctcggtcttggccggatgaatcttcgctgctggccgtggaaacagctagagcagctcttttccaagagataacttcaccaagatgtccagtgataggcaaaggtccgatgatgagagccccagcaccagcagtggcagttcagatgcggaccagcgagacccagccgctccagagcctgaagaacaagaggaaagaaaaccttctgccacccagcagaagaaaaacaccaaactctctagcaaaaccactgctaagttatccactagtgctaaaagaattcagaaggagctagctgaaataacccttgatcctcctcctaattgcagtgctgggcctaaaggagataacatttatgaatggagatcaactatacttggtccaccgggttctgtatatgaaggtggtgtgttttttctggatatcacattttcatcagattatccatttaagccaccaaaggttactttccgcaccagaatctatcactgcaacatcaacagtcagggagtcatctgtctggacatccttaaagacaactggagtcccgctttgactatttcaaaggttttgctgtctatttgttcccttttgacagactgcaaccctgcggatcctctggttggaagcatagccactcagtatttgaccaacagagcagaacacgacaggatagccagacagtggaccaagagatacgcaacataattcacataatttgtatgcagtgtgaaggagcagaaggcatcttctcactgtgctgcaaatctttatagcctttacaatacggacttctgtgtatatgttatactgattctactctgcttttatcctttggagcctgggagactccccaaaaaggtaaatgctatcaagagtagaactttgtagctgtagattagttatgtttaaaacgcctacttgcaagtcttgcttctttgggatatcaaaatgtattttgtgatgtactaaggatactggtcctgaagtctaccaaatattatagtgcattttagcctaattcattatctgtatgaagttataaaagtagctgtagatggctaggaattatgtcatttgtattaaacccagatctatttctgagtatgtggttcatgctgttgtgaaaaatgttttaccttttacctttgtcagtttgtaatgagaggatttccttttaccctttgtagctcagagagcacctgatgtatcatctcaaacacaataaacatgctcctgaaggcatagtttcctgtcgtaa

SEQ ID NO: 164251 - DNA, 1570 bp, Artificial Sequence
  derived and/or modified sequence
gaacttgctgactgcgcggccgggaggagccgagccgggcggcggcggcgggaggctacagcgcgcgggggtctcccgcgtcccctccgcctcgccgggagctcgcgccctcgcccagccgagctcccacccccgcttttttccgaaggcgctgggcggcgccaccctccggccggagcccggcactgcacaaccccctccgactttcaatgttccacactccccggccagagcctcctcggcttctttttttccctccccccccttcccccccccacagctgcctccatttccttaaggaagggtttttttctctctccctcccccacaccgtagcggcgcgcgagcgggccgggcgggcggccgagttttccaagagataacttcaccaagatgtccagtgataggcaaaggtccgatgatgagagccccagcaccagcagtggcagttcagatgcggaccagcgagacccagccgctccagagcctgaagaacaagaggaaagaaaaccttctgccacccagcagaagaaaaacaccaaactctctagcaaaaccactgctaagttatccactagtgctaaaagaattcagaaggagctagctgaaataacccttgatcctcctcctaattgcagtgctgggcctaaaggagataacatttatgaatggagatcaactatacttggtccaccgggttctgtatatgaaggtggtgtgttttttctggatatcacattttcatcagattatccatttaagccaccaaaggttactttccgcaccagaatctatcactgcaacatcaacagtcagggagtcatctgtctggacatccttaaagacaactggagtcccgctttgactatttcaaaggttttgctgtctatttgttcccttttgacagactgcaaccctgcggatcctctggttggaagcatagccactcagtatttgaccaacagagcagaacacgacaggatagccagacagtggaccaagagatacgcaacataattcacataatttgtatgcagtgtgaaggagcagaaggcatcttctcactgtgctgcaaatctttatagcctttacaatacggacttctgtgtatatgttatactgattctactctgcttttatcctttggagcctgggagactccccaaaaaggtaaatgctatcaagagtagaactttgtagctgtagattagttatgtttaaaacgcctacttgcaagtcttgcttctttgggatatcaaaatgtattttgtgatgtactaaggatactggtcctgaagtctaccaaatattatagtgcattttagcctaattcattatctgtatgaagttataaaagtagctgtagatggctaggaattatgtcatttgtattaaacccagatctatttctgagtatgtggttcatgctgttgtgaaaaatgttttaccttttacctttgtcagtttgtaatgagaggatttccttttaccctttgtagctcagagagcacctgatgtatcatctcaaacacaataaacatgctcctgaaggcatagtttcctgtcgtaa

SEQ ID NO: 164252 - DNA, 909 bp, Artificial Sequence
  derived and/or modified sequence
cggccaagggcggcaggggccagcccgccgggtccccgccgcgctctttgtcctggccgcgcgcgggcggacgcgtgcacccccaggcggcgcgcgagcgggccgggcgggcggccgagttttccaagagataacttcaccaagatgtccagtgataggcaaaggtccgatgatgagagccccagcaccagcagtggcagttcagatgcggaccagcgagacccagccgctccagagcctgaagaacaagaggaaagaaaaccttctgccacccagcagaagaaaaacaccaaactctctagcaaaaccactgctaagttatccactagtgctaaaagaattcagaaggagctagctgaaataacccttgatcctcctcctaattgcagtgctgggcctaaaggagataacatttatgaatggagatcaactatacttggtccaccgggttctgtatatgaaggtggtgtgttttttctggatatcacattttcatcagattatccatttaagccaccaaaggttactttccgcaccagaatctatcactgcaacatcaacagtcagggagtcatctgtctggacatccttaaagacaactggagtcccgctttgactatttcaaaggttttgctgtctatttgttcccttttgacagactgcaaccctgcggatcctctggttggaagcatagccactcagtatttgaccaacagagcagaacacgacaggatagccagacagtggaccaagagatacgcaacataattcacataatttgtatgcagtgtgaaggagcagaaggcatcttctcactgtgctgcaaatctttatagcctttacaatacggacttctgtgtatatgttatactgattctactctgcttttatcctttggagcctgggaga

SEQ ID NO: 164253 - DNA, 752 bp, Artificial Sequence
  derived and/or modified sequence
ccaagggcggcaggggccagcccgccgggtccccgccgcgctctttgtcctggccgcgcgcgggcggacgcgtgcacccccagggtgaggggaggtgtggagagcgcgcacgggagcgcgcgggaacagctcgcgcccgccgggcgtcggcggcgcgcgcccctccgccagcggcgcgcgagcgggccgggcgggcggccgagttttccaagagataacttcaccaagatgtccagtgataggcaaaggtccgatgatgagagccccagcaccagcagtggcagttcagatgcggaccagcgagacccagccgctccagagcctgaagaacaagaggaaagaaaaccttctgccacccagcagaagaaaaacaccaaactctctagcaaaaccactgctaagttatccactagtgctaaaagaattcagaaggagctagctgaaataacccttgatcctcctcctaattgcagtgctgggcctaaaggagataacatttatgaatggagatcaactatacttggtccaccgggttctgtatatgaaggtggtgtgttttttctggatatcacattttcatcagattatccatttaagccaccaaaggttactttccgcaccagaatctatcactgcaacatcaacagtcagggagtcatctgtctggacatccttaaagacaactggagtcccgctttgactatttcaaaggttttgctgtctatttgttcccttttgacagactgcaaccc

SEQ ID NO: 164254 - DNA, 766 bp, Artificial Sequence
  derived and/or modified sequence
gccagcccgccgggtccccgccgcgctctttgtcctggccgcgcgcgggcggacgcgtgcacccccagggtgaggggaggtgtggagagcgcgcacgggagcgcgcgggaacagctcgcgcccgccgggcgtcggcggcgcgcgcccctccgccagttttccaagagataacttcaccaagatgtccagtgataggcaaaggtccgatgatgagagccccagcaccagcagtggcagttcagatgcggaccagcgagacccagccgctccagagcctgaagaacaagaggaaagaaaaccttctgccacccagcagaagaaaaacaccaaactctctagcaaaaccactgctaagttatccactagtgctaaaagaattcagaaggagctagctgaaataacccttgatcctcctcctaattgcagtgctgggcctaaaggagataacatttatgaatggagatcaactatacttggtccaccgggttctgtatatgaaggtggtgtgttttttctggatatcacattttcatcagattatccatttaagccaccaaaggttactttccgcaccagaatctatcactgcaacatcaacagtcagggagtcatctgtctggacatccttaaagacaactggagtcccgctttgactatttcaaaggttttgctgtctatttgttcccttttgacagactgcaaccctgcggatcctctggttggaagcatagccactcagtatttgaccaacagagcagaacacgac

SEQ ID NO: 164255 - DNA, 654 bp, Artificial Sequence
  derived and/or modified sequence
caatatgaagagctacggccaagttcatgcagtcacaggcaatgacaactatatcaccaatgctgcctggctgagagtgatttaagacatcattgattggaagttttccaagagataacttcaccaagatgtccagtgataggcaaaggtccgatgatgagagccccagcaccagcagtggcagttcagatgcggaccagcgagacccagccgctccagagcctgaagaacaagaggaaagaaaaccttctgccacccagcagaagaaaaacaccaaactctctagcaaaaccactgctaagttatccactagtgctaaaagaattcagaaggagctagctgaaataacccttgatcctcctcctaattgcagtgctgggcctaaaggagataacatttatgaatggagatcaactatacttggtccaccgggttctgtatatgaaggtggtgtgttttttctggatatcacattttcatcagattatccatttaagccaccaaaggttactttccgcaccagaatctatcactgcaacatcaacagtcagggagtcatctgtctggacatccttaaagacaactggagtcccgctttgactatttcaaaggttttgctgtctatttgttcccttttgacagactgcaaccctg

SEQ ID NO: 164256 - protein, 669 aa, Artificial Sequence
  derived and/or modified sequence
MARRGWRRAPLRRGVGSSPRARRLMRPLWLLLAVGVFDWAGASDGGGGEARAMDEEIVSEKQAEESHRQDSANLLIFILLLTLTILTIWLFKHRRARFLHETGLAMIYGLLVGLVLRYGIHVPSDVNNVTLSCEVQSSPTTLLVTFDPEVFFNILLPPIIFYAGYSLKRRHFFRNLGSILAYAFLGTAISCFVIGSIMYGCVTLMKVTGQLAGDFYFTDCLLFGAIVSATDPVTVLAIFHELQVDVELYALLFGESVLNDAVAIVLSSSIVAYQPAGDNSHTFDVTAMFKSIGIFLGIFSGSFAMGAATGVVTALVTKFTKLREFQLLETGLFFLMSWSTFLLAEAWGFTGVVAVLFCGITQAHYTYNNLSTESQHRTKQLFELLNFLAENFIFSYMGLTLFTFQNHVFNPTFVVGAFVAIFLGRAANIYPLSLLLNLGRRSKIGSNFQHMMMFAGLRGAMAFALAIRDTATYARQMMFSTTLLIVFFTVWVFGGGTTAMLSCLHIRVGVDSDQEHLGVPENERRTTKAESAWLFRMWYNFDHNYLKPLLTHSGPPLTTTLPACCGPIARCLTSPQAYENQEQLKDDDSDLILNDGDISLTYGDSTVNTEPATSSAPRRFMGNSSEDALDRELAFGDHELVIRGTRLVLPMDDSEPPLNLLDNTRHGPA

SEQ ID NO: 164257 - DNA, 2010 bp, Artificial Sequence
  derived and/or modified sequence
atggccagaagaggctggagaagagcccccctgagaagaggcgtgggcagcagccccagagccagaagactgatgagacccctgtggctgctgctggccgtgggcgtgttcgactgggccggcgccagcgacggcggcggcggcgaggccagagccatggacgaggagatcgtgagcgagaagcaggccgaggagagccacagacaggacagcgccaacctgctgatcttcatcctgctgctgaccctgaccatcctgaccatctggctgttcaagcacagaagagccagattcctgcacgagaccggcctggccatgatctacggcctgctggtgggcctggtgctgagatacggcatccacgtgcccagcgacgtgaacaacgtgaccctgagctgcgaggtgcagagcagccccaccaccctgctggtgaccttcgaccccgaggtgttcttcaacatcctgctgccccccatcatcttctacgccggctacagcctgaagagaagacacttcttcagaaacctgggcagcatcctggcctacgccttcctgggcaccgccatcagctgcttcgtgatcggcagcatcatgtacggctgcgtgaccctgatgaaggtgaccggccagctggccggcgacttctacttcaccgactgcctgctgttcggcgccatcgtgagcgccaccgaccccgtgaccgtgctggccatcttccacgagctgcaggtggacgtggagctgtacgccctgctgttcggcgagagcgtgctgaacgacgccgtggccatcgtgctgagcagcagcatcgtggcctaccagcccgccggcgacaacagccacaccttcgacgtgaccgccatgttcaagagcatcggcatcttcctgggcatcttcagcggcagcttcgccatgggcgccgccaccggcgtggtgaccgccctggtgaccaagttcaccaagctgagagagttccagctgctggagaccggcctgttcttcctgatgagctggagcaccttcctgctggccgaggcctggggcttcaccggcgtggtggccgtgctgttctgcggcatcacccaggcccactacacctacaacaacctgagcaccgagagccagcacagaaccaagcagctgttcgagctgctgaacttcctggccgagaacttcatcttcagctacatgggcctgaccctgttcaccttccagaaccacgtgttcaaccccaccttcgtggtgggcgccttcgtggccatcttcctgggcagagccgccaacatctaccccctgagcctgctgctgaacctgggcagaagaagcaagatcggcagcaacttccagcacatgatgatgttcgccggcctgagaggcgccatggccttcgccctggccatcagagacaccgccacctacgccagacagatgatgttcagcaccaccctgctgatcgtgttcttcaccgtgtgggtgttcggcggcggcaccaccgccatgctgagctgcctgcacatcagagtgggcgtggacagcgaccaggagcacctgggcgtgcccgagaacgagagaagaaccaccaaggccgagagcgcctggctgttcagaatgtggtacaacttcgaccacaactacctgaagcccctgctgacccacagcggcccccccctgaccaccaccctgcccgcctgctgcggccccatcgccagatgcctgaccagcccccaggcctacgagaaccaggagcagctgaaggacgacgacagcgacctgatcctgaacgacggcgacatcagcctgacctacggcgacagcaccgtgaacaccgagcccgccaccagcagcgcccccagaagattcatgggcaacagcagcgaggacgccctggacagagagctggccttcggcgaccacgagctggtgatcagaggcaccagactggtgctgcccatggacgacagcgagccccccctgaacctgctggacaacaccagacacggccccgcctag

SEQ ID NO: 164258 - DNA, 2010 bp, Artificial Sequence
  derived and/or modified sequence
atggcccgtagaggatggagacgcgcgccgttgaggagaggcgtaggttcgtctccacgggcccgcagactgatgcggcccctttggctgctcttggcggtcggtgtgttcgattgggctggggcgtccgacggtggtggaggtgaggcgagagcaatggatgaggagatcgtatcagaaaagcaggcagaagagtctcataggcaagattcagcaaacttattgatttttatcctgctcctcacgctgacaattttgactatttggttgtttaagcaccggcgcgctcggttcctgcacgaaaccggtctggctatgatctacggtttgctcgtgggcctggtattgcgctacggtatccatgtgccctccgatgtgaataatgtgactctgtcatgcgaagttcagtcttccccaacgaccctcctagtgacgttcgatcctgaggtcttttttaatatcctgcttcccccaattatattttacgccggctacagcctaaagagacggcacttctttagaaacctgggctctatactagcctacgcctttcttggaacagcaatatcctgttttgtgattggctccatcatgtacgggtgcgtgaccctgatgaaagtcactggtcagcttgcgggcgatttttactttacagactgtctgctcttcggtgcaatcgtaagtgccacagatcctgtcactgtcctggcaatcttccatgagcttcaggtggacgtcgagttgtatgcgctgctgttcggggaatcagtgctgaatgacgctgtcgccattgtcctgagcagcagcattgtggcctaccagccagcaggggacaactctcatacttttgatgttacagccatgtttaagagtatcggcatttttctcgggatctttagcgggtcttttgctatgggagccgcaacgggcgtcgttaccgctctcgttacgaaatttactaaactccgggaatttcaactgctggagacaggtctgtttttcctcatgtcttggtccaccttcctattagcagaggcttggggatttactggcgtggttgcagtcctgttctgtggcattacgcaagcgcattacacctataataacctgagtacggagagtcaacacaggactaagcagttatttgagttgctcaacttcctggccgagaatttcatcttctcatatatgggcctgactctgttcaccttccagaaccacgtatttaaccctacattcgtagttggggcgtttgtagctatctttttaggcagggccgctaacatataccctttgtccttactcctcaaccttgggagaaggtcgaagatcggatcaaactttcagcacatgatgatgttcgctgggctgcgcggggcaatggcttttgctctggccatacgggacaccgctacatatgcccgccagatgatgttctctaccacacttctgatcgttttttttactgtgtgggtgtttgggggtggtactaccgccatgctaagctgtctgcacattcgcgtcggggttgactcagaccaggaacacctgggcgtcccagaaaatgagcgtagaactaccaaagccgaatccgcatggcttttccgcatgtggtacaacttcgaccataattatctgaagcccctgttaacccactcaggaccacctctgacaacaaccctgcccgcctgttgcggtcccatcgcacgatgcctgacaagcccacaggcttacgaaaatcaagagcagctgaaagacgacgacagcgatctgattcttaatgatggagacatttcattaacatatggcgattccaccgtcaatacggagcccgccacttcgtcagccccccggagattcatgggcaacagttctgaagacgccctggaccgagagcttgcctttggcgatcacgaattggtgatacgaggcaccaggttagttcttccgatggacgatagcgagcctcccctgaacctcctcgacaacactcgccacgggccagcgtag

SEQ ID NO: 164259 - DNA, 2010 bp, Artificial Sequence
  derived and/or modified sequence
atggcccggcggggctggaggcgggcccccctgcggcggggcgtgggcagcagcccccgggcccggcggctgatgaggcccctgtggctgctgctggccgtgggcgtgtttgactgggccggggccagtgatggcggcggcggggaggcccgggccatggatgaggagatcgtgtctgagaagcaggccgaggagagccaccggcaggacagcgccaacctgctgatcttcatcctgctgctgaccctgaccatcctgaccatctggctgttcaagcaccggcgggcccgcttcctgcacgagaccggcctggccatgatctacggcctgctggtgggcctggtgctgcgctatggcatccacgtgcccagtgatgtgaacaacgtgaccctgagctgtgaggtgcagagcagccccaccaccctgctggtgacctttgatcctgaggtgttcttcaacatcctgctgccccccatcatcttctacgccggctacagcctgaagagaagacacttcttcaggaacctgggcagcatcctggcctatgccttcctgggcacagccatcagctgcttcgtcatcggcagcatcatgtatggctgtgtgaccctgatgaaggtgacaggccagctggccggggacttctacttcacagactgcctgctgtttggagccatcgtgtctgccacagatcctgtgacagtgctggccatcttccacgagctgcaggtggatgtggagctgtatgccctgctgtttggagagagcgtgctgaatgatgctgtggccatcgtgctgagcagcagcatcgtggcctaccagcctgctggggacaacagccacacctttgatgtgacagccatgttcaagagcatcggcatcttcctgggcatcttcagcggcagctttgccatgggcgccgccactggagtggtgacagccctggtgaccaagttcaccaagctgcgggagttccagctgctggagaccggcctcttcttcctgatgtcctggagcaccttcctgctggccgaggcctggggcttcaccggggtggtggccgtgctcttctgtggcatcacccaggcccactacacctacaacaacctgagcacagagagccagcacaggaccaagcagctgtttgagctgctgaacttcctggccgagaacttcatcttctcctacatgggcctgaccctcttcaccttccagaaccacgtgttcaaccccacctttgtggtgggcgcctttgtggccatcttcctgggccgggccgccaacatctaccccctgagcctgctgctgaacctgggccgccgcagcaagattggcagcaacttccagcacatgatgatgtttgctggcctgcggggggccatggcctttgccctggccatccgggacacagccacctacgcccggcagatgatgttcagcaccaccctgctgattgtgttcttcaccgtgtgggtgtttggaggcggcaccacagccatgctgagctgcctgcacatccgggtgggcgtggacagcgaccaggagcacctgggcgtgcctgaaaatgaaagaaggaccaccaaggccgagagcgcctggctgttcaggatgtggtacaactttgaccacaactacctgaagcccctgctgacccacagcggcccccccctgaccaccaccctgcctgcctgctgcggccccatcgcccgctgcctgaccagcccccaggcctatgagaaccaggagcagctgaaggatgatgacagcgacctgatcctgaatgatggagacatcagcctgacctacggggacagcacagtgaacacagagcccgccaccagcagcgccccccggcgcttcatgggcaacagcagtgaagatgccctggaccgggagctggcctttggagaccacgagctggtgatccggggcacccggctggtgctgcccatggatgacagcgagccccccctgaacctgctggacaacaccaggcatggccctgcctag

SEQ ID NO: 164260 - DNA, 2010 bp, Artificial Sequence
  derived and/or modified sequence
atggcccggcggggctggcggcgggcccccctgcggcggggcgtgggttcctccccccgggctcgaagactgatgaggccattgtggctgctgctcgcagttggagtgtttgattgggcaggtgcatctgacggagggggcggcgaggcgcgagccatggatgaggagatagtatcagagaaacaagccgaggagagtcaccgccaggactctgccaatctattgatctttatcctcctccttacgctgacaattctgaccatttggctgttcaaacatcgaagggcccgctttttgcacgagacaggtcttgccatgatttacggcctgctggtaggcctagttctacgatatggcatacacgttccaagtgatgtgaacaacgtgaccctctcctgtgaagttcagtcttccccgacaacattactggtaacctttgaccctgaagtctttttcaacattttgctccctcccataatattctatgcagggtattcattgaaacgacggcactttttcagaaatctaggctctatcctggcatacgcctttctcgggacagctattagctgcttcgtcataggtagtattatgtatgggtgcgtgacactcatgaaggtaaccgggcagttggccggcgatttttattttacggactgtctcctcttcggtgcaatcgtttcagctaccgatcccgtgaccgttctcgccatttttcacgagttacaagttgacgttgaactgtacgccttactgttcggggagagcgtcctgaatgatgccgttgccatcgttcttagcagttcaatcgtcgcctaccaacctgctggagacaacagccatacctttgatgtgaccgccatgtttaaatccatcgggatctttctgggcattttcagcggatcattcgcaatgggggcagccactggcgtggtgactgccttggtaacaaagttcaccaagttaagagagttccaactgcttgagacagggctgtttttcctgatgtcctggtcaacgttcctactggctgaagcgtggggcttcaccggggtcgtggctgtgttgttctgtggcatcacacaggcacactacacctataataacctctctaccgagagccagcacagaactaagcaactgtttgagctgctgaattttctggccgaaaacttcatttttagctacatgggtttaaccctctttaccttccagaaccacgtcttcaaccctacttttgtggtgggcgcctttgttgccatcttcctcggtcgggctgctaacatttatcctctgtccttgctgctcaacctcggacgaaggtctaagatcggttccaatttccagcatatgatgatgttcgcaggattgagaggagccatggcctttgctctcgcaattagagacaccgccacctatgctaggcagatgatgttcagcacaaccctgctgatcgtgtttttcactgtgtgggtgttcggcggtggaactacagctatgttaagttgtctgcacatcagggttggagtggacagtgatcaggagcacttgggtgtgcctgaaaatgaacggcggacaactaaagcagagtcagcatggctattccgtatgtggtataactttgaccataactatctgaagccgttattaacacatagcgggcccccactgacaacaaccctaccggcctgttgtggacctatcgcgcggtgccttacttcaccacaggcatacgagaatcaagagcagcttaaggatgacgacagcgacctaattctgaacgacggcgacataagcctgacgtatggcgactcaaccgtgaacaccgagccagcaacttcgtcagcacctcgcaggttcatgggaaatagctccgaggacgccctggatcgggagctggctttcggtgatcatgaattagtcatccgaggcactcgccttgttctgcccatggatgacagtgagccaccacttaatcttcttgacaacacgcggcacggtcctgcttag

SEQ ID NO: 164261 - DNA, 2010 bp, Artificial Sequence
  derived and/or modified sequence
atggcacggcgtggctggagacgggctcccttacgtcgcggagtagggtccagccccagagcgagacgattgatgcgcccactatggctcctgctggcagtgggcgttttcgactgggcaggtgctagtgacggcggtgggggagaggctagagctatggacgaagagattgtgtccgaaaagcaggccgaggaaagccatcgtcaggatagcgctaatctgctgattttcatactactcctcactctgacgattttgaccatctggctgtttaaacaccggcgtgcgaggttcttacacgagaccggacttgctatgatttatggcttgctggtggggctcgtgcttcgctacgggatccatgtgccaagcgacgttaataacgtaactctaagctgtgaggtacagagttcccccactacactgcttgtcacatttgacccggaggttttctttaatatccttctgcctccaattattttctatgccggttacagtttgaaacggagacacttcttcaggaatcttggatcaatactagcttatgcttttcttgggacagcaatcagttgttttgtcattggcagcatcatgtatgggtgtgtgactctaatgaaggtcactggacagttggctggggatttctacttcactgattgtttattatttggggctatagtcagtgctactgaccccgtgaccgtgttagccatctttcacgaattgcaagtggatgtggagctatatgcacttctttttggggagagcgttctcaacgatgcggttgcgattgtcctgagctccagtattgttgcttaccagccggctggcgacaactctcatacattcgacgtgacagccatgttcaagtcaatcggcatcttcctcggaatcttctccggatccttcgctatgggcgctgcaaccggcgtagtgactgcgctggtgactaaattcactaaactacgagaatttcagcttctggaaacgggtctcttttttttgatgagttggagtacatttttactcgctgaggcatgggggttcacgggcgtggtagccgtattattctgtgggataacccaggcccattacacttacaacaacctgtcaactgaatcacagcatagaacgaagcaattgtttgagctcctgaatttcctggctgaaaatttcattttctcttacatggggttaactctattcacttttcaaaatcacgttttcaatccaacctttgttgtgggagcttttgtagctatctttctcggcagggcggcaaacatctaccccctatctttgcttctgaacttgggccgtcgaagcaagataggctcaaacttccagcatatgatgatgtttgcaggccttcggggagccatggcgttcgctctggcaattagagataccgctacttatgctcggcagatgatgttcagcacaacactcctgattgtgttttttacagtatgggtgttcgggggagggactacagctatgttatcatgtcttcacattagagtcggcgtggatagcgaccaggaacatctgggagtgccggaaaatgagagaagaaccactaaagccgagagcgcatggctgtttcgcatgtggtacaattttgatcacaattacttaaagccactcctgacgcattccggccctccattgaccacaacactaccagcctgctgcgggcctattgcacggtgtctgacatcacctcaagcctacgaaaaccaggagcagctcaaagacgatgacagtgatctcattctcaatgacggagacatttcacttacttatggggattctactgtaaatactgagccagcaacttcatctgcaccgaggcgatttatgggcaactcttctgaggacgctctcgaccgagagctagctttcggagatcatgaactggtcatccgcggtacacgtctcgtgctgcctatggacgatagtgagcccccactcaatcttcttgacaacacacggcatgggccagcttag

SEQ ID NO: 164262 - DNA, 4585 bp, Artificial Sequence
  derived and/or modified sequence
cgccggtgaggtaggggcgggaggcggggggagacatggctcggcgcggctggcggcgggcacccctccgccgtggcgtcggcagcagtccccgagcccgcaggctcatgcggcccctttggttgctcctcgcagtgggcgtctttgactgggcaggggcttcggacggcggcggcggagaggctagagccatggacgaggagatcgtgtccgagaagcaagccgaggagagccaccggcaggacagcgccaacctgctcatcttcatcctgctgctcaccctcaccattctcacaatctggctcttcaagcaccgccgggcccgcttcctgcacgaaaccggcctggctatgatttatggtcttttggtgggccttgtgcttcggtatggcattcatgttccgagtgatgtaaataatgtgaccctgagctgtgaagtgcagtcaagtccaactaccttactggttacttttgatccagaagtatttttcaacatattacttcctcctatcatattttatgcaggttatagcctgaaaaggagacatttttttcgaaatcttgggtctatcctagcatacgcttttcttggaacagcaatttcttgtttcgttattgggtcaataatgtatggctgtgtaacgctgatgaaggtaacgggacaacttgcaggagatttttactttacagattgcctactgtttggtgccattgtatcagcaactgatccagtgactgttcttgctatattccacgagcttcaagttgatgttgaactctatgcacttctttttggtgaaagtgtcctcaatgatgctgttgccatagtgctgtcctcctcaatagtggcataccagccagctggagacaacagtcacacctttgatgtcacagcgatgttcaagtctattgggatcttccttggaatcttcagtggatcttttgcaatgggtgctgctactggagtggtgacagctttagtgacaaagttcaccaaattacgggagttccagttgttggagacaggcctgttcttcttgatgtcctggagtaccttcctcttggctgaagcatggggcttcacaggtgtagttgcagtattgttttgtggcatcacacaagcacattatacgtataataatttgtccacggagtctcagcatagaactaaacagttgtttgagcttctcaatttcttggcagagaatttcatcttctcctacatggggctgacactgttcaccttccagaaccatgtctttaacccaacatttgtagtaggagcatttgttgctattttcttgggaagagctgccaatatttaccccttgtccctcttacttaatttgggtagaagaagtaagattggatcaaattttcaacacatgatgatgtttgctggccttcgtggtgcaatggcatttgccttggccattcgagatactgccacttatgcacggcaaatgatgttcagcaccacgcttctgattgtgttttttaccgtgtgggtatttggtggtggcaccactgcaatgctgtcatgcttgcatatcagggttggtgttgattcagaccaagaacacttgggtgttcctgaaaatgaaaggagaactaccaaagcagagagtgcttggcttttccggatgtggtacaactttgatcataactatctgaagcctctgctgacccacagcgggcctccgctgacaacaacactccctgcctgctgtggacccatcgccaggtgcctcaccagcccccaggcttacgaaaaccaggaacagttgaaagatgatgattctgatcttattctcaatgatggtgacatcagtttgacatatggagattctactgtgaacactgaaccggccacatccagcgccccaaggagatttatgggaaacagttctgaagatgccttggatcgggagcttgcatttggggaccatgaactggtcattcgaggaacacgcctggttcttccaatggatgattctgaacccccgctaaatttgttagataatacgagacatggtccagcctaagcttactaatactcacttagtgatttgtaaaatttgcacatgtgattgtgaagaaatttgtactacctaaaagtcccagtgcatgtctctgaatgtgtaagctatataaatgctatttatatggcatagaaagaatataaatatcctgtacacggcagattgtgaacaaactatattcctttaagttttcctggttgcactctgtagactggatctgttttaggaagttactttcacagtgatgttgtgtgttctgttagttttatgtctcagttaaagtgtaaaaagtgacggattttctctttcttaaacttacctgacacttaaccagagtaccagttctcgtgatgtgaattaatttttttgtgtgctaggggagggagagtgaggagggagtgttatttccttgggaacctagggaggagaggttcctttgttgggaaacttttgttgatagctgctgcctttgtcctgatcgttttctttcccttttctctggtggcctgttgtggtgcaacgagctgatggcatttgatcttgccccattcaggttggggagtgaagtgtgaggacccttttcccccgcttgctgtgaaagcacagattcattgactacagtacactgttgttcagaaaagaaggctgcaaatgacttctgagactttatgtcttttcttccagaccaagaccgtagaaggagtcacatctagccggcttagccaaagtacaggtgtatatagttcagggcacttgatttagatttggaggggctggggtgggcagagagcaagaggcgagtaaagagaatggtggtttcagagatctctcttcccaaatgtgtaaatattctataccagataagtttaaataagaaatttaattgctgcttaatttttgattatgtactttatctgtatagcaggctttgtcgtcagaagtttttatatcgatttaaattgctgctctttagcagccaaacaggagcaaaatgtaaaatttttgaacttactgtgtctaatcatcatttgttagtctgtagttaatgtcaacagttaatttatgaacccacgatcgttccacactgcaccaaagtcagtcataagagaaatcgaatattctggagcactgattgcagcagggtggctcctttgtgtgcagcaggtgtagtagtcttcattttcatggtacgttttaatattaattacctaagctgccatgcatttttttttttacagttctcaaggaagagcacagaacaatttctcatttcatatttggagtatgaaagtagattctattttgtaatgctgataatacctaaagatgcattgaatgcttggaagaatgctttttgatgttgattttgacctgttcatgattcagaagaaaaacaaacttttttggattttttttccctcaggtctgagtagcattgccttaaatcttatccagttagaacattgatttatttacatgatgttcagattttccagtgaaaaatacccttctgaacaaaacatgtacttactctccgaaaggcatctatctgtgctattgcaaacactccttgagattttaggggaattctaatgttgtaccctttcgtggcagctttgactgttggcatagccatttgttatgtagtggtagcgactttcctgctatgcaggaatccctcccatgacgtgtatgttttacatgatgtgtgcctcttcacgcagtaaatagtttcttgttaatgtatgtttgaggagtttgaacgtcagtgtcacttacccacaaagttattcaagttgtaaaaggttatacaataatttaacaactaccttttttattctgtcgggttactgacctcactttatgtaaatacttcgcatgacaaattcagtaactcgtctatttcagcatgcataagacttttcactagggaaactgataaagcttgagtcaactaaatctgccttcatactttatcaaggggaaccaagcctgctgtgcttacatcagcatctggaagactttcctctcctctaatctgtgtacacatctccaagcaaggaagaaaaaacaaactctgctcagacgcctatgaaacacctgaatgaactttgatgaagtacagtctgagttaccatcatgcacaagtagaactgctcttggacttgttttcctgttgtttgtggaacctacgcgtttgaatggcttgaacgttgcatcttttaaagttattttttaaggtttcttggcatttatcctagttgtccgtgtttggcaatgtgctgttaaagtaatagacttttaatctttatgtattttttgttttctctggagtacttggacagatgttatagtggtttcttttaggaaaatctgtcattaaaaaagttatagccttgcaaataaccactcacagtatttgagtcacagtttattttagtgagacgtaaagagtgctgacttcatttatttttctacctatatacctagtggaaaaggggaagactaatgttttcaaataaacaaacagaaacctaacagaa

SEQ ID NO: 164263 - protein, 374 aa, Artificial Sequence
  derived and/or modified sequence
MSVPAFIDISEEDQAAELRAYLKSKGAEISEENSEGGLHVDLAQIIEACDVCLKEDDKDVESVMNSVVSLLLILEPDKQEALIESLCEKLVKFREGERPSLRLQLLSNLFHGMDKNTPVRYTVYCSLIKVAASCGAIQYIPTELDQVRKWISDWNLTTEKKHTLLRLLYEALVDCKKSDAASKVMVELLGSYTEDNASQARVDAHRCIVRALKDPNAFLFDHLLTLKPVKFLEGELIHDLLTIFVSAKLASYVKFYQNNKDFIDSLGLLHEQNMAKMRLLTFMGMAVENKEISFDTMQQELQIGADDVEAFVIDAVRTKMVYCKIDQTQRKVVVSHSTHRTFGKQQWQQLYDTLNAWKQNLNKVKNSLLSLSDT

SEQ ID NO: 164264 - DNA, 5051 bp, Artificial Sequence
  derived and/or modified sequence
agttcccttttccggtcggcgtggtcttgcgagtggagtgtccgctgtgcccgggcctgcaccatgagcgtcccggccttcatcgacatcagtgaagaagatcaggctgctgagcttcgtgcttatctgaaatctaaaggagctgagatttcagaagagaactcggaaggtggacttcatgttgatttagctcaaattattgaagcctgtgatgtgtgtctgaaggaggatgataaagatgttgaaagtgtgatgaacagtgtggtatccctactcttgatcctggaaccagacaagcaagaagctttgattgaaagcctatgtgaaaagctggtcaaatttcgcgaaggtgaacgcccgtctctgagactgcagttgttaagcaaccttttccacgggatggataagaatactcctgtaagatacacagtgtattgcagccttattaaagtggcagcatcttgtggggccatccagtacatcccaactgagctggatcaagttagaaaatggatttctgactggaatctcaccactgaaaaaaagcacacccttttaagactactttatgaggcacttgtggattgtaagaagagtgatgctgcttcaaaagtcatggtggaattgctcggaagttacacagaggacaatgcttcccaggctcgagttgatgcccacaggtgtattgtacgagcattgaaagatccaaatgcatttctttttgaccaccttcttactttaaaaccagtcaagtttttggaaggcgagcttattcatgatcttttaaccatttttgtgagtgctaaattggcatcatatgtcaagttttatcagaataataaagacttcattgattcacttggcctgttacatgaacagaatatggcaaaaatgagactacttacttttatgggaatggcagtagaaaataaggaaatttcttttgacacaatgcagcaagaacttcagattggagctgatgatgttgaagcatttgttattgacgccgtaagaactaaaatggtctactgcaaaattgatcagacccagagaaaagtagttgtcagtcatagcacacatcggacatttggaaaacagcagtggcaacaactgtatgacacacttaatgcctggaaacaaaatctgaacaaagtgaaaaacagccttttgagtctttctgatacctgagtttttatgcttataatttttgttctttgaaaaaaaagccctaaatcatagtaaaacattataaactaaaaaaatttgcctagtctggacagttattgtctcaaatttatactaaaatcacaaactccagaggatatgaagtaataaattacaaggggtcacaatgtctgtcatacaatacataaattctgttctttaaaaaaggatattgaagaagcaatgagcactttaaagaaaggataatatacagagagaagacagaagtagagtaatacaatttcttcacattagaaaaacttggaaaagcaaagacaaactgtagagctttaaatacaacagtcattttattctagtaaaaactataccagaatttcagttacataatttcactactgaaagcacttatctacattattttaatctgttgtttttttccaacgtctcttctgcttttcttttctttggctggttgtcattttctaaacttagtaaattttcacttttatttagttgattcgtaatgaggctctgccagtcatcatcaccagaagtatttttagtcgtcttgattgcctgcaaatggctttgtagtggagttgatatcagaggctttgttttcacctgggaaagataaactaattttaccttcgaaattattatacaaaagattttaaagagtctgtaaagcctctgcagttatgagtatgtggtaaaaccaccatctcttggctgatttccactaccttagtagttctggcaccagaaaagtatacaatgtgaatgtgtaggcttatgtagtagatcttcaaaatctctaatatataactgaagtaaagtgtacaaaaactgccttttactacttcatgtttcctcccatgcttcagaacaccattgttgaagaaacaggaagggcagtgagatatttggaagttggcatgttttcaagacactgtattgggtaattttaaaaatagtgtgttaaataactttttcattttaaggttcttttctgatgttaaaatacttactggaaatttagaaaatagagtaaagtagaaagaaactaaaaatcattagtaatcccttatccagagaggcttgttgacattttggtattatttgctgctagcgtttttttctatttttagcctatttgatcattctatagaattttatgtattttcctctgtgagcagtttcttaggtcattaaaaacaattgtctatggctgcaaaatactcccttttatggatgtttgatatatctcctactactgaatgtttgtttccagtttatccctaccaaaaattaattcgagttaatttcatgcaaaacaatctttgatgtttttgagagattcccagataaaattttctcttcaaaaggaatactgggccaggcactgtgactcatacctgtaatcccagcactttgggaaactgaggcgagtggattgcatgagctcaggagtcgaaaactagcctgagcaacatggcaaaaccccatctctaccaaaaattagctgggcatggtggcatgcaactgtagtcccagctcctcggagggctgaggtgcaaggatcatttgagcccaggaggtgaaggttgcaatgagccaagatcatgccattgcactccagcctggacaacagagtgagaccctctctcaaaaataaataatagataaaacaaaaggaatactgaattgttttcaaaataacaattatggtgggctttcttttaagatagggtctcaccctgtcacctaggctggagtgcagtggcacaatcacagctcattgcagccttgacctccctggattcaggtgatcctcccaccttcacctcctgagtaccttggactacaggcatgtgccaccacacccaggtaatttttgtattttttgccatgttgcccaggctggtctctcttaactcttgggctcaagtgatctgaccatctcggtctcccaaagttctaggattacaggagtgagccatactgtgttgtgttttagttgaaagggatatacacgtgtattttagaaatatgaaacaggataagaattacattaaaatcacccaagatcccaaccaccattaaagagtttgtgtaaatcttctggtctcttttctgtatacactttttaaatactggggtcatatttttattggtttatatgctatgttaaacatttttagcatttcctcctgttcttaagtctgttaagaggatagctccatcatattctgtgttctgcaaattatttctggacatttaaattgtaagaaaatggtcactgttaactaggctgcagtgattatcatttgttcataaatctttgtgaagatctttgggtactgccttacattaaaatctttttcaatttgaccagtaaaagtggcatgttagtaacattgtcattttcagtgttagattatgtagtactaagtttattttattttatttttgagacagagtcttgcactgtcgcccaggctggagtgcagtggcgccatctcagctcactgcaacctccacctcccaggttcaagcgattcttctgcctcagcctcccgagtagctgggattacaggcacccaccacgatgcccagctaattttttgtatttttagtagagacagggtttcactatgttgtccaggctggtctcgaacgcctgacctcatgatccacctgcctcggcctcccaaagtgttgggattacaggcatgagccaccctgcccgacctagtaatacttttttttttttttttttttaatgaacttaaatgtttagaatggtaagttcacggctccctaaggagtgttccttttggattgctctgtttggctccctccctgaaatcctatagtcagccactggtcccctcagagagttttacctctgatctttggggtgattctttgttcatatttatctgattggctttgttcttccaaaagtgtctgcacaggactgctaagagaacctaggcaagtcatttaatttttctgggcttcagtttactcattagcttcttttagttcccagatgctattactggaaagaataactagtaatggataaaaacctacataaatatttcctattttgccatcaaagtgctgggttcattttggtgtatttggcatccaagtacaaattaacagtttcccaaaatcctgattctttgacttttttatcttgatgatggaaaggaaggacacgtttacttgctttagtttctttccccttaactacccacttgctgagaggggtaggagcagggattggctttagagaaacaagatacagtgtagattagctaatgtttgcgcttaacaaaacttgtcctgtttaacttacctgagggttctgcagcctaccgcagtaattttagttctagctgttttcagatatattgccttgtatcttcgttctttcgtctcctatcctttttagaaatttatcacctgtttctctttcagcctgacttacaaaatctaatttttggcctaaaaatttcccctagcttggtactagtccttttatttctgcctgtgattatattttaaaattaaacttaaatgaatctaattcattggatatataaaaaaaaaagtaagtggcttgctttgcttactctggttttccatcctcattcctggatataatcaagattgcagtaggctaacaatctaatgctgaaaacaagaatgaaaaacataccatcttttcaagttactttggacccatagagagaaagtggattggtacttaataccttccctgaatttaacagaattgatgtggactgtacataaaatatgttgaaaaataaaactatttttttggctat

SEQ ID NO: 164265 - DNA, 1125 bp, Artificial Sequence
  derived and/or modified sequence
atgagtgtgcctgcttttatcgatatcagcgaggaggatcaggccgctgagcttcgtgcctaccttaaatctaaaggtgccgaaatttccgaggagaactccgaaggcggactgcatgtcgacctggctcaaatcatcgaggcctgtgatgtctgtctgaaggaagatgacaaagatgtagaatcagtgatgaacagtgtagtgtcgctgctgctcattcttgagcctgataagcaagaggcactgatcgagagcctgtgcgaaaaattagttaaattcagagagggcgaacggccatctctgcgcctgcagctgcttagcaaccttttccatggtatggacaagaacacacccgttcggtacactgtatactgcagcttgattaaagtggccgctagttgcggcgccattcagtacatccccacagaactggaccaggtgaggaagtggataagcgattggaacttgaccactgagaagaagcacacgctcctacgacttctgtatgaggcactagtggactgcaaaaaaagtgatgccgcaagtaaagttatggtagagttgttaggctcttacaccgaggataacgccagtcaagcgcgtgttgacgctcacagatgtattgtgcgggcactgaaggacccaaatgccttcctgtttgaccacttgctcacgcttaaacctgttaagttcttagagggtgaactaattcatgaccttctcactattttcgtttccgcaaagctggccagctacgtgaaattttatcaaaacaacaaggatttcatcgacagcctgggcctactccacgagcagaatatggcgaagatgcggctgttaactttcatggggatggccgttgaaaataaggaaatttcatttgataccatgcaacaggagctgcagatcggagcggacgacgtcgaggccttcgtgattgacgcagttcgaacaaagatggtgtactgtaagatagatcagacccagcggaaagtggtggtttctcatagcactcataggaccttcggaaagcagcagtggcagcagctgtatgacaccctgaatgcctggaagcagaatctgaataaggttaaaaactcactgctgagcctgtctgacacctag

SEQ ID NO: 164266 - DNA, 1125 bp, Artificial Sequence
  derived and/or modified sequence
atgtctgtgcctgccttcatcgacatcagcgaggaggaccaggccgctgagctgcgggcctacctgaagagcaaaggagctgagatcagcgaggagaacagcgagggcggcctgcacgtggacctggcccagatcatcgaggcctgtgatgtgtgcctgaaggaggatgacaaggatgtggagagcgtgatgaacagcgtggtgtccctgctgctgatcctggagccagacaagcaggaggccctgattgagagcctgtgtgagaagctggtgaagttccgggagggggagcggcccagcctgcggctgcagctgctgagcaacctcttccacggcatggacaagaacacccctgtgcgctacacagtgtactgcagcctcatcaaggtggccgccagctgtggggccatccagtacatccccacagagctggaccaggtgaggaagtggatcagtgactggaacctgaccacagagaagaagcacaccctgctgcggctgctgtatgaggccctggtggactgcaagaagagtgatgctgccagcaaggtgatggtggagctgctgggcagctacacagaggacaatgccagccaggcccgggtggatgcccaccgctgcatcgtgcgggccctgaaggaccccaatgccttcctgtttgaccacctgctgaccctgaagcctgtgaagttcctggagggggagctgattcatgacctgctgaccatctttgtgtctgccaagctggccagctatgtgaagttctaccagaacaacaaggacttcatcgacagcctgggcctgctgcacgagcagaacatggccaagatgaggctgctgaccttcatgggcatggctgtggagaacaaggagatcagctttgacaccatgcagcaggagctgcagattggagcagatgatgtggaggcctttgtgattgatgctgtgaggaccaagatggtgtactgcaagattgaccagacccagaggaaggtggtggtgagccacagcacccacaggaccttcggcaagcagcagtggcagcagctgtatgacaccctgaatgcctggaagcagaacctgaacaaggtgaagaacagcctgctgagcctgagtgacacctag

SEQ ID NO: 164267 - DNA, 1125 bp, Artificial Sequence
  derived and/or modified sequence
atgagcgtgcccgccttcatcgacatcagcgaggaggaccaggccgccgaactgagagcatacctgaagagtaaaggggcagagatctcagaagagaactcggaggggggcctgcacgtagatctggcccagattatcgaagcatgcgatgtttgcctcaaagaggacgacaaagatgtggaatccgtgatgaattccgtcgtcagcctgctactgatcttagagccggacaagcaggaggccctgattgagtctctgtgtgaaaaactggtgaaatttcgagaaggagagcgaccttcgctgcggctgcagctacttagcaacttatttcatggtatggataaaaatactccagtgaggtacacagtgtattgctcactgatcaaagtcgcagcctcctgtggggccatccagtatatcccgacagaacttgatcaagttcgaaaatggatcagcgattggaatctgaccacagaaaagaaacataccttgctgaggctgttgtacgaagccctggtggattgcaagaaaagcgacgccgcatccaaggttatggtggaattattaggcagctacaccgaggacaatgcgtctcaagctcgggtggacgctcacaggtgcatcgtgagggccctgaaagaccccaacgcctttctgttcgatcacctcctgaccctgaagcctgtgaagttcttggaaggagagttaatccacgatcttttgacaattttcgtttccgccaaactcgcctcttatgtcaaattttaccagaacaacaaggacttcatagacagcctgggactccttcatgagcagaatatggctaagatgaggctcctgacatttatgggcatggcagtggagaacaaagaaatctcatttgatactatgcagcaggagttacagattggtgccgacgatgtggaagcctttgtaattgacgctgttagaacaaagatggtgtattgtaagatcgaccagactcaaaggaaagtggttgtgagtcatagcacccaccggaccttcggaaagcagcagtggcagcagctatacgacactcttaatgcctggaagcagaaccttaataaggtgaaaaattcactcctgagcttgagcgatacctag

SEQ ID NO: 164268 - DNA, 1125 bp, Artificial Sequence
  derived and/or modified sequence
atgagtgtgccggcatttatcgatatttctgaagaagatcaggcagccgaactaagagcgtacctgaaatctaagggcgctgagatctcggaggagaacagtgaagggggactgcacgtggatctcgcccagattatcgaagcctgtgacgtgtgcctgaaagaagatgacaaggacgttgaaagtgtcatgaacagcgtggtgtccttactgcttatcttggagccagacaaacaagaagctctgattgagagtctttgcgagaagctggtgaagtttagggaaggagagagaccatccctgaggctgcagctgttatcaaatctctttcacggtatggacaaaaacacccctgttaggtacactgtgtactgctcactaatcaaagtggccgcatcctgcggagctatacagtacatccctactgagcttgaccaggtgcggaaatggatcagtgactggaacttgactaccgaaaagaagcatacacttttgcggctcctctatgaagcgttggtcgattgcaagaagagcgacgctgcctccaaagtgatggtcgaattgctgggaagctatacagaggacaacgcctcacaggcacgcgttgacgctcacaggtgtattgttagagcgttaaaagaccctaacgcatttctgttcgatcatctgctgaccttgaaacctgtgaaatttctagagggagagcttattcatgacttactgacaatctttgtgagcgctaaactggccagctacgtcaagttctaccagaacaataaggattttatcgatagcttgggacttctgcatgaacaaaatatggcaaaaatgagacttctgacttttatgggcatggctgtggagaataaggagataagcttcgataccatgcagcaggagctccagatcggagctgacgatgtggaagccttcgttatcgacgctgtccggactaagatggtgtattgtaaaattgatcagacccaaaggaaggtagtcgtctcacattcaacccatcggacattcggtaaacaacagtggcagcagttgtacgacaccttgaacgcttggaaacagaatttgaataaagtgaaaaactcccttctctctctgtctgatacctag

SEQ ID NO: 164269 - DNA, 1125 bp, Artificial Sequence
  derived and/or modified sequence
atgagcgtgcccgccttcatcgacatcagcgaggaggaccaggccgccgagctgagagcctacctgaagagcaagggcgccgagatcagcgaggagaacagcgagggcggcctgcacgtggacctggcccagatcatcgaggcctgcgacgtgtgcctgaaggaggacgacaaggacgtggagagcgtgatgaacagcgtggtgagcctgctgctgatcctggagcccgacaagcaggaggccctgatcgagagcctgtgcgagaagctggtgaagttcagagagggcgagagacccagcctgagactgcagctgctgagcaacctgttccacggcatggacaagaacacccccgtgagatacaccgtgtactgcagcctgatcaaggtggccgccagctgcggcgccatccagtacatccccaccgagctggaccaggtgagaaagtggatcagcgactggaacctgaccaccgagaagaagcacaccctgctgagactgctgtacgaggccctggtggactgcaagaagagcgacgccgccagcaaggtgatggtggagctgctgggcagctacaccgaggacaacgccagccaggccagagtggacgcccacagatgcatcgtgagagccctgaaggaccccaacgccttcctgttcgaccacctgctgaccctgaagcccgtgaagttcctggagggcgagctgatccacgacctgctgaccatcttcgtgagcgccaagctggccagctacgtgaagttctaccagaacaacaaggacttcatcgacagcctgggcctgctgcacgagcagaacatggccaagatgagactgctgaccttcatgggcatggccgtggagaacaaggagatcagcttcgacaccatgcagcaggagctgcagatcggcgccgacgacgtggaggccttcgtgatcgacgccgtgagaaccaagatggtgtactgcaagatcgaccagacccagagaaaggtggtggtgagccacagcacccacagaaccttcggcaagcagcagtggcagcagctgtacgacaccctgaacgcctggaagcagaacctgaacaaggtgaagaacagcctgctgagcctgagcgacacctag

SEQ ID NO: 164270 - protein, 284 aa, Artificial Sequence
  derived and/or modified sequence
MEPGNYATLDGAKDIEGLLGAGGGRNLVAHSPLTSHPAAPTLMPAVNYAPLDLPGSAEPPKQCHPCPGVPQGTSPAPVPYGYFGGGYYSCRVSRSSLKPCAQAATLAAYPAETPTAGEEYPSRPTEFAFYPGYPGTYQPMASYLDVSVVQTLGAPGEPRHDSLLPVDSYQSWALAGGWNSQMCCQGEQNPPGPFWKAAFADSSGQHPPDACAFRRGRKKRIPYSKGQLRELEREYAANKFITKDKRRKISAATSLSERQITIWFQNRRVKEKKVLAKVKNSATP

SEQ ID NO: 164271 - DNA, 855 bp, Artificial Sequence
  derived and/or modified sequence
atggaaccaggaaattatgccacacttgatggagccaaggacatcgaggggctgctaggagcaggtggaggccggaatctcgtggcccacagcccactaacctcccaccccgcagctcctaccctgatgcctgccgtgaattacgccccactcgacctccccggatcggctgagcccccaaagcagtgccacccctgtccgggagtgccacaggggacttcccctgctcccgtgccctacggctacttcggcggaggctactactcatgtcgagtctccagatccagcctgaaaccgtgcgctcaggctgccacattggctgcctaccctgctgaaacccccactgccggcgaggaatatccttcccgacctaccgaatttgcattttacccaggttacccaggcacgtatcagccgatggcttcatatcttgacgtgagtgtggtgcagacactcggtgcccccggggagccaaggcatgacagtctacttccagttgattcttaccaatcatgggccctcgccggcggctggaattcacaaatgtgctgccaaggggagcagaatccaccagggcccttctggaaagccgcctttgcagactcgagtggccaacaccctccagacgcctgtgcgtttcggaggggccgaaagaaacgcattccgtattctaagggccagctacgggaactagagcgagagtacgctgcaaacaaatttattaccaaagacaaacgtaggaagatttctgcagctacatctctgagcgaacgccagatcaccatttggttccagaaccggcgcgtgaaagagaaaaaggtcctggcaaaggtgaaaaacagcgcaaccccctag

SEQ ID NO: 164272 - DNA, 3467 bp, Artificial Sequence
  derived and/or modified sequence
aggagacagaaagctagggagggagaggaggagaaggaggtggggcccggctcctcgtcccctcttcctccgcccaccacgcctcccctccccccggacgtgtaaatgagactctgcaaactggaaagcagcgaaaggacacctccttccttttctctcttgttgtttttaagtggaatgagagagagaggagtggagagggaaaagaagagagagagggagaagagagagaggagagaaagagcgagagagcgagagagagagacagagacagagagagagagagagagagagagagagagaaagagagagagagagagagagaataagctggggtaaagtattttcgcagtttctgcctttaggattttattagcttctctcccccaggccgcagccaatcagcgcgcgtgcccgggcccctgcgtctcttgcgtcaagacggccgtgctgagcgaatgcaggcgacttgcgagctgggagcgatttaaaacgctttggattcccccggcctgggtggggagagcgagctgggtgccccctagattccccgcccccgcacctcatgagccgaccctcggctccatggagcccggcaattatgccaccttggatggagccaaggatatcgaaggcttgctgggagcgggaggggggcggaatctggtcgcccactcccctctgaccagccacccagcggcgcctacgctgatgcctgctgtcaactatgcccccttggatctgccaggctcggcggagccgccaaagcaatgccacccatgccctggggtgccccaggggacgtccccagctcccgtgccttatggttactttggaggcgggtactactcctgccgagtgtcccggagctcgctgaaaccctgtgcccaggcagccaccctggccgcgtaccccgcggagactcccacggccggggaagagtaccccagccgccccactgagtttgccttctatccgggatatccgggaacctaccagcctatggccagttacctggacgtgtctgtggtgcagactctgggtgctcctggagaaccgcgacatgactccctgttgcctgtggacagttaccagtcttgggctctcgctggtggctggaacagccagatgtgttgccagggagaacagaacccaccaggtcccttttggaaggcagcatttgcagactccagcgggcagcaccctcctgacgcctgcgcctttcgtcgcggccgcaagaaacgcattccgtacagcaaggggcagttgcgggagctggagcgggagtatgcggctaacaagttcatcaccaaggacaagaggcgcaagatctcggcagccaccagcctctcggagcgccagattaccatctggtttcagaaccgccgggtcaaagagaagaaggttctcgccaaggtgaagaacagcgctaccccttaagagatctccttgcctgggtgggaggagcgaaagtgggggtgtcctggggagaccaggaacctgccaagcccaggctggggccaaggactctgctgagaggcccctagagacaacacccttcccaggccactggctgctggactgttcctcaggagcggcctgggtacccagtatgtgcagggagacggaaccccatgtgacagcccactccaccagggttcccaaagaacctggcccagtcataatcattcatcctgacagtggcaataatcacgataaccagtactagctgccatgatcgttagcctcatattttctatctagagctctgtagagcactttagaaaccgctttcatgaattgagctaattatgaataaatttggaaggcgatccctttgcagggaagctttctctcagacccccttccattacacctctcaccctggtaacagcaggaagactgaggagaggggaacgggcagattcgttgtgtggctgtgatgtccgtttagcatttttctcagctgacagctgggtaggtggacaattgtagaggctgtctcttcctccctccttgtccaccccatagggtgtacccactggtcttggaagcacccatccttaatacgatgatttttctgtcgtgtgaaaatgaagccagcaggctgcccctagtcagtccttccttccagagaaaaagagatttgagaaagtgcctgggtaattcaccattaatttcctcccccaaactctctgagtcttcccttaatatttctggtggttctgaccaaagcaggtcatggtttgttgagcatttgggatcccagtgaagtagatgtttgtagccttgcatacttagcccttcccaggcacaaacggagtggcagagtggtgccaaccctgttttcccagtccacgtagacagattcacagtgcggaattctggaagctggagacagacgggctctttgcagagccgggactctgagagggacatgagggcctctgcctctgtgttcattctctgatgtcctgtacctgggctcagtgcccggtgggactcatctcctggccgcgcagcaaagccagcgggttcgtgctggtccttcctgcaccttaggctgggggtggggggcctgccggcgcattctccacgattgagcgcacaggcctgaagtctggacaacccgcagaaccgaagctccgagcagcgggtcggtggcgagtagtggggtcggtggcgagcagttggtggtgggccgcggccgccactacctcgaggacatttccctcccggagccagctctcctagaaaccccgcggcggccgccgcagccaagtgtttatggcccgcggtcgggtgggatcctagccctgtctcctctcctgggaaggagtgagggtgggacgtgacttagacacctacaaatctatttaccaaagaggagcccgggactgagggaaaaggccaaagagtgtgagtgcatgcggactgggggttcaggggaagaggacgaggaggaggaagatgaggtcgatttcctgatttaaaaaatcgtccaagccccgtggtccagcttaaggtcctcggttacatgcgccgctcagagcaggtcactttctgccttccacgtcctccttcaaggaagccccatgtgggtagctttcaatatcgcaggttcttactcctctgcctctataagctcaaacccaccaacgatcgggcaagtaaaccccctccctcgccgacttcggaactggcgagagttcagcgcagatgggcctgtggggagggggcaagatagatgagggggagcggcatggtgcggggtgaccccttggagagaggaaaaaggccacaagaggggctgccaccgccactaacggagatggccctggtagagacctttgggggtctggaacctctggactccccatgctctaactcccacactctgctatcagaaacttaaacttgaggattttctctgtttttcactcgcaataaattcagagcaaacaaaa

SEQ ID NO: 164273 - DNA, 855 bp, Artificial Sequence
  derived and/or modified sequence
atggagcccggcaactatgccaccctggatggagccaaggacatcgagggcctgctgggcgccggcggcggcaggaacctggtggcccacagccccctgaccagccaccctgctgcccccaccctgatgcctgctgtgaactatgcccccctggacctgcccggcagcgctgagccccccaagcagtgccacccctgccctggggtgccccagggcaccagccctgcccctgtgccctacggctactttggaggcggctactacagctgccgggtgagccgcagcagcctgaagccctgtgcccaggccgccaccctggccgcctacccagctgagacccccacagctggggaggagtaccccagccggcccacagaatttgccttctacccaggctacccaggcacctaccagcccatggccagctacctggatgtgtctgtggtgcagaccctgggcgcccctggagagcccaggcatgacagcctgctgcctgtggacagctaccagagctgggccctggccggcggctggaacagccagatgtgctgccagggcgagcagaaccccccaggccccttctggaaggccgcctttgctgacagcagcggccagcaccccccagatgcctgtgccttccggcggggcaggaagaagaggatcccctacagcaagggccagctgcgggagctggagcgggagtatgctgccaacaagttcatcaccaaggacaagaggaggaagatctctgctgccaccagcctgtctgagcggcagatcaccatctggttccagaacagaagagtgaaggagaagaaggtgctggccaaggtgaagaacagcgccaccccctag

SEQ ID NO: 164274 - DNA, 855 bp, Artificial Sequence
  derived and/or modified sequence
atggagcccggcaactacgccaccctggacggcgccaaggacatcgagggattactcggggcgggcgggggcaggaaccttgtggctcatagccctctgacctcccacccggccgcacccactctgatgccggccgtgaactacgctccactggatctacccgggtcggccgagccaccaaaacagtgccacccgtgtcctggcgtgcctcagggcaccagccccgcccctgtgccatacggctactttggagggggctattattcatgcagggtgagccgatcctcgctcaaaccttgcgctcaggcagctactctggccgcctatcctgcggaaacacctacggcaggggaggagtatccttcgcgacctactgagttcgcattctaccccggctaccccgggacgtatcagcctatggcctcttaccttgatgtcagcgtagtccagactctgggagccccaggcgaacctaggcatgatagcctgctgcccgtcgattcataccagtcctgggctctggccggtggctggaattctcaaatgtgctgccagggcgagcagaatcctcctggacctttttggaaggccgcattcgccgattcgtccggccagcatccgcccgatgcctgcgccttccgaaggggcagaaagaaacgtataccctactccaaagggcagctcagggaacttgagagagaatatgctgctaacaagttcattacaaaagacaagagacgtaaaatttctgcggcaacctcgctcagcgaacgccagataacaatctggttccagaatcgcagagtgaaagagaagaaagtgttagccaaagtgaaaaacagtgctacaccttag

SEQ ID NO: 164275 - DNA, 855 bp, Artificial Sequence
  derived and/or modified sequence
atggaacccggaaattacgccaccttggatggggctaaggatatcgagggccttctgggcgcaggtgggggtcggaacctagtagcacactcccctctgacatcccaccctgcggctcctaccctgatgcccgcagtgaactatgccccactggacctccccggatcagctgaaccacctaagcaatgtcacccttgccccggtgtgcctcagggaactagccctgcccctgtcccgtatggctactttggaggagggtactactcctgtcgcgtgtctagaagttcactgaagccatgcgcccaggccgcaacactcgcagcctatcccgctgaaacccctaccgccggtgaggaatatccgtccagaccaacggaatttgccttctaccctggctatcccggtacataccaaccaatggcctcatacttggacgtgagtgttgtgcagactttgggtgctcccggagaacccagacacgacagcctgctgcctgtggactcctaccagtcgtgggcactagccggtggttggaatagccagatgtgctgccagggggaacagaatccacccggtcccttctggaaggcggcatttgcggactccagtggccagcatcctcctgatgcgtgtgctttccgcagagggaggaaaaagcgaatcccctacagtaagggtcagctgcgtgagcttgagagagaatacgctgcgaacaaattcattacgaaagacaagcgcagaaaaatctcggccgctacctcactgtctgagcggcagattacaatctggtttcagaaccgccgagtgaaagagaagaaggttcttgctaaagttaaaaactctgcaactccctag

SEQ ID NO: 164276 - DNA, 855 bp, Artificial Sequence
  derived and/or modified sequence
atggagcccggcaactacgccaccctggacggcgccaaggacatcgagggcctgctgggcgccggcggcggcagaaacctggtggcccacagccccctgaccagccaccccgccgcccccaccctgatgcccgccgtgaactacgcccccctggacctgcccggcagcgccgagccccccaagcagtgccacccctgccccggcgtgccccagggcaccagccccgcccccgtgccctacggctacttcggcggcggctactacagctgcagagtgagcagaagcagcctgaagccctgcgcccaggccgccaccctggccgcctaccccgccgagacccccaccgccggcgaggagtaccccagcagacccaccgagttcgccttctaccccggctaccccggcacctaccagcccatggccagctacctggacgtgagcgtggtgcagaccctgggcgcccccggcgagcccagacacgacagcctgctgcccgtggacagctaccagagctgggccctggccggcggctggaacagccagatgtgctgccagggcgagcagaacccccccggccccttctggaaggccgccttcgccgacagcagcggccagcacccccccgacgcctgcgccttcagaagaggcagaaagaagagaatcccctacagcaagggccagctgagagagctggagagagagtacgccgccaacaagttcatcaccaaggacaagagaagaaagatcagcgccgccaccagcctgagcgagagacagatcaccatctggttccagaacagaagagtgaaggagaagaaggtgctggccaaggtgaagaacagcgccaccccctag

SEQ ID NO: 164277 - protein, 619 aa, Artificial Sequence
  derived and/or modified sequence
MADEGKSYSEHDDERVNFPQRKKKGRGPFRWKYGEGNRRSGRGGSGIRSSRLEEDDGDVAMSDAQDGPRVRYNPYTTRPNRRGDTWHDRDRIHVTVRRDRAPPERGGAGTSQDGTSKNWFKITIPYGRKYDKAWLLSMIQSKCSVPFTPIEFHYENTRAQFFVEDASTASALKAVNYKILDRENRRISIIINSSAPPHTILNELKPEQVEQLKLIMSKRYDGSQQALDLKGLRSDPDLVAQNIDVVLNRRSCMAATLRIIEENIPELLSLNLSNNRLYRLDDMSSIVQKAPNLKILNLSGNELKSERELDKIKGLKLEELWLDGNSLCDTFRDQSTYISAIRERFPKLLRLDGHELPPPIAFDVEAPTTLPPCKGSYFGTENLKSLVLHFLQQYYAIYDSGDRQGLLDAYHDGACCSLSIPFIPQNPARSSLAEYFKDSRNVKKLKDPTLRFRLLKHTRLNVVAFLNELPKTQHDVNSFVVDISAQTSTLLCFSVNGVFKEVDGKSRDSLRAFTRTFIAVPASNSGLCIVNDELFVRNASSEEIQRAFAMPAPTPSSSPVPTLSPEQQEMLQAFSTQSGMNLEWSQKCLQDNNWDYTRSAQAFTHLKAKGEIPEVAFMK

SEQ ID NO: 164278 - DNA, 1860 bp, Artificial Sequence
  derived and/or modified sequence
atggctgacgaaggaaagtcctattcggagcacgacgacgagagggttaacttcccgcagagaaagaagaagggcagaggaccatttcggtggaagtacggagaaggaaaccgccggagcggcagagggggatctggcatacggagctcccgcctggaagaggacgacggcgacgttgccatgtccgatgctcaggatggcccacgcgttcggtataacccctacaccacccgtccaaatcgccggggggacacatggcacgaccgtgaccgcattcacgtgaccgtgcggcgagaccgggcccctcccgaaagaggaggcgcagggacttcccaggacggaacaagcaagaactggttcaagataacaattccctatggccggaagtatgacaaagcgtggctgttgtccatgatccagagcaaatgctccgtgcccttcactccgatagaatttcactatgaaaacacccgcgctcagtttttcgtagaagatgcaagcactgccagcgcgcttaaggccgtgaactacaagatcctggacagagagaaccggcgaatatccatcatcataaactcgtcagcacctccccacaccatactgaatgagcttaaacctgaacaggtggagcagctcaagctaatcatgagcaaaagatacgacggaagtcaacaggcgcttgacttgaaaggactgcgaagtgaccctgatctcgtggctcagaatatagatgtcgttttgaatcgaaggtcgtgcatggccgctacactcaggatcattgaagagaacataccagaactgctgtccctgaatctaagtaataatcgactttaccggctggacgatatgtcgagcattgtgcaaaaggcaccaaatctaaagatattgaatctgagcggaaatgagttaaagtccgaaagggagttggataaaatcaaagggctaaagttggaggagctctggctagatggcaactctctgtgcgacaccttccgcgaccagagtacatacataagcgcaatcagagaaaggtttcctaaacttctacgccttgatggacatgagctgccccccccgatcgcttttgatgttgaggcacccacaacactgcctccctgtaagggatcttatttcggcactgagaatcttaaaagtcttgttctacacttcttgcagcagtactatgcaatctatgactcaggggataggcaaggcttactggacgcttatcatgatggggcatgttgctcgctgtccattccttttatcccgcaaaatcctgcccggtcgtccctggcggagtactttaaagattcacggaatgtgaaaaagttaaaagaccccacactccgcttcaggctcctgaagcatacgaggttaaatgtagtagcctttttaaacgagctcccaaagacacaacacgatgtgaacagttttgtagtcgatatcagcgcacagacctctacgctcctgtgttttagtgtcaacggggtgttcaaggaagtggacggtaaatcaagggactctctccgggcctttacccgaaccttcatcgcagttccagcgagtaactcaggattgtgtatagtgaacgacgagcttttcgtccggaatgcctccagcgaggagatacaacgagccttcgccatgcctgctcctacacctagcagttcccccgtaccaaccctcagcccagagcaacaggagatgctgcaggcgttttccacccagtccggtatgaatcttgaatggtcccaaaagtgtctacaggataataactgggactatacccgctcggctcaagcctttacccatctgaaagccaagggggagatccccgaagtggcattcatgaagtag

SEQ ID NO: 164279 - DNA, 1860 bp, Artificial Sequence
  derived and/or modified sequence
atggcagacgagggtaaaagctattctgagcatgacgacgaacgggtgaattttccacagcgtaagaaaaaagggcgcggtccattccggtggaaatatggtgagggaaacaggcggtctggacgcggaggatcaggaattcgatcatctagattggaggaagacgacggagatgtagctatgagtgacgctcaagatgggccacgggtccggtacaacccatatacaacgagacccaatagacggggcgacacttggcatgatagagacagaatccacgtgacagtgcggagggaccgcgctccgcctgaacgcggcggggccggaacatctcaggatggcacctctaaaaactggtttaaaatcaccatcccatacgggagaaaatacgacaaggcctggcttttgtcaatgatccagtcaaagtgtagcgttcccttcactcccattgagttccactacgagaatactagggcacaattctttgtggaggacgcttcgactgcttccgcccttaaggctgtgaactataagattctggacagggaaaatcgccgtatcagtatcataattaacagttcagcccctccgcataccattctaaatgaactcaagcccgagcaggtggagcagcttaagcttatcatgtcgaaacgctacgatggatctcagcaggctttggacctgaagggcctacgcagtgaccccgacctggtggcccagaacatcgacgttgttctcaaccgcagatcatgcatggctgctacacttcggatcatcgaggagaatattcctgagctgttgtctctgaatcttagcaacaacagactgtacaggttagatgacatgagctccattgtgcagaaagctcctaacctgaagatcctaaacctttccggaaacgaactgaagtccgagcgggagttggacaagatcaagggacttaagctggaagagctgtggttggacggcaactcactatgtgacacctttagagaccagagtacttatatctcagctattcgtgagcgatttcctaagctcttgcgactggatgggcacgagcttcccccccccatcgcattcgacgtggaggctcccacaacgctgcctccatgtaaaggttcttatttcgggacggaaaacctgaagagtttagtgttgcacttcttgcagcagtattacgcaatctacgactctggtgataggcaggggctgctcgatgcctatcacgacggtgcatgttgcagcttatctattccattcatcccccagaatccagcacggagcagtctcgcggaatatttcaaagacagccgcaacgttaagaaattaaaagaccctacactgcgcttcaggctgttgaaacacacccgccttaacgtagtggcatttctgaacgagctgcccaaaacacagcatgatgtcaactcctttgtagtggacatctctgcccaaacaagcacactgttatgcttctccgtcaacggcgtgtttaaggaggttgacgggaaaagccgagactcattgcgtgcatttacccggactttcattgccgtgcctgcctccaactccggactgtgcatcgtaaacgacgagctctttgtacgcaatgcttcctcagaggagatccagagggccttcgctatgcccgcccctacaccttctagcagtccagttccaaccctgagtcccgaacagcaggagatgctgcaagcgttctcaacccaatccgggatgaatctcgaatggagccaaaagtgcttacaagacaataattgggactacaccagatctgcgcaagcttttacccatctcaaggcaaagggagagattccggaagtagcttttatgaagtag

SEQ ID NO: 164280 - DNA, 1860 bp, Artificial Sequence
  derived and/or modified sequence
atggctgatgagggcaagagctacagcgagcatgatgatgagcgggtgaacttcccccagaggaagaagaagggccggggccccttccgctggaagtatggagagggcaacagaagaagtggccggggcggcagcggcatccgcagcagccggctggaggaggatgatggagatgtggccatgtctgatgcccaggacggcccccgggtgcgctacaacccctacaccacccggcccaacagaagaggagacacctggcatgaccgggaccgcatccacgtgacagtgagaagagaccgggcccctcctgagcggggcggggccggcaccagccaggacggcaccagcaagaactggttcaagatcaccatcccctacggcaggaaatatgacaaggcctggctgctgtccatgatccagagcaagtgcagcgtgcccttcacccccatcgagttccactatgagaacacccgggcccagttctttgtggaggatgccagcacagccagcgccctgaaggctgtgaactacaagatcctggacagagaaaatcgccgcatcagcatcatcatcaacagcagcgccccaccccacaccatcctgaatgagctgaagccagagcaggtggagcagctgaagctgatcatgagcaagagatatgatggcagccagcaggccctggacctgaagggcctgcggagtgaccctgacctggtggcccagaacattgatgtggtgctgaacagaagaagctgcatggccgccaccctgcgcatcatcgaggagaacatccctgagctgctgagcctgaacctgagcaacaacagactctaccgcctggatgacatgagcagcatcgtgcagaaggcccccaacctgaagatcctgaacctgtctggaaatgagctgaagtctgagcgggagctggacaagatcaagggcctgaagctggaggagctgtggctggatggcaacagcctgtgtgacaccttccgggaccagagcacctacatcagcgccatccgggagcgcttccccaagctgctgcggctggatggccacgagctgcccccacccatcgcctttgatgtggaggcccccaccaccctgcccccctgcaagggcagctacttcggcacagagaacctgaagagcctggtgctgcacttcctgcagcagtactatgccatctatgacagcggggaccggcagggcctgctggatgcctaccatgatggagcctgctgcagcctgagcatccccttcatcccccagaacccagcccggagcagcctggccgagtacttcaaggacagcagaaatgtgaagaagctgaaggaccccaccctgcgcttccggctgctgaagcacacccggctgaatgtggtggccttcctgaatgagctgcccaagacccagcatgatgtgaacagctttgtggtggacatcagcgcccagaccagcaccctgctgtgcttctctgtgaatggagtcttcaaggaggtggatggcaagagccgggacagcctgcgggccttcaccaggaccttcatcgctgtgcctgccagcaacagcggcctgtgcatcgtgaatgatgagctgtttgtgagaaatgccagcagcgaggagatccagagggcctttgccatgcctgcccccacccccagcagcagccctgtgcccaccctgagccctgagcagcaggagatgctgcaggccttcagcacccagagcggcatgaacctggagtggagccagaagtgcctgcaggacaacaactgggactacaccaggtctgcccaggccttcacccacctgaaggccaagggggagatccctgaggtggccttcatgaagtag

SEQ ID NO: 164281 - DNA, 1860 bp, Artificial Sequence
  derived and/or modified sequence
atggccgacgagggcaagagctacagcgagcacgacgacgagcgggtcaactttcctcagcgaaaaaagaaaggccggggaccatttcgctggaaatatggggagggaaaccggcgctctggtagaggtggcagtgggattcgctccagccgactcgaggaggacgacggcgacgtggcaatgagcgacgctcaggatgggcctcgggtaagatataacccatacacaacacggcctaacagaaggggagacacctggcacgatcgggatcgaatccatgtgacagtcagacgggatagagctccgccggaaagaggcggggcgggtaccagccaggatggaacgagtaagaattggtttaaaattacaattccatatggccgcaagtatgacaaagcatggctgctgtcaatgattcagagtaagtgtagcgtgccttttacacccatagagtttcactacgaaaatacccgcgcccagtttttcgtggaagacgcatctacagcgtcagctctaaaagcagtgaattacaaaatcctggatagagagaatcggcgcatatccatcattattaacagctctgctccccctcatactattctgaacgagttgaagcctgaacaggtcgagcagcttaagctcataatgtctaagcgctatgatggaagccagcaagccctcgatttaaagggactccgaagtgacccagaccttgtggctcagaatatcgatgttgttctgaatcgccgatcttgcatggccgctacccttcgcatcattgaagaaaatattccggaattactgagtctgaatctctcaaacaaccgtctgtatcgtttggacgatatgagtagcatcgttcaaaaggcccctaacctcaagatacttaacctgtcgggaaatgaactaaaatccgaacgcgaattggataagatcaaaggtctgaagcttgaagaactttggttggatggcaattccctgtgcgacacgttccgcgatcagtccacgtacatctccgccatacgcgaacggttcccgaaacttctgaggctagatggccatgagctgccacctcccatagcttttgacgtggaagccccaacaacgctgccgccctgcaaagggagttactttggaaccgaaaacttgaagtctctggtgctccacttccttcagcagtactatgcaatctatgactctggagatcgccagggactcttagatgcataccatgacggagcttgctgctctctgtctatcccattcataccccagaatcctgcacgcagcagtctcgcagagtattttaaggattccaggaatgtgaagaagctgaaagaccccaccctccggttccggctattaaagcatacacgccttaacgttgttgccttcctcaatgaactccccaaaacccaacacgacgtgaactcatttgtcgtggacatctctgcccagacatcgacgctgttgtgcttttccgtgaacggggtgttcaaggaagtagatggtaaaagccgtgactcactgcgggcatttactagaacctttatcgctgttcccgcctcgaactcaggtctgtgcatcgttaatgacgaattatttgtccgcaatgcttcctctgaggaaatccagcgtgcttttgcgatgccggccccaaccccctccagttcacccgtcccgaccctttcccctgaacagcaggagatgctgcaggctttttccacacagtcgggaatgaacctagagtggtctcagaaatgtcttcaggataacaactgggactatactcgaagtgcccaagcatttacacatctgaaggcaaaaggagagattccagaggtcgcattcatgaaatag

SEQ ID NO: 164282 - DNA, 1860 bp, Artificial Sequence
  derived and/or modified sequence
atggccgacgagggcaagagctacagcgagcacgacgacgagcgggtaaactttccccagcggaagaagaagggacgcggtccattccgatggaaatatggggaggggaacaggaggtcaggtcgcggtggatcaggaattagatctagccgtctcgaggaagatgatggcgacgtggcaatgagcgatgcccaagacggcccgagggtgcgctataacccatacaccactcgcccaaatcgcaggggcgacacatggcatgaccgggataggattcatgttaccgtgcgccgggatagggcaccgcctgagcggggtggggctggaacctcccaggacggaacaagcaagaactggttcaaaatcaccattccttacggtagaaagtatgataaggcttggctcctcagtatgatccaatccaagtgcagcgtgcctttcactcctatcgaatttcattatgaaaacaccagagcccagttcttcgtggaggacgcgtcaactgccagcgcattaaaagcggtgaactacaaaattctggaccgtgaaaacagacgtatatccataattattaactcaagtgccccaccccataccatcttaaacgagcttaagccggagcaggtggaacagctgaagctaatcatgtctaaacgctacgatggaagccagcaggccctcgacctgaagggactgcgtagcgaccccgacctagtggcccagaatattgatgtcgtgctgaaccgcagaagttgcatggcggcaaccttacgtatcatagaagagaacatccccgagctactaagcttaaacctgagcaataaccggctgtaccgtctcgatgacatgtctagtattgtacaaaaggcgcctaatctaaagatactgaatttgtccggtaatgagttaaagagcgaaagagagctcgataagatcaagggcctgaagctcgaagaactctggctggacggaaattccttgtgcgacacttttagagatcagagcacgtacatttctgccattagagaaagattccccaagctgctgcggctcgacggacatgaactgcctcctcctatcgcctttgatgttgaggcacccacaaccttgccaccatgcaagggcagttactttggtactgagaacttgaagagcttggttttgcattttctgcaacagtattatgccatatacgacagtggcgataggcaagggcttttagacgcttaccacgacggggcatgttgctctttatccatccctttcatacctcagaatccagctaggtccagcctggccgagtacttcaaggactcgcggaacgtgaaaaagctgaaggaccctacgctccggttccgtttattaaagcatactagactgaacgtggtcgcatttctgaacgagttgcccaaaactcaacacgatgtgaacagcttcgtggtggacattagcgcacaaacctccactctgctgtgcttcagcgtaaacggtgttttcaaagaagtggacggcaaatctagagacagtctgcgcgcgtttactagaaccttcatcgctgtgcccgcgtccaatagtggcctgtgtatcgtgaacgacgagctcttcgttaggaatgcgagctctgaggagatacaacgggctttcgccatgcccgcccccaccccttcttcaagtcccgtaccgactctgtcgccagagcagcaggagatgctgcaagcctttagcacccagagcgggatgaacctagagtggtctcagaaatgtctccaggataacaattgggactataccagaagtgcacaagctttcacacacctcaaggccaagggggaaattcctgaagtcgccttcatgaaatag

SEQ ID NO: 164283 - DNA, 2346 bp, Artificial Sequence
  derived and/or modified sequence
cggcgcgcgacgtgctttgctgtataaatgcggtggcgcccggcgtagggacacttcggtcctgagcgcttgggagttaggttgtttgccggcgtagcggccagcgcctgagcccgcccttgatcttcgctgtggcatggcggacgaggggaagtcgtacagcgaacacgatgatgaacgcgttaatttccctcaaagaaagaagaaaggccggggtcccttccggtggaaatatggtgaaggaaaccgtaggtctggaagaggcggttctggtattcggtcttcccgccttgaggaagatgatggagatgtggcaatgagtgatgcccaggatggtccccgagtacgatacaacccctataccacccgacctaaccgtcggggtgatacttggcatgatcgagatcgcattcatgttactgtgcggagagacagagctcctccagagagaggaggggctggcaccagccaggatgggacctcaaagaactggttcaagattacaattccttatggcagaaagtatgacaaggcatggctcctgagcatgattcagagcaagtgcagtgtgcccttcacccctattgagtttcactatgagaatacacgggcccagttcttcgttgaagacgccagtactgcctctgcattgaaggctgtcaactataagattttggatcgggagaaccgaaggatatctatcatcatcaactcttctgctccaccccacactatactgaatgaactgaagccagaacaagtagaacagctaaagctgatcatgagcaaacgatacgatggctcccaacaagcccttgacctcaaaggcctccgttcagacccagatttggtggcccagaacattgacgttgtcctgaatcgcagaagctgtatggcagctaccctgaggatcattgaagagaacatccctgagctattgtccttgaacttgagcaacaacaggctgtacaggctggatgacatgtctagcattgttcagaaggcacccaacctgaagatcctaaacctttctggaaatgaattgaagtctgagcgggaattggacaagataaaggggctgaagctagaagagctctggctcgatggaaactccctgtgtgacaccttccgagaccagtccacctacatcagcgccattcgcgaacgatttcccaagttactacgcctggatggccatgagctacccccaccaattgcctttgatgttgaagcccccacgacgttaccgccctgcaagggaagctattttggaacagaaaacttgaagagtctggtcttgcacttcctgcaacagtactatgcaatttacgactctggagaccgacaagggctcctggatgcctaccatgatggggcctgctgttccctgagcattcctttcattcctcagaaccctgcccgaagcagcttagccgagtatttcaaggatagcagaaatgtgaagaagcttaaagaccctaccttgcggttccggctgctgaagcacacgcgtctcaacgttgttgccttcctcaatgagttgcccaaaacccagcacgacgtcaattccttcgtggtagacataagcgcccagacaagcacattgctgtgtttttctgtcaatggagtcttcaaggaagtggacggaaagtcccgggattctttgcgagccttcacccggacattcattgctgttcctgctagcaattcagggctatgtattgtaaatgatgagctatttgtgcggaatgccagttctgaagagatccaaagagccttcgctatgcctgcacccacgccttcctccagcccggtgcccaccctctctccagagcagcaggaaatgttgcaagcattctctacccagtctggcatgaacctcgagtggtcccagaagtgccttcaggacaacaactgggactacaccagatctgcccaggccttcactcatctcaaggccaagggcgagatcccagaagtggcattcatgaagtgatcgtagtcatgcctcagaagcagtcccccctgtaaatagtccttggatattaccgtctggttgtcgtctgtcatctcctcctgtctggcccgaggccgccccgtgactgtgaccgagggagggagggctgcctgatccctctcctcgcctgccttctggaagacttcagaagattgagcctcactggtgccaggaagccaaagcttactttgtagaactgacactaaactacccgaaggacttaggtgctttgtgtacttaaccccaggacctccttactttttaatataaagagtgatgttgtatttcgtgttctgcactttttaatataaagagtgatgttgtatttc

SEQ ID NO: 164284 - DNA, 2795 bp, Artificial Sequence
  derived and/or modified sequence
atagagacaacagtcaggggctggtggtggtgcttttgggggtctaggagagcccaaggccctgatattttaaaatgtcctcctcggcatctccagcaagttgccactgctggcgaagaaagcgaggtatagacaaggagccgagctgaaacactggctagattccggtaggggtctgagccatcactcccacctggaggcgcggtctccattcctctgaagccctttgtgcggcccccttcctcactgagttctgggctgcggcggcagcactgtgctctagcactaactctgaagctgccagggcagcgtcagcggacagatgaaaaggtgcggggacatgctggctgccagccggggttccgcaagttcaggtcttgggcggggcgtggagggccaggccccgcccctcgaacgacggccttaagtgtgcgcacgcgcagggggccgcgctttctccgggcggcggcaccgcccacagcctgggacgtcagcggcgcgcgacgtgctttgctgtataaatgcggtggcgcccggcgtagggacacttcggtcctgagcgcttgggagttaggttgtttgccggcgtagcggccagcgcctgagcccgcccttgatcttcgctgtggcatggcggacgaggggaagtcgtacagcgaacacgatgatgaacgcgttaatttccctcaaagaaagaagaaaggccggggtcccttccggtggaaatatggtgaaggaaaccgtaggtctggaagaggcggttctggtattcggtcttcccgccttgaggaagatgatggagatgtggcaatgagtgatgcccaggatggtccccgagtacgatacaacccctataccacccgacctaaccgtcggggtgatacttggcatgatcgagatcgcattcatgttactgtgcggagagacagagctcctccagagagaggaggggctggcaccagccaggatgggacctcaaagaactggttcaagattacaattccttatggcagaaagtatgacaaggcatggctcctgagcatgattcagagcaagtgcagtgtgcccttcacccctattgagtttcactatgagaatacacgggcccagttcttcgttgaagacgccagtactgcctctgcattgaaggctgtcaactataagattttggatcgggagaaccgaaggatatctatcatcatcaactcttctgctccaccccacactatactgaatgaactgaagccagaacaagtagaacagctaaagctgatcatgagcaaacgatacgatggctcccaacaagcccttgacctcaaaggcctccgttcagacccagatttggtggcccagaacattgacgttgtcctgaatcgcagaagctgtatggcagctaccctgaggatcattgaagagaacatccctgagctattgtccttgaacttgagcaacaacaggctgtacaggctggatgacatgtctagcattgttcagaaggcacccaacctgaagatcctaaacctttctggaaatgaattgaagtctgagcgggaattggacaagataaaggggctgaagctagaagagctctggctcgatggaaactccctgtgtgacaccttccgagaccagtccacctacatcagcgccattcgcgaacgatttcccaagttactacgcctggatggccatgagctacccccaccaattgcctttgatgttgaagcccccacgacgttaccgccctgcaagggaagctattttggaacagaaaacttgaagagtctggtcttgcacttcctgcaacagtactatgcaatttacgactctggagaccgacaagggctcctggatgcctaccatgatggggcctgctgttccctgagcattcctttcattcctcagaaccctgcccgaagcagcttagccgagtatttcaaggatagcagaaatgtgaagaagcttaaagaccctaccttgcggttccggctgctgaagcacacgcgtctcaacgttgttgccttcctcaatgagttgcccaaaacccagcacgacgtcaattccttcgtggtagacataagcgcccagacaagcacattgctgtgtttttctgtcaatggagtcttcaaggaagtggacggaaagtcccgggattctttgcgagccttcacccggacattcattgctgttcctgctagcaattcagggctatgtattgtaaatgatgagctatttgtgcggaatgccagttctgaagagatccaaagagccttcgctatgcctgcacccacgccttcctccagcccggtgcccaccctctctccagagcagcaggaaatgttgcaagcattctctacccagtctggcatgaacctcgagtggtcccagaagtgccttcaggacaacaactgggactacaccagatctgcccaggccttcactcatctcaaggccaagggcgagatcccagaagtggcattcatgaagtgatcgtagtcatgcctcagaagcagtcccccctgtaaatagtccttggatattaccgtctggttgtcgtctgtcatctcctcctgtctggcccgaggccgccccgtgactgtgaccgagggagggagggctgcctgatccctctcctcgcctgccttctggaagacttcagaagattgagcctcactggtgccaggaagccaaagcttactttgtagaactgacactaaactacccgaaggacttaggtgctttgtgtacttaaccccaggacctccttactttttaatataaagagtgatgttgta

SEQ ID NO: 164285 - DNA, 1860 bp, Artificial Sequence
  derived and/or modified sequence
atggccgacgagggtaagtcatacagtgagcacgatgatgagcgggtcaacttcccacagagaaaaaaaaaaggacggggaccgttcaggtggaagtacggggaaggcaacaggcggtccgggagaggcggttctggcataagatcctctcggcttgaggaggacgacggcgacgtcgccatgagtgatgctcaagacggaccgcgtgtacggtataatccctatacgacacgccctaacagacgtggtgatacatggcacgacagagatcgtattcacgtaactgtgcgacgagacagagccccacctgaacgcggaggggcaggtacgtctcaagacggcacaagtaagaactggtttaagatcacaattccatatgggaggaagtatgacaaagcctggctgctctcgatgattcagagtaagtgctcggttcctttcacgcctattgagttccactatgaaaacacaagagcccaatttttcgttgaagatgcctcgacagcctcagccctgaaggcagtcaactataagatcctcgacagggaaaacagacgcatatctataatcataaacagttcagcccctcctcatacaatcttgaacgaacttaaaccagagcaggtagagcagttaaaactgattatgtctaaacgctatgacggctcacagcaggccctcgatctgaagggcctgcggagcgaccccgatctggttgcacaaaatatagacgtggtcctgaaccgtcggagctgcatggcagctactttgagaatcattgaagaaaacatacccgagctgctctctctgaatcttagcaataaccgactataccgcctggatgacatgagttcgattgtgcagaaggctcccaatctgaaaattctgaacctgtcagggaacgagcttaaatctgagcgtgagctggacaaaatcaaagggttgaagctcgaggaactttggttagatggcaattccctgtgtgacacctttcgggaccagagtacctatatctcggccatcagagaacggttccccaagttgctgaggctcgacggccacgagcttccaccccctatcgcattcgacgtcgaagcccctacaaccctccctccttgtaagggtagttatttcggaacagagaacctgaaatcattggtgttgcattttctccaacagtattatgccatctacgactctggggaccgccagggactgctcgacgcttaccatgacggggcatgttgctcattgtctatcccattcatccctcagaaccccgctaggtcatctctggcagagtacttcaaagactcacgcaacgttaagaaactgaaagatcccaccctgaggttccgtctgttgaagcatacacggctgaatgtagtggctttcttgaacgagctgccgaaaacccagcatgatgttaacagtttcgtggtagatattagcgcacagacttccaccctattatgtttcagcgtgaacggcgtctttaaagaggtggacggcaaatcaagggatagcttgcgagcattcacgcgcacatttatcgccgtacccgcttcaaattccgggctgtgcattgtgaatgacgagctttttgtcaggaacgcctccagcgaagagatacagcgcgcttttgccatgcctgcccctacacctagctcgtcccctgtccccacgctgtctccggagcagcaggagatgctccaagccttctctacccagtccggaatgaatttggaatggtcccagaaatgcttgcaggataataattgggactatacaagatcagcccaagcattcactcacctgaaagcgaagggagagatccccgaagtagccttcatgaagtag

SEQ ID NO: 164286 - DNA, 1860 bp, Artificial Sequence
  derived and/or modified sequence
atggccgatgaaggaaaatcctacagcgagcacgatgacgagcgtgtcaacttcccccagagaaaaaagaaaggcagaggacccttcagatggaagtacggagagggcaaccggaggtcagggaggggcggatcagggatccgcagttccaggctcgaggaggatgatggtgacgtggctatgtcagatgcacaggatgggccacgtgtgcgttataatccttacacaacacgcccaaaccggaggggcgatacatggcacgatcgggatagaattcacgtcaccgtaaggcgggatagagccccaccggagcgcggaggagcgggtacatcgcaggacggcacatcaaagaattggttcaagataactatcccatacggcaggaagtacgataaggcttggctgctcagcatgatccagtcaaaatgcagtgttcctttcaccccaatcgagtttcattacgagaacaccagagcgcagttttttgtcgaagatgcaagcactgcatcagcactgaaggcagtcaactacaagatcttggatagggaaaataggcggatatccattattattaatagtagtgcccctccccataccatcctgaacgagctgaagcctgagcaggttgaacagcttaaactgattatgagcaagcgatatgatggttcgcagcaggctctggatctaaaaggcttgaggagcgatccagatctggtggcacagaacatcgacgttgtactgaacagaaggagctgcatggctgcgactctcagaataatagaagagaacatcccagagcttctgagcttaaacctaagcaataaccgtctgtatagactggatgatatgtcctcaattgtgcagaaagcaccaaatctcaagatccttaacctctctgggaatgagctcaagtctgagagagaactggacaaaatcaaggggcttaagctggaggagctgtggctggatgggaacagcctgtgcgacaccttccgagaccagtctacatacatttctgccattcgagagcgattcccgaaactgctgagattggatggacatgaacttccaccccctatcgcgtttgatgtagaagctcctacaaccctccccccttgcaagggctcttattttggcaccgagaacttgaagtctctagtgctgcatttcctgcaacaatattatgccatctacgatagtggggaccgtcagggcttactggacgcataccacgatggagcgtgctgttcacttagcatcccttttataccccagaatccagcccgatcctcacttgctgagtattttaaggattcaaggaatgtaaaaaaactgaaggacccgaccctgcgattcaggctgttaaagcacacgcgcttaaatgtggttgcgtttttaaacgagcttcctaaaacgcagcacgacgttaatagctttgtggtcgacatctctgcccaaacttccacgttgctgtgcttttcagtgaacggcgtctttaaggaagtagacggcaagtccagagattcccttcgggctttcacccgcacctttatagccgtccccgcttctaacagcggactctgtatagtgaacgatgagctgttcgtaagaaatgcaagcagcgaggagatacagcgggcattcgccatgcctgccccaacaccaagtagtagtcccgtgcccaccctttcccccgagcagcaggagatgctccaggccttctctacacaatccgggatgaatcttgaatggagtcagaaatgcctgcaggacaacaattgggactacacacgttctgcccaggcctttacacatctaaaggctaagggcgagatccctgaggtcgccttcatgaaatag

SEQ ID NO: 164287 - DNA, 1860 bp, Artificial Sequence
  derived and/or modified sequence
atggccgacgagggcaagagctacagcgagcacgacgacgagagagtgaacttcccccagagaaagaagaagggcagaggccccttcagatggaagtacggcgagggcaacagaagaagcggcagaggcggcagcggcatcagaagcagcagactggaggaggacgacggcgacgtggccatgagcgacgcccaggacggccccagagtgagatacaacccctacaccaccagacccaacagaagaggcgacacctggcacgacagagacagaatccacgtgaccgtgagaagagacagagccccccccgagagaggcggcgccggcaccagccaggacggcaccagcaagaactggttcaagatcaccatcccctacggcagaaagtacgacaaggcctggctgctgagcatgatccagagcaagtgcagcgtgcccttcacccccatcgagttccactacgagaacaccagagcccagttcttcgtggaggacgccagcaccgccagcgccctgaaggccgtgaactacaagatcctggacagagagaacagaagaatcagcatcatcatcaacagcagcgcccccccccacaccatcctgaacgagctgaagcccgagcaggtggagcagctgaagctgatcatgagcaagagatacgacggcagccagcaggccctggacctgaagggcctgagaagcgaccccgacctggtggcccagaacatcgacgtggtgctgaacagaagaagctgcatggccgccaccctgagaatcatcgaggagaacatccccgagctgctgagcctgaacctgagcaacaacagactgtacagactggacgacatgagcagcatcgtgcagaaggcccccaacctgaagatcctgaacctgagcggcaacgagctgaagagcgagagagagctggacaagatcaagggcctgaagctggaggagctgtggctggacggcaacagcctgtgcgacaccttcagagaccagagcacctacatcagcgccatcagagagagattccccaagctgctgagactggacggccacgagctgcccccccccatcgccttcgacgtggaggcccccaccaccctgcccccctgcaagggcagctacttcggcaccgagaacctgaagagcctggtgctgcacttcctgcagcagtactacgccatctacgacagcggcgacagacagggcctgctggacgcctaccacgacggcgcctgctgcagcctgagcatccccttcatcccccagaaccccgccagaagcagcctggccgagtacttcaaggacagcagaaacgtgaagaagctgaaggaccccaccctgagattcagactgctgaagcacaccagactgaacgtggtggccttcctgaacgagctgcccaagacccagcacgacgtgaacagcttcgtggtggacatcagcgcccagaccagcaccctgctgtgcttcagcgtgaacggcgtgttcaaggaggtggacggcaagagcagagacagcctgagagccttcaccagaaccttcatcgccgtgcccgccagcaacagcggcctgtgcatcgtgaacgacgagctgttcgtgagaaacgccagcagcgaggagatccagagagccttcgccatgcccgcccccacccccagcagcagccccgtgcccaccctgagccccgagcagcaggagatgctgcaggccttcagcacccagagcggcatgaacctggagtggagccagaagtgcctgcaggacaacaactgggactacaccagaagcgcccaggccttcacccacctgaaggccaagggcgagatccccgaggtggccttcatgaagtag

SEQ ID NO: 164288 - protein, 765 aa, Artificial Sequence
  derived and/or modified sequence
MTTYLEFIQQNEERDGVRFSWNVWPSSRLEATRMVVPVAALFTPLKERPDLPPIQYEPVLCSRTTCRAVLNPLCQVDYRAKLWACNFCYQRNQFPPSYAGISELNQPAELLPQFSSIEYVVLRGPQMPLIFLYVVDTCMEDEDLQALKESMQMSLSLLPPTALVGLITFGRMVQVHELGCEGISKSYVFRGTKDLSAKQLQEMLGLSKVPLTQATRGPQVQQPPPSNRFLQPVQKIDMNLTDLLGELQRDPWPVPQGKRPLRSSGVALSIAVGLLECTFPNTGARIMMFIGGPATQGPGMVVGDELKTPIRSWHDIDKDNAKYVKKGTKHFEALANRAATTGHVIDIYACALDQTGLLEMKCCPNLTGGYMVMGDSFNTSLFKQTFQRVFTKDMHGQFKMGFGGTLEIKTSREIKISGAIGPCVSLNSKGPCVSENEIGTGGTCQWKICGLSPTTTLAIYFEVVNQHNAPIPQGGRGAIQFVTQYQHSSGQRRIRVTTIARNWADAQTQIQNIAASFDQEAAAILMARLAIYRAETEEGPDVLRWLDRQLIRLCQKFGEYHKDDPSSFRFSETFSLYPQFMFHLRRSSFLQVFNNSPDESSYYRHHFMRQDLTQSLIMIQPILYAYSFSGPPEPVLLDSSSILADRILLMDTFFQILIYHGETIAQWRKSGYQDMPEYENFRHLLQAPVDDAQEILHSRFPMPRYIDTEHGGSQARFLLSKVNPSQTHNNMYAWGQESGAPILTDDVSLQVFMDHLKKLAVSSAA

SEQ ID NO: 164289 - protein, 563 aa, Artificial Sequence
  derived and/or modified sequence
MLGLSKVPLTQATRGPQVQQPPPSNRFLQPVQKIDMNLTDLLGELQRDPWPVPQGKRPLRSSGVALSIAVGLLECTFPNTGARIMMFIGGPATQGPGMVVGDELKTPIRSWHDIDKDNAKYVKKGTKHFEALANRAATTGHVIDIYACALDQTGLLEMKCCPNLTGGYMVMGDSFNTSLFKQTFQRVFTKDMHGQFKMGFGGTLEIKTSREIKISGAIGPCVSLNSKGPCVSENEIGTGGTCQWKICGLSPTTTLAIYFEVVNQHNAPIPQGGRGAIQFVTQYQHSSGQRRIRVTTIARNWADAQTQIQNIAASFDQEAAAILMARLAIYRAETEEGPDVLRWLDRQLIRLCQKFGEYHKDDPSSFRFSETFSLYPQFMFHLRRSSFLQVFNNSPDESSYYRHHFMRQDLTQSLIMIQPILYAYSFSGPPEPVLLDSSSILADRILLMDTFFQILIYHGETIAQWRKSGYQDMPEYENFRHLLQAPVDDAQEILHSRFPMPRYIDTEHGGSQARFLLSKVNPSQTHNNMYAWGQESGAPILTDDVSLQVFMDHLKKLAVSSAA

SEQ ID NO: 164290 - protein, 736 aa, Artificial Sequence
  derived and/or modified sequence
MTTYLEFIQQNEERDGVRFSWNVWPSSRLEATRMVVPVAALFTPLKERPDLPPIQYEPVLCSRTTCRAVLNPLCQVDYRAKLWACNFCYQRNQRGPQMPLIFLYVVDTCMEDEDLQALKESMQMSLSLLPPTALVGLITFGRMVQVHELGCEGISKSYVFRGTKDLSAKQLQEMLGLSKVPLTQATRGPQVQQPPPSNRFLQPVQKIDMNLTDLLGELQRDPWPVPQGKRPLRSSGVALSIAVGLLECTFPNTGARIMMFIGGPATQGPGMVVGDELKTPIRSWHDIDKDNAKYVKKGTKHFEALANRAATTGHVIDIYACALDQTGLLEMKCCPNLTGGYMVMGDSFNTSLFKQTFQRVFTKDMHGQFKMGFGGTLEIKTSREIKISGAIGPCVSLNSKGPCVSENEIGTGGTCQWKICGLSPTTTLAIYFEVVNQHNAPIPQGGRGAIQFVTQYQHSSGQRRIRVTTIARNWADAQTQIQNIAASFDQEAAAILMARLAIYRAETEEGPDVLRWLDRQLIRLCQKFGEYHKDDPSSFRFSETFSLYPQFMFHLRRSSFLQVFNNSPDESSYYRHHFMRQDLTQSLIMIQPILYAYSFSGPPEPVLLDSSSILADRILLMDTFFQILIYHGETIAQWRKSGYQDMPEYENFRHLLQAPVDDAQEILHSRFPMPRYIDTEHGGSQARFLLSKVNPSQTHNNMYAWGQESGAPILTDDVSLQVFMDHLKKLAVSSAA

SEQ ID NO: 164291 - protein, 94 aa, Artificial Sequence
  derived and/or modified sequence
MTTYLEFIQQNEERDGVRFSWNVWPSSRLEATRMVVPVAALFTPLKERPDLPPIQYEPVLCSRTTCRAVLNPLCQVDYRAKLWACNFCYQRNQV

SEQ ID NO: 164292 - DNA, 2298 bp, Artificial Sequence
  derived and/or modified sequence
atgaccacctatcttgaattcattcaacaaaacgaagagagggatggcgtgcggttcagttggaacgtttggccctcgtctcggttggaggcaacaagaatggttgtccccgtggcagccctgttcacccccctcaaagagcgcccggacctcccacccatccagtacgagcccgtgctgtgttcccggaccacatgtcgggcggtattaaaccccttatgccaagtggattacagggccaagttgtgggcttgcaatttctgctaccagcggaaccaattcccaccctcatacgctggaatctccgaactgaaccagcctgccgagttactccctcagttcagcagtattgagtacgttgtgctgcgcggcccccagatgccccttatctttctgtacgtcgtggacacttgcatggaggacgaggacctccaggccctcaaagagagcatgcagatgagcctcagtttgctcccccctaccgccctagtcggcctcatcactttcggcagaatggttcaagtacatgaactcggctgcgagggtatctctaagagctacgtcttcagaggcactaaggatctgtccgccaagcagctccaagagatgctgggattgagcaaggtgcctttaactcaggcaacccgcggaccccaggttcaacagccaccgccatcaaaccgttttcttcagcccgtgcaaaagatcgatatgaatctcaccgacctgcttggggaactgcaacgcgacccttggccggttcctcagggtaagcgaccccttcgctcctccggggtggccctctcgatcgccgtgggactcctggaatgtacgtttcccaacacaggggcccgcatcatgatgttcattggcggaccagccacccagggcccgggtatggtcgtgggcgatgagctgaagactcctatccgatcctggcatgacatcgataaagataacgctaaatacgtcaagaaaggcacaaaacacttcgaggcactggccaacagagccgccaccaccgggcatgtgatcgacatctacgcatgtgcccttgaccagactggccttctggagatgaagtgctgtcccaacctcacgggggggtatatggtgatgggagattcttttaatacatcactgtttaagcagacgttccaacgggtgttcactaaagatatgcatggacagtttaagatgggttttggtggcactctggagatcaaaacttcacgagaaatcaagatctccggcgcaatagggccatgcgtatctttaaattctaaggggccctgcgtcagcgagaatgaaataggcacaggcggaacttgtcagtggaagatctgtggcctctcccctacaacaaccctcgcaatttatttcgaagttgtgaaccagcacaacgccccaatcccacagggtggcaggggcgcaattcaatttgtcacacagtaccagcacagctccggccagcggcgcatccgcgttaccacaattgcgcgcaattgggcagacgctcagacccagatccaaaacatcgccgcctctttcgaccaggaggccgcggcaatcctaatggcccgcctagcaatctatcgggcagaaaccgaggaaggaccagacgtactcagatggttggaccgccagctaatcagactgtgccagaagtttggggaatatcacaaagatgatccgagtagtttcagatttagtgagacctttagcctataccctcagttcatgttccacctgaggagatcatccttcttacaggtctttaacaatagtcccgacgagagcagttactacaggcatcacttcatgcggcaggaccttacacagtctctgattatgatacagcctattctttatgcttactctttttccggtccaccagagcctgtcttgctcgactctagttccatacttgctgatcgaattctgctgatggatacctttttccaaatcctcatataccatggtgagaccatcgcccagtggcgcaaaagtggatatcaggatatgcctgaatacgagaatttcaggcacctgttacaggcacccgtcgacgatgcccaggagattttgcatagtaggttcccgatgccaagatacattgacactgagcacggagggtctcaggcgcggtttttgctgtccaaagtgaaccctagccaaacccataataatatgtatgcctggggtcaggaatcaggcgccccaattctgacggacgatgtgtcactgcaggttttcatggaccatctgaaaaaactggcagtgtcatctgccgcttag

SEQ ID NO: 164293 - DNA, 1692 bp, Artificial Sequence
  derived and/or modified sequence
atgcttgggctatctaaggtacctctaacacaggctacacggggaccgcaggtgcagcagcctcctccgtcaaacagattcttgcagccagttcagaaaatcgacatgaatctcacagatctcctgggagaactgcagcgcgacccttggccagttcctcaagggaagcgccccctcagatcttcaggcgttgcactaagcattgccgtcggattgctcgagtgcacctttccaaacacaggcgctagaatcatgatgtttatcgggggacccgcaactcaggggcctggcatggtagtgggcgacgaacttaaaacaccgatacggtcatggcatgatatcgacaaggataacgccaagtacgtgaaaaaagggacaaaacactttgaggctttggcaaatcgagcagccacgacgggccatgtgatcgatatatacgcttgcgccctagaccagactgggctcttggaaatgaagtgttgtcccaacctcactggagggtatatggtcatgggggactcatttaacacctctctcttcaaacagaccttccagcgggtctttactaaggacatgcacggtcaattcaagatgggcttcggagggaccctcgagattaaaacctctagagagattaagatttctggtgcgatagggccatgcgtcagcttaaattccaagggaccgtgcgtgtcggagaatgaaattggtactggaggaacatgtcagtggaaaatctgcgggctctcacctacgacaactctggcaatctatttcgaggtggtcaatcagcacaatgcgcctatcccacagggcgggaggggcgctatccaatttgtgacacagtatcagcattcttcaggccagcgtcgcattagggtgacaacaattgcacgaaactgggctgatgcccagactcaaattcagaacattgccgcatcttttgatcaagaagctgctgccatccttatggcccggctcgctatttaccgggctgaaacagaggaggggcctgatgttcttaggtggctcgacaggcagctgatcaggctgtgtcaaaagttcggcgaatatcacaaggatgatccctcatcctttcggttcagcgaaacattctccctgtacccacagtttatgtttcatctccgcagaagcagcttcctgcaggtttttaacaattcaccagatgagtcctcctattataggcaccatttcatgcgacaagacctgacccagagtctgatcatgatccagccaatcctctacgcgtacagtttcagtggaccccctgaaccggtactgctggactcgtccagcattctggctgaccgcatcctgctgatggataccttctttcaaatactgatctaccacggtgaaacgatcgctcagtggaggaaatccgggtaccaagatatgcctgagtacgagaacttcagacatctgcttcaggcacccgtggacgatgcccaggaaatcttacatagtaggttcccaatgcccagatatattgataccgaacacggcggaagccaggcgaggttcctcctgtccaaagtgaatccatcacagacccacaacaatatgtatgcatggggtcaggagagtggtgccccaatcctgacggacgacgtatcactacaggtcttcatggatcatctgaagaagctagcggtgagtagcgcagcctag

SEQ ID NO: 164294 - DNA, 2211 bp, Artificial Sequence
  derived and/or modified sequence
atgaccacataccttgagtttattcaacagaatgaggaacgcgacggcgtgcgcttctcttggaacgtgtggcctagttcccgactagaagccacccgaatggtggttcccgttgccgcattatttactcctctgaaggagagaccagacttaccacccattcagtatgagcccgtgctctgtagccgaacaacttgtagagctgtgctgaacccattatgtcaggtcgattatcgggctaagctgtgggcctgtaatttctgttaccagcgaaatcagagagggccccagatgccccttatctttctgtacgtggttgacacttgcatggaggacgaggatttgcaggcactgaaggaaagcatgcagatgtctctgtctctcctgcctccaacagcgcttgtcggactaattacttttggcaggatggttcaagtgcatgagctcgggtgtgagggcattagtaagtcctacgtcttcaggggcaccaaggacctctccgcgaagcagcttcaagagatgcttggtttgtcgaaggttccgctcacacaggccacccgcgggcctcaagtccagcagccgccaccgagtaaccgtttcctacagccagtgcagaaaatcgatatgaatttaacagatctgcttggggaactgcagcgcgacccttggcccgttccacagggaaagcgccccctgcggagctccggggtagccttgtcgatcgctgtcggactgctggagtgtaccttcccaaacactggagcccggatcatgatgttcattggaggccctgcaactcagggaccggggatggtcgtcggagacgagctgaaaacgccaattcgcagttggcacgatattgacaaagataacgcgaagtatgtgaagaagggtaccaagcactttgaagcactcgccaaccgcgctgccacgacaggccatgtgatcgacatctacgcgtgtgccctggatcagacaggacttctcgagatgaaatgttgtcctaacctgactggaggatacatggtgatgggagactcgtttaacacctccctgtttaagcagacctttcagagggtgttcacaaaagacatgcacgggcagtttaaaatgggttttgggggcacccttgaaatcaagacaagtcgagaaatcaaaattagtggcgctattggtccctgcgtttcactgaattccaaaggtccctgtgtaagtgaaaacgaaatcggcacaggcggcacatgccagtggaagatctgcggactttcacctacaaccacactcgccatttactttgaggtggtgaaccagcacaacgcacctattccccagggcgggagaggcgctatccagttcgtaacacagtatcagcacagctccgggcagaggcggattcgcgtcactacgattgcgaggaactgggccgacgcacaaacccagatccagaacatagccgcgtccttcgatcaggaagcagcagcaatcctgatggcacgcttagctatctaccgtgctgaaacggaggaaggcccagacgtactgcgctggctggatcgtcagttaatccggttgtgtcaaaagttcggggagtaccataaagacgatccgagcagcttccgcttctctgagaccttctcactgtaccctcagttcatgttccatctgcgcagaagctccttcttacaggtcttcaacaatagccctgacgaaagtagctattacagacaccatttcatgaggcaggatttgacacagtcactgatcatgatccagccaatcctctacgcgtactcgttttccgggccccctgagcctgttctgctcgacagctcttctatactggctgatcgcattcttctgatggatacttttttccaaatcctgatttatcacggcgagacaatcgcacaatggagaaagagcgggtaccaggacatgccagaatacgagaatttcaggcacctgttacaagcgccagtggatgatgctcaggagatccttcactctcgtttcccaatgccacggtacatagacacagagcacgggggctcccaagctcgcttcctcttgtctaaagttaacccatctcagacgcataataacatgtatgcttgggggcaggaaagtggtgctccaatcttgaccgacgacgtgagcttgcaggttttcatggaccatctgaaaaaattagctgtgagctcggcagcttag

SEQ ID NO: 164295 - DNA, 510 bp, Artificial Sequence
  derived and/or modified sequence
atgacaacttacttggaattcatccagcagaatgaggaaagggatggggtgcggttcagctggaatgtgtggcccagctccagacttgaagcaacaagaatggtggtgcccgtggcagcccttttcacccccctcaaagaaaggccggatttaccccccatacagtatgaaccggtcctgtgttccaggacaacatgcagagctgtattgaaccccctgtgccaagttgactaccgggcaaaattgtgggcgtgtaacttctgctaccagagaaatcagtttccaccatcttatgctggcatttccgagctcaatcaaccggccgagttattgccacagtttagtagcatagagtacgtcgtcctccggggcccccagatgccgctgatatttctctacgtagtcgatacgtgtatggaagacgaagacctgcaggctctgaaggagtccatgcagatgagtctttctcttttgccaccaacagccctcgttggcctgatcacattttag

SEQ ID NO: 164296 - DNA, 285 bp, Artificial Sequence
  derived and/or modified sequence
atgacgacatacctggagtttattcagcagaacgaggaaagggatggagtgcgcttcagttggaacgtatggcctagtagtcggcttgaagctactaggatggtggtgccagtcgcagctctgtttacacctctgaaggaaaggcccgacctccccccaatacagtacgaacccgtgctgtgcagcaggactacatgtcgcgcggtgctgaaccctctttgccaggtcgactaccgtgcaaagctgtgggcatgcaacttctgctatcagcggaaccaggtgtag

SEQ ID NO: 164297 - DNA, 423 bp, Artificial Sequence
  derived and/or modified sequence
atgactacttatctagagttcatccaacagaatgaggagagggatggagtgagatttagctggaatgtgtggccctccagtcgattggaagccacacggatggtggtgcctgtagcagcactgtttaccccgctgaaggagaggccggacctcccccccatccagtacgagcccgtattgtgttcacgtaccacatgcagagcggtgttgaaccccctttgtcaggtggactatagagccaagctctgggcttgcaatttctgctatcaacgcaaccagttcccaccctcgtatgccgggatctcagagctcaaccaacccgccgagctgttgccccagttttcaagcattgagtacgttgtactgcggggcccccaaatgcccctgatttttctctatgtcgtggatacttgtatggagtag

SEQ ID NO: 164298 - DNA, 2298 bp, Artificial Sequence
  derived and/or modified sequence
atgaccacctacctggagttcatccagcagaatgaggagagagatggagtgcgcttctcctggaatgtgtggcccagcagccggctggaggccaccaggatggtggtgcctgtggccgccctcttcacccccctgaaggagaggccagacctgccccccatccagtatgagcctgtgctgtgcagcaggaccacctgcagagctgtgctgaaccccctgtgccaggtggactaccgggccaagctgtgggcctgcaacttctgctaccagaggaaccagtttcctccttcctatgccggcatcagcgagctgaaccagcctgctgagctgctgccccagttcagcagcattgaatatgtggtgctgcggggcccccagatgcccctcatcttcctgtatgtggtggacacctgcatggaggatgaggacctgcaggccctgaaggagagcatgcagatgagcctgagcctgctgcccccaacagccctggtgggcctcatcacctttggaaggatggtgcaggtgcatgagctgggctgtgagggcatcagcaagagctatgtgttccggggcaccaaggacctgagcgccaagcagctgcaggagatgctgggcctgagcaaggtgcccctgacccaggccacccggggcccccaggtgcagcagcccccacccagcaaccgcttcctgcagcctgtgcagaagattgacatgaacctgacagacctgctgggggagctgcagagggacccctggcctgtgccccagggcaagaggcccctgcggagcagcggcgtggccctgagcattgctgtgggcctgctggagtgcaccttccccaacacaggagcccgcatcatgatgttcatcggcggccctgccacccagggccctggcatggtggtgggagatgagctgaagacccccatccgctcctggcatgacatcgacaaggacaatgccaagtatgtgaagaagggcaccaagcactttgaggccctggccaacagagctgccaccactggacatgtgattgacatctatgcctgtgccctggaccagacaggcctgctggagatgaagtgctgccccaacctgactggaggctacatggtgatgggagacagcttcaacaccagcctcttcaagcagaccttccagagggtcttcaccaaggacatgcacggccagttcaagatgggctttggaggcaccctggagatcaagaccagccgggagatcaagatcagcggggccatcggcccctgtgtgtccctgaacagcaagggcccctgtgtgtctgaaaatgagatcggcaccggcggcacctgccagtggaagatctgtggcctgagccccaccaccaccctggccatctactttgaggtggtgaaccagcacaatgcccccatcccccagggcggccgcggggccatccagtttgtgacccagtaccagcacagcagcggccagaggcgcatccgggtgaccaccatcgccaggaactgggcagatgcccagacccagatccagaacattgctgccagctttgaccaggaggccgccgccatcctgatggcccggctggccatctacagagctgagacagaggagggcccagatgtgctgcgctggctggaccggcagctgatccggctgtgccagaagtttggagagtaccacaaggatgaccccagcagcttccgcttcagcgagaccttcagcctgtacccccagttcatgttccacctgcggcgcagcagcttcctgcaggtgttcaacaacagcccagatgagagcagctactaccgccaccacttcatgaggcaggacctgacccagagcctcatcatgatccagcccatcctgtatgcctacagcttcagcggccccccagagcctgtgctgctggacagcagcagcatcctggccgaccgcatcctgctgatggacaccttcttccagatcctgatctaccacggggagaccatcgcccagtggaggaagagcggctaccaggacatgccagaatatgagaacttccgccacctgctgcaggcccctgtggatgatgcccaggagatcctgcacagccgcttccccatgccccgctacatcgacacagagcacggcggcagccaggcccgcttcctgctgagcaaggtgaaccccagccagacccacaacaacatgtatgcctggggccaggagagcggggcccccatcctgacagatgatgtgtccctgcaggtgttcatggaccacctgaagaagctggccgtgtcctctgctgcctag

SEQ ID NO: 164299 - DNA, 1692 bp, Artificial Sequence
  derived and/or modified sequence
atgctgggcctgagcaaggtgcccctgacccaggccacccggggcccccaggtgcagcagcccccacccagcaaccgcttcctgcagcctgtgcagaagattgacatgaacctgacagacctgctgggggagctgcagagggacccctggcctgtgccccagggcaagaggcccctgcggagcagcggcgtggccctgagcattgctgtgggcctgctggagtgcaccttccccaacacaggagcccgcatcatgatgttcatcggcggccctgccacccagggccctggcatggtggtgggagatgagctgaagacccccatccgctcctggcatgacatcgacaaggacaatgccaagtatgtgaagaagggcaccaagcactttgaggccctggccaacagagctgccaccactggacatgtgattgacatctatgcctgtgccctggaccagacaggcctgctggagatgaagtgctgccccaacctgactggaggctacatggtgatgggagacagcttcaacaccagcctcttcaagcagaccttccagagggtcttcaccaaggacatgcacggccagttcaagatgggctttggaggcaccctggagatcaagaccagccgggagatcaagatcagcggggccatcggcccctgtgtgtccctgaacagcaagggcccctgtgtgtctgaaaatgagatcggcaccggcggcacctgccagtggaagatctgtggcctgagccccaccaccaccctggccatctactttgaggtggtgaaccagcacaatgcccccatcccccagggcggccgcggggccatccagtttgtgacccagtaccagcacagcagcggccagaggcgcatccgggtgaccaccatcgccaggaactgggcagatgcccagacccagatccagaacattgctgccagctttgaccaggaggccgccgccatcctgatggcccggctggccatctacagagctgagacagaggagggcccagatgtgctgcgctggctggaccggcagctgatccggctgtgccagaagtttggagagtaccacaaggatgaccccagcagcttccgcttcagcgagaccttcagcctgtacccccagttcatgttccacctgcggcgcagcagcttcctgcaggtgttcaacaacagcccagatgagagcagctactaccgccaccacttcatgaggcaggacctgacccagagcctcatcatgatccagcccatcctgtatgcctacagcttcagcggccccccagagcctgtgctgctggacagcagcagcatcctggccgaccgcatcctgctgatggacaccttcttccagatcctgatctaccacggggagaccatcgcccagtggaggaagagcggctaccaggacatgccagaatatgagaacttccgccacctgctgcaggcccctgtggatgatgcccaggagatcctgcacagccgcttccccatgccccgctacatcgacacagagcacggcggcagccaggcccgcttcctgctgagcaaggtgaaccccagccagacccacaacaacatgtatgcctggggccaggagagcggggcccccatcctgacagatgatgtgtccctgcaggtgttcatggaccacctgaagaagctggccgtgtcctctgctgcctag

SEQ ID NO: 164300 - DNA, 2211 bp, Artificial Sequence
  derived and/or modified sequence
atgaccacctacctggagttcatccagcagaatgaggagagagatggagtgcgcttctcctggaatgtgtggcccagcagccggctggaggccaccaggatggtggtgcctgtggccgccctcttcacccccctgaaggagaggccagacctgccccccatccagtatgagcctgtgctgtgcagcaggaccacctgcagagctgtgctgaaccccctgtgccaggtggactaccgggccaagctgtgggcctgcaacttctgctaccagaggaaccagaggggcccccagatgcccctcatcttcctgtatgtggtggacacctgcatggaggatgaggacctgcaggccctgaaggagagcatgcagatgagcctgagcctgctgcccccaacagccctggtgggcctcatcaccttcggccgcatggtgcaggtgcatgagctgggctgtgagggcatcagcaagagctatgtgttccggggcaccaaggacctgagcgccaagcagctgcaggagatgctgggcctgagcaaggtgcccctgacccaggccacccggggcccccaggtgcagcagcccccacccagcaaccgcttcctgcagcctgtgcagaagattgacatgaacctgacagacctgctgggggagctgcagagggacccctggcctgtgccccagggcaagaggcccctgcggagcagtggagtggccctgagcattgctgtgggcctgctggagtgcaccttccccaacacaggagcccgcatcatgatgtttattggaggccctgccacccagggccctggcatggtggtgggagatgagctgaagacccccatccgctcctggcatgacatcgacaaggacaatgccaagtatgtgaagaagggcaccaagcactttgaggccctggccaacagagctgccaccaccggccacgtgattgacatctatgcctgtgccctggaccagacaggcctgctggagatgaagtgctgccccaacctgaccggcggctacatggtgatgggagacagcttcaacaccagcctcttcaagcagaccttccagagggtcttcaccaaggacatgcacggccagttcaagatgggctttggaggcaccctggagatcaagaccagccgggagatcaagatcagcggggccatcggcccctgtgtgtccctgaacagcaagggcccctgtgtgtctgaaaatgaaattggaactggaggcacctgccagtggaagatctgtggcctgagccccaccaccaccctggccatctactttgaggtggtgaaccagcacaatgcccccatcccccagggcggccgcggggccatccagtttgtgacccagtaccagcacagcagcggccagaggcgcatccgggtgaccaccatcgccaggaactgggcagatgcccagacccagatccagaacattgctgccagctttgaccaggaggccgccgccatcctgatggcccggctggccatctacagagctgagacagaggagggcccagatgtgctgcgctggctggaccggcagctgatccggctgtgccagaagtttggagagtaccacaaggatgaccccagcagcttccgcttcagcgagaccttcagcctgtacccccagttcatgttccacctgcggcgcagcagcttcctgcaggtgttcaacaacagcccagatgagagcagctactaccgccaccacttcatgaggcaggacctgacccagagcctcatcatgatccagcccatcctgtatgcctacagcttcagcggccccccagagcctgtgctgctggacagcagcagcatcctggccgaccgcatcctgctgatggacaccttcttccagatcctgatctaccatggagagaccatcgcccagtggaggaagagcggctaccaggacatgccagaatatgagaacttccgccacctgctgcaggcccctgtggatgatgcccaggagatcctgcacagccgcttccccatgccccgctacatcgacacagaacatggaggcagccaggcccgcttcctgctgagcaaggtgaaccccagccagacccacaacaacatgtatgcctggggccaggagagcggggcccccatcctgacagatgatgtgtccctgcaggtgttcatggaccacctgaagaagctggccgtgagcagcgctgcctag

SEQ ID NO: 164301 - DNA, 510 bp, Artificial Sequence
  derived and/or modified sequence
atgaccacctacctggagttcatccagcagaatgaggagagagatggagtgcgcttctcctggaatgtgtggcccagcagccggctggaggccaccaggatggtggtgcctgtggccgccctcttcacccccctgaaggagaggccagacctgccccccatccagtatgagcctgtgctgtgcagcaggaccacctgcagagctgtgctgaaccccctgtgccaggtggactaccgggccaagctgtgggcctgcaacttctgctaccagaggaaccagtttcctccttcctatgccggcatcagcgagctgaaccagcctgctgagctgctgccccagttcagcagcattgaatatgtggtgctgcggggcccccagatgcccctcatcttcctgtatgtggtggacacctgcatggaggatgaggacctgcaggccctgaaggagagcatgcagatgagcctgagcctgctgcccccaacagccctggtgggcctcatcaccttctag

SEQ ID NO: 164302 - DNA, 285 bp, Artificial Sequence
  derived and/or modified sequence
atgaccacctacctggagttcatccagcagaatgaggagagagatggagtgcgcttctcctggaatgtgtggcccagcagccggctggaggccaccaggatggtggtgcctgtggccgccctcttcacccccctgaaggagaggccagacctgccccccatccagtatgagcctgtgctgtgcagcaggaccacctgcagagctgtgctgaaccccctgtgccaggtggactaccgggccaagctgtgggcctgcaacttctgctaccagaggaaccaggtgtag

SEQ ID NO: 164303 - DNA, 423 bp, Artificial Sequence
  derived and/or modified sequence
atgaccacctacctggagttcatccagcagaatgaggagagagatggagtgcgcttctcctggaatgtgtggcccagcagccggctggaggccaccaggatggtggtgcctgtggccgccctcttcacccccctgaaggagaggccagacctgccccccatccagtatgagcctgtgctgtgcagcaggaccacctgcagagctgtgctgaaccccctgtgccaggtggactaccgggccaagctgtgggcctgcaacttctgctaccagaggaaccagtttcctccttcctatgccggcatcagcgagctgaaccagcctgctgagctgctgccccagttcagcagcattgaatatgtggtgctgcggggcccccagatgcccctcatcttcctgtatgtggtggacacctgcatggagtag

SEQ ID NO: 164304 - DNA, 2298 bp, Artificial Sequence
  derived and/or modified sequence
atgaccacctacctggagttcatccagcagaacgaggagcgggacggcgtccggttcagctggaatgtttggccctcgtcacggttggaagcgacccggatggtggtgccggtagccgccctgttcacaccccttaaggagagaccagatctgccccccatccagtacgagccagttctatgtagccggaccacctgtcgcgcagtcttaaatcccttatgtcaagtagactatagggccaagctgtgggcttgtaacttttgttaccagagaaatcagttcccccccagttacgcaggaatctcagaactgaatcagcctgcagagctcctgccacaattctcctcaatcgagtacgtggtcctgaggggccctcagatgcctttgattttcctgtatgtggtggacacctgtatggaagacgaggaccttcaagccctgaaggaatccatgcagatgagcctgtcactgttgcccccaaccgccttggtgggtttgattaccttcggaaggatggttcaggtacatgaactggggtgcgagggtatctcaaaatcctatgtgtttcgaggtacaaaagatttatccgccaagcagctgcaggaaatgctcggtctgagtaaagtccccttaacccaggccacacgcggacctcaggtccagcagcctcccccctcaaatcggttcttacagccagtacaaaaaatagatatgaacttaactgatttattgggcgagctgcagcgcgacccttggcctgtgcctcaagggaagcgcccactccgcagctctggcgtggctctgagtatcgcagtcgggttactggagtgcacttttccaaacactggagcgagaattatgatgttcatcgggggccctgctacacaaggcccagggatggtagtgggggatgagctgaagaccccaatacggagttggcacgacattgacaaggataacgccaagtatgtgaagaaaggcactaaacactttgaggcactcgccaatagagccgcgacgactggacatgtgatcgatatctacgcctgtgcactggaccaaacagggctactggaaatgaaatgctgccccaacctgacaggcggctatatggtgatgggagactcctttaatacctcattattcaaacaaacttttcaacgggtattcaccaaggatatgcatggccagttcaagatgggtttcgggggcacactcgaaattaagacgtcccgggagattaagatctccggtgcaattgggccttgtgtgagcctgaacagtaagggcccttgtgtgtcagaaaatgagattggtaccggaggcacatgccaatggaagatttgtggactgagtccgaccacaacactggccatttatttcgaagtcgttaaccagcacaacgcacccatccctcagggtggaaggggcgccattcaattcgtcacgcagtaccagcacagtagcgggcagagaaggatcagggtgaccaccatagcccggaattgggccgacgcccagacccaaattcaaaatattgctgcctcttttgaccaggaggcggccgctattcttatggctagactggccatttatagagctgaaacagaggaaggcccagatgtgcttcgctggttggatcgacagctgataaggttgtgtcagaagtttggggaataccataaagacgacccatcctcatttcgcttctccgaaacttttagcctttaccctcaatttatgtttcacctcagaaggagctctttcctccaagtgtttaacaactctcccgacgaaagcagttactaccggcaccacttcatgcgccaagacttaacacaatctctgattatgattcagccaatcctgtatgcgtactctttctcggggccccctgagcccgtgctgcttgactcctctagtattttggctgaccgtattctgctgatggacaccttcttccagattttaatctaccacggcgagacaatcgctcaatggcggaagagcggctatcaggacatgcctgaatacgagaactttcggcatctgctccaagcccctgtcgacgacgcccaggaaatactgcactcaaggtttcctatgcccagatacatcgacacagagcacggtggctctcaggcccgatttctgctttcgaaggttaaccccagccaaacccacaacaatatgtatgcttggggccaagaaagcggtgcgccgatccttacagacgacgtgtcactgcaggtctttatggatcatttaaagaagctggctgtcagcagcgctgcatag

SEQ ID NO: 164305 - DNA, 1692 bp, Artificial Sequence
  derived and/or modified sequence
atgctgggcctgagcaaggtgcccctgacccaggccacccggggcccccaggtccagcaaccaccacctagcaaccgattcctccagcccgtgcagaagattgacatgaacctcacagatctgttgggagagctccagcgggacccctggcccgtcccccaaggaaaacgaccgttgagatcttctggagtagcactcagcattgctgttggactgctcgagtgcacattccctaatacgggtgcgaggattatgatgttcatcggaggtccggcaacacagggacctggtatggtggtgggggatgagctgaaaactccaattaggagttggcatgatatcgacaaggacaacgccaagtatgtcaagaaaggcacaaagcattttgaagcactcgcaaaccgtgcagccacgaccggccatgttatagatatctatgcctgcgccctcgaccagaccgggctactggaaatgaagtgctgtcctaatctgacagggggatatatggttatgggcgacagttttaacacctccttgtttaaacagacattccaacgggtgttcactaaggatatgcacgggcagtttaagatgggattcggaggtactctggagatcaaaacatctcgcgagattaagatcagcggtgctattggtccatgcgtgagcttaaactctaagggaccatgcgttagtgaaaacgaaataggaacaggtggtacctgccagtggaagatctgcgggctgtcacctaccaccaccctagcaatttacttcgaggtcgtgaatcagcataacgccccgatccctcagggaggtagaggcgctatccagtttgtgacgcaatatcagcattccagtgggcaaaggcgcattagggtcaccacaattgccagaaactgggctgatgcccagactcagattcagaatatcgctgcttccttcgaccaagaggccgccgctatcctgatggccaggttagccatctatagggccgagacagaggaaggcccggacgtgctgagatggctggacagacagctgatcagactgtgtcagaaatttggcgagtaccacaaggatgatcccagctccttcaggttctccgagaccttcagtttgtaccctcagtttatgttccatttacggcggtcttccttcctgcaggtattcaacaattcacctgacgaatcatcatactaccggcaccactttatgagacaggacttgacacagtccctgattatgatccagcctattctgtacgcatactcattctccggccccccggagcccgttttactcgattcaagttcaattctggccgatcgcattttgcttatggatacgttctttcagatactcatttaccatggcgaaacaattgcccaatggcggaagagcggttaccaagacatgccagaatatgaaaatttccgccacctcctgcaggcgcctgtggatgatgcacaagagatcctccactctagatttcccatgcctcggtacatcgacaccgagcatggtggctctcaggccaggttcctcctcagcaaagtgaaccctagtcagactcacaataatatgtacgcctggggtcaggagagcggcgcccctattcttaccgatgatgtgtcactgcaggtgttcatggatcatctgaagaaacttgccgtgtccagtgccgcctag

SEQ ID NO: 164306 - DNA, 2211 bp, Artificial Sequence
  derived and/or modified sequence
atgaccacctacctggagttcatccagcagaacgaggagcgggacggtgtgagattcagctggaacgtctggcctagttcacggctggaagcaacacgcatggtcgtaccggtcgccgccctgttcacgcctcttaaggaacggcctgacttgcctcccatacagtacgaaccagttctatgttcacgaaccacctgtcgggctgtactcaaccccctttgtcaggtggactaccgcgcaaagctctgggcttgcaatttctgctatcagaggaaccagagggggccccagatgcccctgattttcctctatgtggtagatacctgtatggaagatgaggatctccaggcactgaaagagagcatgcagatgtctctgtccctcctcccgccaactgctcttgtcggcttaattacctttggaaggatggtgcaggtccacgagctgggttgcgaaggaatttccaaaagctacgtgttcagggggacgaaggacctgagtgccaaacagcttcaagaaatgctggggctatctaaagtccccctgacccaggctactcgcgggccccaggtgcagcaaccaccaccaagcaaccggttcctgcagcctgtccaaaaaatcgacatgaatctcactgacttgctgggggagcttcagcgagatccctggcctgtcccacaagggaagagaccattgcgctcctccggggtagcattatcaatagccgttggcctgcttgaatgcacgttcccaaacactggcgccagaatcatgatgttcatcggcggccctgccacccagggcccgggtatggtggtgggtgacgagttgaaaacccccatcaggtcctggcacgacatcgacaaggataacgcgaagtacgtcaaaaagggcactaaacatttcgaggcattagcgaatcgtgcagccactacaggccacgtgatcgatatatacgcttgtgccctcgaccagactggactactcgagatgaagtgttgtcctaacctgaccggcggatatatggtgatgggcgactctttcaatactagtctattcaaacagacttttcagcgagtgttcactaaagacatgcatgggcagtttaagatggggttcggcggcacacttgaaataaaaacttcgagagagattaagatcagcggcgctattggcccttgtgtgtccctcaattcgaaggggccttgtgtatctgagaatgagatcggtactggaggtacatgtcaatggaagatctgcggactctccccaacgaccacgctcgctatatacttcgaagttgtcaatcagcacaatgccccaatcccacagggaggccgcggggctattcagttcgtgacacagtaccagcattcttccggccagcgccggatcagggttacaaccattgctcggaattgggccgacgcgcaaacccaaattcagaatatcgctgcctcattcgaccaggaagccgccgccattcttatggcacgtcttgccatttatcgcgccgagactgaggagggaccggacgtcctacggtggctcgacaggcagctgatccggttatgtcagaaatttggggagtatcataaggacgacccttcctcatttcggttctccgaaacattctccctgtaccctcaattcatgttccacctgaggagatccagtttcctgcaggtgtttaataactctccagatgagagctcatactaccggcaccacttcatgaggcaagacctcactcaatccctcattatgattcagcccatcctgtacgcctacagttttagcggtcccccggaacccgtgctgctggactcttcaagcatcctggctgatagaatactcctcatggatacattctttcagattctgatttatcatggcgagacgatcgctcagtggcggaagagcgggtatcaggatatgccggagtacgagaacttcaggcacctgctgcaagctcctgttgatgacgcccaggaaatcctgcactcacggttccccatgccgaggtatatagacacagagcacgggggatcccaggccaggttcttgctgtcgaaggttaaccccagccagacacataacaatatgtacgcgtggggtcaggagagcggcgcccctatccttacggacgacgtgtccctccaagtgtttatggaccatctgaagaagctggcagtgtcttccgccgcctag

SEQ ID NO: 164307 - DNA, 510 bp, Artificial Sequence
  derived and/or modified sequence
atgaccacctacctggagttcatccagcagaacgaggagcgggacggcgtgagattctcttggaatgtatggccctcttcacgcctggaggcaacaaggatggtggtccccgttgccgctctttttacaccacttaaggagaggcctgatttgcctccaattcagtacgagcccgtactctgctctcgcaccacttgccgagctgtgctcaatcctctatgtcaggtcgactaccgggctaaactgtgggcttgtaacttttgttaccagcgcaaccaattcccccctagttacgccggcatttccgaactgaatcaacctgctgaacttctgccacaattttctagcatcgagtacgtcgtcctgcgcggcccccaaatgcctttgatctttctctacgtagtagatacttgtatggaagatgaagaccttcaggcactaaaagagtcaatgcagatgtctttgagcctgctgcctccaacggcattggtgggcttaattaccttctag

SEQ ID NO: 164308 - DNA, 285 bp, Artificial Sequence
  derived and/or modified sequence
atgaccacctacctggagttcatccagcagaacgaggagcgggacggtgtgaggttttcatggaatgtctggccatcttcacgactcgaagccaccaggatggtggtgcccgtcgcagctctgttcacgcctctcaaggaacgtcccgatctccctccaattcaatacgaacctgttctgtgctccaggaccacatgcagagccgttctaaacccactttgccaggtcgactatcgggcgaaattatgggcgtgcaacttttgttaccagcgaaatcaggtgtag

SEQ ID NO: 164309 - DNA, 423 bp, Artificial Sequence
  derived and/or modified sequence
atgaccacctacctggagttcatccagcagaacgaggagcgggacggagtgagattttcctggaatgtctggccatcttcacgcctggaggctacacgtatggttgtaccagtcgcagcactgttcacacccctgaaggagcgccccgatctgccccccattcagtatgagccagtgctctgttctcgcaccacgtgtcgcgccgtactgaatccactgtgtcaagttgactatagagcgaagctgtgggcttgcaatttctgttatcaaagaaatcagtttcctccgagctacgcagggatcagcgagctcaatcagccagcggagcttctaccacaattttcgagcatcgaatacgtggtactgagaggccctcaaatgcccctgatcttcctttatgtagtggacacatgtatggaatag

SEQ ID NO: 164310 - DNA, 2298 bp, Artificial Sequence
  derived and/or modified sequence
atgacgacatacctggaattcattcagcagaatgaagaacgggacggcgtgagattctcttggaatgtttggccgtcctctcggctggaggccacacggatggtggtgccagtcgccgctctcttcacacccctgaaggaaagacccgaccttccccctattcagtacgaaccagttctgtgttctcgcacaacctgtagggcagttttgaaccccttatgtcaagtggattatcgagctaaactatgggcctgtaacttttgttatcagcgcaatcagtttcccccatcctatgccggaatatcagagttgaaccaaccagctgaacttctgccgcagttcagttcaatcgaatatgtggttctaaggggcccacagatgcccttaatctttctttacgtggtagatacctgtatggaagatgaagacctgcaggccctgaaggaatcgatgcagatgtccctgagccttttacctcctacggcccttgtcggcttgatcacatttggacgcatggtgcaggtccatgagctgggttgtgaaggaatatcaaaaagctatgtatttagggggacaaaagatctgagtgccaaacagttacaagagatgttgggactcagcaaagtgcccctcacacaggctactcgaggtcctcaggttcagcagccacctccttcaaatcgatttctgcagcctgtgcaaaagatcgatatgaatctcactgatctcctgggggagttgcagagggatccttggccagtccctcagggtaagcggcctctgaggagctctggcgttgccctgagcatcgctgtgggactactggagtgcactttccccaataccggagccagaattatgatgttcatcgggggaccagctacccagggcccaggcatggtggtgggtgatgaactgaagacccccatcagatcgtggcatgatatagacaaagacaatgctaagtatgtcaaaaaaggtactaaacatttcgaagccctcgcaaatcgagccgcaaccactggacacgtgattgacatttatgcctgcgctcttgaccagacaggactccttgaaatgaagtgctgcccgaatctcacaggaggctatatggtgatgggagactcatttaatacatctttgtttaaacagacatttcagagggtattcaccaaagatatgcatggccagtttaaaatggggtttggaggcactttggaaatcaaaacaagccgggagataaaaattagcggggctattggcccttgtgtgagtctcaactctaaaggcccttgcgtgagtgaaaatgagattgggactggtggtacttgtcagtggaagatatgcggcctatctcccactacaactctggccatttacttcgaggtggtcaaccagcacaacgcgcctattccacagggcggtcgaggcgcaatccagtttgtgacacagtaccagcattcatccggacagcggcgtatccgcgtgacgactatcgccagaaattgggcggacgcacagacgcagatccagaacatcgccgcatcatttgatcaggaagcggctgcaatcctgatggcccgtcttgccatataccgggcagaaacagaagaaggccctgatgtcctccgatggctggatcggcagctcatacggctgtgccagaaatttggggaatatcataaagatgatcctagctcattccggttttccgagacttttagcctgtaccctcagtttatgttccatctcagaagaagtagcttcttgcaggtcttcaataactctcctgatgagagttcttactaccgccatcacttcatgaggcaggacctgacgcagagcttgatcatgatccagccgatcttatatgcctacagctttagtgggccacccgagccggtgcttctagacagttcaagtattttagcggatagaattctgctgatggacacattttttcagatactgatctaccacggcgagacaattgctcagtggaggaagagtgggtaccaggacatgcccgaatatgagaattttaggcaccttctccaggcccctgtggatgacgctcaagaaattctccattcgagattccctatgcctcgatacatagacaccgaacatggagggtcccaagctaggttcctgctgagcaaagtgaacccatcccagacgcataacaatatgtacgcctgggggcaggaatctggagctccaattctgactgacgatgtgagcctccaggtgttcatggaccacctcaaaaagctagcagtgtcctctgcggcttag

SEQ ID NO: 164311 - DNA, 1692 bp, Artificial Sequence
  derived and/or modified sequence
atgttgggccttagtaaagtgcccctcacccaggccacgagagggccacaggtccagcagcctccccctagcaacagattcttacagccagtccagaagattgacatgaacttgactgacctgttaggggagctgcagagggatccatggccagtgccgcaaggtaagagaccgttgaggtccagcggcgtggcgcttagcatagcagtgggcctgctagagtgcacatttcccaacactggggcacgtatcatgatgtttattgggggacctgctacccaaggacccggaatggtggtcggagatgagttgaagaccccaatccgctcttggcacgatattgataaggacaacgctaaatatgtgaagaaaggcacgaagcactttgaggcccttgccaacagagccgctactacggggcatgtaattgacatctatgcatgtgccctggaccagacagggctgcttgaaatgaagtgctgccccaatctcacgggcggttatatggttatgggggatagttttaacacgtcgctttttaagcagactttccagcgcgtattcacaaaagacatgcatggacagtttaagatgggcttcggcggtacgcttgagatcaagacttccagggaaatcaagatatccggcgcaataggcccatgcgtttccctgaattctaagggcccttgtgtctccgagaacgaaatcggtaccgggggaacctgtcagtggaaaatctgtgggttaagcccgacaaccacactggctatctatttcgaggtggtcaaccagcacaacgctcccattcctcaggggggacgcggtgctattcagtttgtgacccagtaccagcactcaagcggccagcggagaatcagggtcaccacgatcgcccgtaattgggcagacgcccagactcagatccaaaacatcgctgctagttttgaccaggaggcggctgccatcctcatggctcggctcgccatctaccgagccgaaaccgaggagggcccagatgtcctccgctggctggacaggcaactgatacgcctttgtcaaaagttcggtgagtaccacaaggatgatccctcatcctttcgtttttccgaaacattcagcctgtaccctcagttcatgtttcatttgagaaggagtagcttcctgcaagtcttcaataatagcccggacgaaagttcctattaccggcatcattttatgcggcaggatcttactcaatcccttattatgattcagcccattttgtatgcttattccttcagtggtcccccagaacctgtccttctcgattcttctagcatccttgccgaccgcatactgttaatggacaccttttttcagattctaatttatcacggggaaacaatagctcagtggcggaagtcaggataccaggacatgccagagtacgagaatttccggcacctgctgcaggcccctgtggacgacgctcaggagatcttgcatagtagattcccaatgccgagatatattgatacggaacatggaggcagtcaggctcggttcctgctgtccaaagtgaatccctcacaaacccataataatatgtatgcttggggccaggagtccggagcgccaatcttaacagatgacgttagcctgcaagtgttcatggaccacctgaagaagttggccgtgtcctcagccgcatag

SEQ ID NO: 164312 - DNA, 2211 bp, Artificial Sequence
  derived and/or modified sequence
atgaccacttatctcgaatttatacagcagaatgaggagcgcgacggagttcgcttcagttggaatgtgtggccatcttctcggttagaggccacacggatggtggtgcccgtcgctgcactctttactcctttaaaagaaagacccgatctcccgccaatacaatacgagcctgtactgtgtagccgcactacctgccgggcagtgttgaaccccctgtgtcaggtcgactatagggctaagctatgggcgtgcaatttttgttaccagcgcaaccagcgtgggccacaaatgcctctgatctttctttacgtggtggacacatgcatggaggatgaggatcttcaggcactgaaagagtctatgcaaatgtccctgtcgttgcttccaccaaccgccttggtgggcctgataaccttcggacgcatggttcaggttcacgagctgggttgcgaaggaattagcaaatcttacgtgttccggggaacaaaggatttgagcgccaagcaattgcaggagatgcttggcctgagcaaagtgccactgacacaggccacccgaggccctcaggtgcagcagccccctccttctaaccgctttctccagccagtgcagaagatagacatgaatctgaccgatctgcttggcgagctccagcgcgacccatggcctgtgccacagggcaaaaggcctctgaggtcctcgggagtggccttgtccatcgccgtgggcttacttgagtgtacattccctaacacaggagctcgaatcatgatgtttatcggtggccctgccactcagggcccaggcatggtcgtgggggacgaacttaagacacctattagatcttggcacgacatagataaggataacgctaaatacgttaagaaggggacgaagcactttgaggccctggcgaatcgagccgctaccactggccatgtgatcgacatctatgcttgcgcgctagaccagactgggctccttgagatgaaatgctgcccgaacctaacaggaggttacatggtcatgggcgatagttttaacacatcattgtttaagcagactttccagagagttttcaccaaagatatgcacggtcaatttaaaatgggtttcgggggtacgttagagattaagacaagtcgggagataaagatttctggagctattgggccatgtgtgtccctgaacagcaaaggaccttgtgtgagtgaaaacgagatcggaaccggaggaacatgtcagtggaagatctgcggtcttagtcctacaactaccttagctatttatttcgaagtggtcaaccagcacaatgcccctattcctcaagggggtcggggagctatccagttcgtgacacagtaccaacactcttcaggacaacgcagaattcgtgtgacaacaatcgccaggaactgggctgatgcccagacgcagatccagaatatagcagcaagtttcgatcaggaggcagctgccattcttatggcacggctggctatctatcgagctgaaacagaggagggaccggacgtgttgaggtggctcgaccgacagctaatccggctctgccagaaattcggtgagtaccataaagacgatccaagttcattccgattcagcgagacgttctccctgtatccccagttcatgtttcatctaagacgcagctcatttcttcaggtttttaacaactcaccagatgagagttcatattaccgacaccacttcatgcgtcaggacctgacccagagtctgattatgattcaaccaatattgtatgcctacagtttttctggacctcccgaacccgtactattggatagtagcagtatactggccgatcgtatcttgctcatggataccttctttcaaattttaatttaccacggggagactatagcccagtggcgaaaatctgggtaccaggacatgcccgagtacgaaaactttcggcatctgcttcaggcacctgttgatgacgctcaagagatcttgcactctaggtttccaatgcctaggtacatcgacactgagcacggaggtagtcaggccagatttctgctcagtaaggtcaacccttcccagacgcacaataatatgtacgcctggggccaagaatctggcgctccaatactgaccgatgatgtgagtcttcaagtcttcatggaccacctcaaaaaactggccgtgagtagcgctgcttag

SEQ ID NO: 164313 - DNA, 510 bp, Artificial Sequence
  derived and/or modified sequence
atgacaacttatctggaattcatccaacagaacgaggagcgcgacggcgtgaggtttagctggaatgtgtggccgtctagcaggctggaggccactcgcatggtagtgcctgtcgccgctctgtttacccctttgaaggaacgcccagacttgccccctattcaatacgagcccgtcctttgttctagaacgacttgtagggccgtgttgaaccccctgtgccaggtggactatagagccaagctgtgggcctgcaacttttgttaccaacggaatcagtttccaccaagctatgcgggaatctctgaactgaatcaacccgctgagctgctccctcagtttagctccatcgaatatgtagtgctccgcggaccgcagatgccgttgatctttctgtatgtggtcgacacctgtatggaggacgaagacctccaagccctgaaggagagcatgcagatgtccctttctctgcttccacctacagctctcgtggggctgatcaccttttag

SEQ ID NO: 164314 - DNA, 285 bp, Artificial Sequence
  derived and/or modified sequence
atgacgacatatctcgagttcattcagcagaacgaagagagagacggagtgagattctcttggaacgtttggccctcatccagactcgaagcaacacgcatggtggtgccagttgcagctctcttcactccgcttaaagagaggccggatttgcccccaatacagtatgagccggtgttgtgtagccgaacaacctgcagagctgtgctgaaccctttgtgccaggtggactatcgggctaagctgtgggcttgtaatttttgctatcaaagaaatcaagtctag

SEQ ID NO: 164315 - DNA, 423 bp, Artificial Sequence
  derived and/or modified sequence
atgacaacatacttggaatttatccagcaaaatgaagaaagggacggggtccggttttcttggaatgtgtggccctcatcacggcttgaagccacccgtatggtggtccctgtcgccgcactctttacacccctcaaggaacgacctgacctgccacctattcagtacgagccagtactatgttccagaacaacttgtagagccgtgctcaacccactttgccaggtggactatcgagcaaagctgtgggcatgcaacttttgctaccaaaggaaccagtttcctccctcctatgcgggaatcagtgagcttaatcagcccgctgagctgctgccacagttcagtagtattgagtacgtcgtgctccgaggacctcagatgcctttgatcttcctatacgtcgtggatacttgtatggaatag

SEQ ID NO: 164316 - DNA, 4135 bp, Artificial Sequence
  derived and/or modified sequence
acgctgtggctttagggagctgggaaaggcgctctctcccggtcccgctctgcccggtcccacgcccctcggccgtccggctgcctgggtcttccgggttcttccgcccctctggctcggtccccgctacctctcctccctcctcccctctcggtaccttcgcccgccgcgcgcctttctcaaatcctccggttattaagcaagctcaggggtccggtggcctgccctggtaactctgcgcccgccccttcctgcccccttcctgccctcacgccccgtcccctcctcttgacgtggcagaggcggcgccagccatgttggccgggcggaggtcttcgctgaggcccggggcggggtggcgccacccctgattgcggtgccacggactgctcctgctgggcggagaggacagattttgcaaagcggaggctgcgacgggtcctgcagggggacagtgaggaaagggccgcctcgtctccgctcctgggggaccgcagaaataagaatcaaactccacaatgacaacctatttggaattcattcaacaaaatgaagaacgagatggagtccgatttagttggaatgtttggccatcaagtcgactggaagctacaagaatggttgttcctgtggcagccctgtttacaccactgaaagagagacctgacttaccacctattcaatatgaacctgttctgtgtagtaggaccacttgccgtgcagttttgaatcctttatgtcaagtggattatcgagcaaaactttgggcttgcaacttttgttaccaaaggaatcagtttccacctagttatgctggtatatctgaactgaatcagcctgctgaacttttacctcagttttctagcattgaatatgtagttctgcgtggtcctcagatgcctttgatattcctctatgtggttgatacttgcatggaagatgaagatttacaagccctgaaagaatccatgcagatgtcattaagtcttttaccacctacagctttggttggacttattacttttgggagaatggttcaggttcatgaacttggatgtgaaggcatttcaaaaagctatgtcttcagaggaacaaaagatttgtctgccaaacaactgcaggaaatgctggggctctctaaagtaccacttactcaagcaacacgtggtcctcaggtacagcagccacctccttccaacagattcttacaaccagtacagaaaatagacatgaatctcacagatcttctgggagaactccagcgagacccttggcctgtaccacagggaaagagacctttgcgttcctctggggtggcactttccatagctgtaggactgctggagtgtacttttcccaacactggtgctcgtatcatgatgttcattggtggtcctgctactcaggggcctggaatggtggttggagatgagttgaagacacctataagatcgtggcatgacattgacaaagacaatgccaaatatgttaaaaagggaactaagcattttgaagcattggctaatcgagctgctacaactggccatgttattgatatctatgcgtgtgcattagatcagacaggtctcctggagatgaaatgctgtcccaaccttactggaggatacatggtaatgggtgattctttcaatacttccttattcaaacaaacttttcaaagagtctttaccaaagacatgcatggacagtttaaaatgggctttggtggtacgctagaaataaagacctcaagggaaataaagatttcaggagctattggaccctgtgtgtcactcaattctaaaggaccctgtgtgtctgaaaatgagataggaacaggtggcacatgtcagtggaagatatgtggacttagtcccactacaaccttagccatatattttgaggttgtcaatcagcataatgctccaattcctcaaggagggcgtggtgcaatccagtttgtgactcagtatcagcattcaagtgggcagagacgcatccgagtgaccaccattgctaggaactgggcagatgctcaaactcaaatccaaaacattgctgcatcttttgaccaggaggcagctgccattcttatggcccggctagcaatatatagagcagaaacagaagaaggtccagatgtgcttaggtggctggacagacagctcattcgactgtgtcagaaatttggagaatatcataaagatgacccaagttccttcagattttcagaaactttctccctttatccacagtttatgtttcatttaagaagatcttctttcctgcaagtttttaacaatagtcctgatgagagttcatattatcgtcaccattttatgcgtcaagatctgacccagtctctaattatgattcagcctatcctgtatgcgtattcttttagtggaccaccagagccggttcttcttgatagcagtagcattcttgcagatcgtattcttctcatggacacattcttccagattttgatttatcatggtgagaccatagcacagtggcggaagtcaggataccaggatatgcctgagtatgaaaatttccgccaccttctgcaagccccagtggatgatgcacaggaaattcttcactccagatttccaatgccaagatacattgacactgaacatggaggcagccaggcccgtttcctcctttcaaaagtcaacccttcacagactcataataatatgtatgcctgggggcaggagtctggagcacctattcttacagatgatgttagtttacaagtgtttatggatcacttgaagaaacttgctgtgtccagtgctgcttgaagtgctaataatgttaaagacacttaagaagatgaaataatattcaaatttcattttttcctttttccatttatctgtggaaaccaacagatattgctctatattttttgtattagtatggtttgagacaacatatggaaaatgttcacatttgtagattaagctggaattataatgagagcaataagaacaaatttattttgcttaccacagtgttatagctggttctagaaatttgaagtctttataacttaattatgtttaataaaaaatagagtctgcctcgtactacagatgtaactcatttgtatattgcagacagacccaaagtggcactgaattttcttgctcaccttttaaaaacttgttccttaattttagccagaaagcaaaaaaacaatagtaatgataaatgtgaacatttttgcttattcattgaatatttttctgtaattttcagcacttatgtatacactttttctgtacttactaggttaaggcagatttatttttatgatttgtttaggaattatttgattttataatggtaattttcatgatgataatgtttttggttatttggaaagatagtttagagatgaaaggtttttttgggtaacaatcccgcagctgacaaaaaatgtgaaatttccacaaaatatccaacttatgtgactaaacgcagtagtttttttaaaaggggagatagaaaataaatggttttgttggagtgcattttagtaagcctttgcagtaaaatgacggttgtaactactaaaccaaatttagttttcacagcatggttttgttgttttccccttgtttttcagaggtaaattttgcattatatccttcagtattttaacactattttggcagtttacacattactttttgtttttccttcctttttgtgaaatgtattaagttgtggttcttattgaaacagtattatataatgtttgcttaattatatcatgtgatgctcagttctattttgatttattcattagtattcacttttacctttaaagtttacttgtagcaaatatgtttacattgataaagccagatatgttttgacaatgaaatttacatatcaagtactgcaaataaaaggtggtgctatgatatatgcttaggaggacagttttaatgattgtacttgcatgaacacaatcatatgatggtaaagcagaaacttaagaaaaaattgtttatgtgttatattcaattagcttaaataagttgctttgttatattttatttgaattgaactacgctaggcctaaatgccaataaaatatacttttcactgt

SEQ ID NO: 164317 - DNA, 4215 bp, Artificial Sequence
  derived and/or modified sequence
tctcgctctgtcacccgggctggagtgcggtggcacgatctcagctcactgcaacctctgcctcttgggttcaagcgcttctcttgcctcagcctcccaagtagctgggattacaggagcataccaccatgccttactaatttttgtatttttagtagagttggtgcttcaccatgttagccaaggttggtcttgaacttctgaccttgtgatttgcccaccttgacctcccaaagtgctgggattacaggcatgatccaccgcacctggccctaatttttgtatttttagtagacatggggtttcaccatgttggccaggctggtcttgaactcctgacctcaggtgatccacccgcctcggcctcccaaaatactgggattacagctgtgattcactgcgcctggccacatcttccttttttcaataggcaagtgaatgcctgcagactgaattttttttctccattgaaacatgtttattttctttccctatttagattaaatttccctattctttccctattattagttgaaaagagcctggcctttgctccccagatagtcctggattcaaatcttaaactcttctggttgtatgatcctgggtttttgtctttgctgattgtgtcatccttcatagaaaggaataaactacctattttgccaggttattagtactaaatatgaaattctcaatatggtgtaaacccttatagagctttatagaaaaacctggatttaaaatcttgctttgttacttactgattgtgtaacctcagacaaattacttagtctttctgattgtcaattttcatttataaagtagaatttaagaagaaatctatttcattattgttttgtgaggaaatagtatatataaaggttttagcatagaatatggaacatattaagttcttagtaaagagttgctgtttctgctaacagtataggaaatattgcaggattagttcactaattttatctttgtacatctttagacttcagttttctgttacacagttttataactccagtacttcatgactaagcatttctagattcaagaaaaatttagtataacattattttcatttgtctagagagaaattgtgcacatatctgaaattcaaaacaaaggtggcagttcgtagtttggttatgaattacattagaaaatcaagatgtatataggtacaaagaaatgctggggctctctaaagtaccacttactcaagcaacacgtggtcctcaggtacagcagccacctccttccaacagattcttacaaccagtacagaaaatagacatgaatctcacagatcttctgggagaactccagcgagacccttggcctgtaccacagggaaagagacctttgcgttcctctggggtggcactttccatagctgtaggactgctggagtgtacttttcccaacactggtgctcgtatcatgatgttcattggtggtcctgctactcaggggcctggaatggtggttggagatgagttgaagacacctataagatcgtggcatgacattgacaaagacaatgccaaatatgttaaaaagggaactaagcattttgaagcattggctaatcgagctgctacaactggccatgttattgatatctatgcgtgtgcattagatcagacaggtctcctggagatgaaatgctgtcccaaccttactggaggatacatggtaatgggtgattctttcaatacttccttattcaaacaaacttttcaaagagtctttaccaaagacatgcatggacagtttaaaatgggctttggtggtacgctagaaataaagacctcaagggaaataaagatttcaggagctattggaccctgtgtgtcactcaattctaaaggaccctgtgtgtctgaaaatgagataggaacaggtggcacatgtcagtggaagatatgtggacttagtcccactacaaccttagccatatattttgaggttgtcaatcagcataatgctccaattcctcaaggagggcgtggtgcaatccagtttgtgactcagtatcagcattcaagtgggcagagacgcatccgagtgaccaccattgctaggaactgggcagatgctcaaactcaaatccaaaacattgctgcatcttttgaccaggaggcagctgccattcttatggcccggctagcaatatatagagcagaaacagaagaaggtccagatgtgcttaggtggctggacagacagctcattcgactgtgtcagaaatttggagaatatcataaagatgacccaagttccttcagattttcagaaactttctccctttatccacagtttatgtttcatttaagaagatcttctttcctgcaagtttttaacaatagtcctgatgagagttcatattatcgtcaccattttatgcgtcaagatctgacccagtctctaattatgattcagcctatcctgtatgcgtattcttttagtggaccaccagagccggttcttcttgatagcagtagcattcttgcagatcgtattcttctcatggacacattcttccagattttgatttatcatggtgagaccatagcacagtggcggaagtcaggataccaggatatgcctgagtatgaaaatttccgccaccttctgcaagccccagtggatgatgcacaggaaattcttcactccagatttccaatgccaagatacattgacactgaacatggaggcagccaggcccgtttcctcctttcaaaagtcaacccttcacagactcataataatatgtatgcctgggggcaggagtctggagcacctattcttacagatgatgttagtttacaagtgtttatggatcacttgaagaaacttgctgtgtccagtgctgcttgaagtgctaataatgttaaagacacttaagaagatgaaataatattcaaatttcattttttcctttttccatttatctgtggaaaccaacagatattgctctatattttttgtattagtatggtttgagacaacatatggaaaatgttcacatttgtagattaagctggaattataatgagagcaataagaacaaatttattttgcttaccacagtgttatagctggttctagaaatttgaagtctttataacttaattatgtttaataaaaaatagagtctgcctcgtactacagatgtaactcatttgtatattgcagacagacccaaagtggcactgaattttcttgctcaccttttaaaaacttgttccttaattttagccagaaagcaaaaaaacaatagtaatgataaatgtgaacatttttgcttattcattgaatatttttctgtaattttcagcacttatgtatacactttttctgtacttactaggttaaggcagatttatttttatgatttgtttaggaattatttgattttataatggtaattttcatgatgataatgtttttggttatttggaaagatagtttagagatgaaaggtttttttgggtaacaatcccgcagctgacaaaaaatgtgaaatttccacaaaatatccaacttatgtgactaaacgcagtagtttttttaaaaggggagatagaaaataaatggttttgttggagtgcattttagtaagcctttgcagtaaaatgacggttgtaactactaaaccaaatttagttttcacagcatggttttgttgttttccccttgtttttcagaggtaaattttgcattatatccttcagtattttaacactattttggcagtttacacattactttttgtttttccttcctttttgtgaaatgtattaagttgtggttcttattgaaacagtattatataatgtttgcttaattatatcatgtgatgctcagttctattttgatttattcattagtattcacttttacctttaaagtttacttgtagcaaatatgtttacattgataaagccagatatgttttgacaatgaaatttacatatcaagtactgcaaataaaaggtggtgctatgatatatgcttaggaggacagttttaatgattgtacttgcatgaacacaatcatatgatggtaaagcagaaacttaagaaaaaattgtttatgtgttatattcaattagcttaaataagttgctttgttatattttatttgaattgaactacgctaggcctaaatgccaataaaatatacttttcactgtt

SEQ ID NO: 164318 - DNA, 2734 bp, Artificial Sequence
  derived and/or modified sequence
gtggcagaggcggcgccagccatgttggccgggcggaggtcttcgctgaggcccggggcggggtggcgccacccctgattgcggtgccacggactgctcctgctgggcggagaggacagattttgcaaagcggaggctgcgacgggtcctgcagggggacagtgaggaaagggccgcctcgtctccgctcctgggggaccgcagaaataagaatcaaactccacaatgacaacctatttggaattcattcaacaaaatgaagaacgagatggagtccgatttagttggaatgtttggccatcaagtcgactggaagctacaagaatggttgttcctgtggcagccctgtttacaccactgaaagagagacctgacttaccacctattcaatatgaacctgttctgtgtagtaggaccacttgccgtgcagttttgaatcctttatgtcaagtggattatcgagcaaaactttgggcttgcaacttttgttaccaaaggaatcagcgtggtcctcagatgcctttgatattcctctatgtggttgatacttgcatggaagatgaagatttacaagccctgaaagaatccatgcagatgtcattaagtcttttaccacctacagctttggttggacttattacttttgggagaatggttcaggttcatgaacttggatgtgaaggcatttcaaaaagctatgtcttcagaggaacaaaagatttgtctgccaaacaactgcaggaaatgctggggctctctaaagtaccacttactcaagcaacacgtggtcctcaggtacagcagccacctccttccaacagattcttacaaccagtacagaaaatagacatgaatctcacagatcttctgggagaactccagcgagacccttggcctgtaccacagggaaagagacctttgcgttcctctggggtggcactttccatagctgtaggactgctggagtgtacttttcccaacactggtgctcgtatcatgatgttcattggtggtcctgctactcaggggcctggaatggtggttggagatgagttgaagacacctataagatcgtggcatgacattgacaaagacaatgccaaatatgttaaaaagggaactaagcattttgaagcattggctaatcgagctgctacaactggccatgttattgatatctatgcgtgtgcattagatcagacaggtctcctggagatgaaatgctgtcccaaccttactggaggatacatggtaatgggtgattctttcaatacttccttattcaaacaaacttttcaaagagtctttaccaaagacatgcatggacagtttaaaatgggctttggtggtacgctagaaataaagacctcaagggaaataaagatttcaggagctattggaccctgtgtgtcactcaattctaaaggaccctgtgtgtctgaaaatgagataggaacaggtggcacatgtcagtggaagatatgtggacttagtcccactacaaccttagccatatattttgaggttgtcaatcagcataatgctccaattcctcaaggagggcgtggtgcaatccagtttgtgactcagtatcagcattcaagtgggcagagacgcatccgagtgaccaccattgctaggaactgggcagatgctcaaactcaaatccaaaacattgctgcatcttttgaccaggaggcagctgccattcttatggcccggctagcaatatatagagcagaaacagaagaaggtccagatgtgcttaggtggctggacagacagctcattcgactgtgtcagaaatttggagaatatcataaagatgacccaagttccttcagattttcagaaactttctccctttatccacagtttatgtttcatttaagaagatcttctttcctgcaagtttttaacaatagtcctgatgagagttcatattatcgtcaccattttatgcgtcaagatctgacccagtctctaattatgattcagcctatcctgtatgcgtattcttttagtggaccaccagagccggttcttcttgatagcagtagcattcttgcagatcgtattcttctcatggacacattcttccagattttgatttatcatggtgagaccatagcacagtggcggaagtcaggataccaggatatgcctgagtatgaaaatttccgccaccttctgcaagccccagtggatgatgcacaggaaattcttcactccagatttccaatgccaagatacattgacactgaacatggaggcagccaggcccgtttcctcctttcaaaagtcaacccttcacagactcataataatatgtatgcctgggggcaggagtctggagcacctattcttacagatgatgttagtttacaagtgtttatggatcacttgaagaaacttgctgtgtccagtgctgcttgaagtgctaataatgttaaagacacttaagaagatgaaataatattcaaatttcattttttcctttttccatttatctgtggaaaccaacagatattgctctatattttttgtattagtatggtttgagacaacatatggaaaatgttcacatttgtagattaagctggaattataatgagagcaataagaacaaatttattttgcttaccacagtgttatagctggttctagaaatttgaagtctttataacttaattatgtttaataaaaaatagagtctgcctcgtactacagatgt

SEQ ID NO: 164319 - DNA, 588 bp, Artificial Sequence
  derived and/or modified sequence
gtgattctcggaatcaaccagggtcctaagatgtcctggaggccgtctccatttctctcgaaataagaatcaaactccacaatgacaacctatttggaattcattcaacaaaatgaagaacgagatggagtccgatttagttggaatgtttggccatcaagtcgactggaagctacaagaatggttgttcctgtggcagccctgtttacaccactgaaagagagacctgacttaccacctattcaatatgaacctgttctgtgtagtaggaccacttgccgtgcagttttgaatcctttatgtcaagtggattatcgagcaaaactttgggcttgcaacttttgttaccaaaggaatcagtttccacctagttatgctggtatatctgaactgaatcagcctgctgaacttttacctcagttttctagcattgaatatgtagttctgcgtggtcctcagatgcctttgatattcctctatgtggttgatacttgcatggaagatgaagatttacaagccctgaaagaatccatgcagatgtcattaagtcttttaccacctacagctttggttggacttattactttt

SEQ ID NO: 164320 - DNA, 547 bp, Artificial Sequence
  derived and/or modified sequence
gttctccttcctcagcctccggagtagctgggattacaggcgcatgtcaccatgcccggctaatttttgtatttttagtagagacggggtttcactgtgttagccaggatggtctcgatctcctgacctcatgatccgcctgcctcggcctcccaaagtgctgggattacagatagatgtgatttgtgattctcggaatcaaccagggtcctaagatgtcctggaggccgtctccatttctctcgaaataagaatcaaactccacaatgacaacctatttggaattcattcaacaaaatgaagaacgagatggagtccgatttagttggaatgtttggccatcaagtcgactggaagctacaagaatggttgttcctgtggcagccctgtttacaccactgaaagagagacctgacttaccacctattcaatatgaacctgttctgtgtagtaggaccacttgccgtgcagttttgaatcctttatgtcaagtggattatcgagcaaaactttgggcttgcaacttttgttaccaaaggaatcaggt

SEQ ID NO: 164321 - DNA, 571 bp, Artificial Sequence
  derived and/or modified sequence
ggcagaggcggcgccagccatgttggccgggcggagaggacagattttgcaaagcggaggctgcgacgggtcctgcagggggacagtgaggaaagggccgcctcgtctccgctcctgggggaccgcagaaataagaatcaaactccacaatgacaacctatttggaattcattcaacaaaatgaagaacgagatggagtccgatttagttggaatgtttggccatcaagtcgactggaagctacaagaatggttgttcctgtggcagccctgtttacaccactgaaagagagacctgacttaccacctattcaatatgaacctgttctgtgtagtaggaccacttgccgtgcagttttgaatcctttatgtcaagtggattatcgagcaaaactttgggcttgcaacttttgttaccaaaggaatcagtttccacctagttatgctggtatatctgaactgaatcagcctgctgaacttttacctcagttttctagcattgaatatgtagttctgcgtggtcctcagatgcctttgatattcctctatgtggttgatacttgcatggaaga

SEQ ID NO: 164322 - DNA, 575 bp, Artificial Sequence
  derived and/or modified sequence
aggctgactaaaatacataaatagtacgtgaattctttcgggccagggatctgggcctactttgcctgcatcatattaccagcatctcaattgtgtctggcacatagtaagtttcagtaaacatttgttgcactaagtgaaagaatgaacttttcacttttttcagagatgtgatttgtgattctcggaatcaaccagggtcctaagatgtcctggaggccgtctccatttctctcgaggcggcgccagccatgttggccgggcggaggtcttcgctgaggcccggggcggggtggcgccacccctgattgcggtgccacggactgctcctgctgggcggagaggacagattttgcaaagcggaggctgcgacgggtcctgcagggggacagtgaggaaagggccgcctcgtctccgctcctgggggaccgcagaaataagaatcaaactccacaatgacaacctatttggaattcattcaacaaaatgaagaacgagatggagtccgatttagttggaatgtttggccatcaagtcgactggaagctacaagaatggttgttcctgtggcagcc

SEQ ID NO: 164323 - DNA, 2298 bp, Artificial Sequence
  derived and/or modified sequence
atgaccacctacctggagttcatccagcagaacgaggagagagacggcgtgagattcagctggaacgtgtggcccagcagcagactggaggccaccagaatggtggtgcccgtggccgccctgttcacccccctgaaggagagacccgacctgccccccatccagtacgagcccgtgctgtgcagcagaaccacctgcagagccgtgctgaaccccctgtgccaggtggactacagagccaagctgtgggcctgcaacttctgctaccagagaaaccagttcccccccagctacgccggcatcagcgagctgaaccagcccgccgagctgctgccccagttcagcagcatcgagtacgtggtgctgagaggcccccagatgcccctgatcttcctgtacgtggtggacacctgcatggaggacgaggacctgcaggccctgaaggagagcatgcagatgagcctgagcctgctgccccccaccgccctggtgggcctgatcaccttcggcagaatggtgcaggtgcacgagctgggctgcgagggcatcagcaagagctacgtgttcagaggcaccaaggacctgagcgccaagcagctgcaggagatgctgggcctgagcaaggtgcccctgacccaggccaccagaggcccccaggtgcagcagcccccccccagcaacagattcctgcagcccgtgcagaagatcgacatgaacctgaccgacctgctgggcgagctgcagagagacccctggcccgtgccccagggcaagagacccctgagaagcagcggcgtggccctgagcatcgccgtgggcctgctggagtgcaccttccccaacaccggcgccagaatcatgatgttcatcggcggccccgccacccagggccccggcatggtggtgggcgacgagctgaagacccccatcagaagctggcacgacatcgacaaggacaacgccaagtacgtgaagaagggcaccaagcacttcgaggccctggccaacagagccgccaccaccggccacgtgatcgacatctacgcctgcgccctggaccagaccggcctgctggagatgaagtgctgccccaacctgaccggcggctacatggtgatgggcgacagcttcaacaccagcctgttcaagcagaccttccagagagtgttcaccaaggacatgcacggccagttcaagatgggcttcggcggcaccctggagatcaagaccagcagagagatcaagatcagcggcgccatcggcccctgcgtgagcctgaacagcaagggcccctgcgtgagcgagaacgagatcggcaccggcggcacctgccagtggaagatctgcggcctgagccccaccaccaccctggccatctacttcgaggtggtgaaccagcacaacgcccccatcccccagggcggcagaggcgccatccagttcgtgacccagtaccagcacagcagcggccagagaagaatcagagtgaccaccatcgccagaaactgggccgacgcccagacccagatccagaacatcgccgccagcttcgaccaggaggccgccgccatcctgatggccagactggccatctacagagccgagaccgaggagggccccgacgtgctgagatggctggacagacagctgatcagactgtgccagaagttcggcgagtaccacaaggacgaccccagcagcttcagattcagcgagaccttcagcctgtacccccagttcatgttccacctgagaagaagcagcttcctgcaggtgttcaacaacagccccgacgagagcagctactacagacaccacttcatgagacaggacctgacccagagcctgatcatgatccagcccatcctgtacgcctacagcttcagcggcccccccgagcccgtgctgctggacagcagcagcatcctggccgacagaatcctgctgatggacaccttcttccagatcctgatctaccacggcgagaccatcgcccagtggagaaagagcggctaccaggacatgcccgagtacgagaacttcagacacctgctgcaggcccccgtggacgacgcccaggagatcctgcacagcagattccccatgcccagatacatcgacaccgagcacggcggcagccaggccagattcctgctgagcaaggtgaaccccagccagacccacaacaacatgtacgcctggggccaggagagcggcgcccccatcctgaccgacgacgtgagcctgcaggtgttcatggaccacctgaagaagctggccgtgagcagcgccgcctag

SEQ ID NO: 164324 - DNA, 1692 bp, Artificial Sequence
  derived and/or modified sequence
atgctgggcctgagcaaggtgcccctgacccaggccaccagaggcccccaggtgcagcagcccccccccagcaacagattcctgcagcccgtgcagaagatcgacatgaacctgaccgacctgctgggcgagctgcagagagacccctggcccgtgccccagggcaagagacccctgagaagcagcggcgtggccctgagcatcgccgtgggcctgctggagtgcaccttccccaacaccggcgccagaatcatgatgttcatcggcggccccgccacccagggccccggcatggtggtgggcgacgagctgaagacccccatcagaagctggcacgacatcgacaaggacaacgccaagtacgtgaagaagggcaccaagcacttcgaggccctggccaacagagccgccaccaccggccacgtgatcgacatctacgcctgcgccctggaccagaccggcctgctggagatgaagtgctgccccaacctgaccggcggctacatggtgatgggcgacagcttcaacaccagcctgttcaagcagaccttccagagagtgttcaccaaggacatgcacggccagttcaagatgggcttcggcggcaccctggagatcaagaccagcagagagatcaagatcagcggcgccatcggcccctgcgtgagcctgaacagcaagggcccctgcgtgagcgagaacgagatcggcaccggcggcacctgccagtggaagatctgcggcctgagccccaccaccaccctggccatctacttcgaggtggtgaaccagcacaacgcccccatcccccagggcggcagaggcgccatccagttcgtgacccagtaccagcacagcagcggccagagaagaatcagagtgaccaccatcgccagaaactgggccgacgcccagacccagatccagaacatcgccgccagcttcgaccaggaggccgccgccatcctgatggccagactggccatctacagagccgagaccgaggagggccccgacgtgctgagatggctggacagacagctgatcagactgtgccagaagttcggcgagtaccacaaggacgaccccagcagcttcagattcagcgagaccttcagcctgtacccccagttcatgttccacctgagaagaagcagcttcctgcaggtgttcaacaacagccccgacgagagcagctactacagacaccacttcatgagacaggacctgacccagagcctgatcatgatccagcccatcctgtacgcctacagcttcagcggcccccccgagcccgtgctgctggacagcagcagcatcctggccgacagaatcctgctgatggacaccttcttccagatcctgatctaccacggcgagaccatcgcccagtggagaaagagcggctaccaggacatgcccgagtacgagaacttcagacacctgctgcaggcccccgtggacgacgcccaggagatcctgcacagcagattccccatgcccagatacatcgacaccgagcacggcggcagccaggccagattcctgctgagcaaggtgaaccccagccagacccacaacaacatgtacgcctggggccaggagagcggcgcccccatcctgaccgacgacgtgagcctgcaggtgttcatggaccacctgaagaagctggccgtgagcagcgccgcctag

SEQ ID NO: 164325 - DNA, 2211 bp, Artificial Sequence
  derived and/or modified sequence
atgaccacctacctggagttcatccagcagaacgaggagagagacggcgtgagattcagctggaacgtgtggcccagcagcagactggaggccaccagaatggtggtgcccgtggccgccctgttcacccccctgaaggagagacccgacctgccccccatccagtacgagcccgtgctgtgcagcagaaccacctgcagagccgtgctgaaccccctgtgccaggtggactacagagccaagctgtgggcctgcaacttctgctaccagagaaaccagagaggcccccagatgcccctgatcttcctgtacgtggtggacacctgcatggaggacgaggacctgcaggccctgaaggagagcatgcagatgagcctgagcctgctgccccccaccgccctggtgggcctgatcaccttcggcagaatggtgcaggtgcacgagctgggctgcgagggcatcagcaagagctacgtgttcagaggcaccaaggacctgagcgccaagcagctgcaggagatgctgggcctgagcaaggtgcccctgacccaggccaccagaggcccccaggtgcagcagcccccccccagcaacagattcctgcagcccgtgcagaagatcgacatgaacctgaccgacctgctgggcgagctgcagagagacccctggcccgtgccccagggcaagagacccctgagaagcagcggcgtggccctgagcatcgccgtgggcctgctggagtgcaccttccccaacaccggcgccagaatcatgatgttcatcggcggccccgccacccagggccccggcatggtggtgggcgacgagctgaagacccccatcagaagctggcacgacatcgacaaggacaacgccaagtacgtgaagaagggcaccaagcacttcgaggccctggccaacagagccgccaccaccggccacgtgatcgacatctacgcctgcgccctggaccagaccggcctgctggagatgaagtgctgccccaacctgaccggcggctacatggtgatgggcgacagcttcaacaccagcctgttcaagcagaccttccagagagtgttcaccaaggacatgcacggccagttcaagatgggcttcggcggcaccctggagatcaagaccagcagagagatcaagatcagcggcgccatcggcccctgcgtgagcctgaacagcaagggcccctgcgtgagcgagaacgagatcggcaccggcggcacctgccagtggaagatctgcggcctgagccccaccaccaccctggccatctacttcgaggtggtgaaccagcacaacgcccccatcccccagggcggcagaggcgccatccagttcgtgacccagtaccagcacagcagcggccagagaagaatcagagtgaccaccatcgccagaaactgggccgacgcccagacccagatccagaacatcgccgccagcttcgaccaggaggccgccgccatcctgatggccagactggccatctacagagccgagaccgaggagggccccgacgtgctgagatggctggacagacagctgatcagactgtgccagaagttcggcgagtaccacaaggacgaccccagcagcttcagattcagcgagaccttcagcctgtacccccagttcatgttccacctgagaagaagcagcttcctgcaggtgttcaacaacagccccgacgagagcagctactacagacaccacttcatgagacaggacctgacccagagcctgatcatgatccagcccatcctgtacgcctacagcttcagcggcccccccgagcccgtgctgctggacagcagcagcatcctggccgacagaatcctgctgatggacaccttcttccagatcctgatctaccacggcgagaccatcgcccagtggagaaagagcggctaccaggacatgcccgagtacgagaacttcagacacctgctgcaggcccccgtggacgacgcccaggagatcctgcacagcagattccccatgcccagatacatcgacaccgagcacggcggcagccaggccagattcctgctgagcaaggtgaaccccagccagacccacaacaacatgtacgcctggggccaggagagcggcgcccccatcctgaccgacgacgtgagcctgcaggtgttcatggaccacctgaagaagctggccgtgagcagcgccgcctag

SEQ ID NO: 164326 - DNA, 510 bp, Artificial Sequence
  derived and/or modified sequence
atgaccacctacctggagttcatccagcagaacgaggagagagacggcgtgagattcagctggaacgtgtggcccagcagcagactggaggccaccagaatggtggtgcccgtggccgccctgttcacccccctgaaggagagacccgacctgccccccatccagtacgagcccgtgctgtgcagcagaaccacctgcagagccgtgctgaaccccctgtgccaggtggactacagagccaagctgtgggcctgcaacttctgctaccagagaaaccagttcccccccagctacgccggcatcagcgagctgaaccagcccgccgagctgctgccccagttcagcagcatcgagtacgtggtgctgagaggcccccagatgcccctgatcttcctgtacgtggtggacacctgcatggaggacgaggacctgcaggccctgaaggagagcatgcagatgagcctgagcctgctgccccccaccgccctggtgggcctgatcaccttctag

SEQ ID NO: 164327 - DNA, 285 bp, Artificial Sequence
  derived and/or modified sequence
atgaccacctacctggagttcatccagcagaacgaggagagagacggcgtgagattcagctggaacgtgtggcccagcagcagactggaggccaccagaatggtggtgcccgtggccgccctgttcacccccctgaaggagagacccgacctgccccccatccagtacgagcccgtgctgtgcagcagaaccacctgcagagccgtgctgaaccccctgtgccaggtggactacagagccaagctgtgggcctgcaacttctgctaccagagaaaccaggtgtag

SEQ ID NO: 164328 - DNA, 423 bp, Artificial Sequence
  derived and/or modified sequence
atgaccacctacctggagttcatccagcagaacgaggagagagacggcgtgagattcagctggaacgtgtggcccagcagcagactggaggccaccagaatggtggtgcccgtggccgccctgttcacccccctgaaggagagacccgacctgccccccatccagtacgagcccgtgctgtgcagcagaaccacctgcagagccgtgctgaaccccctgtgccaggtggactacagagccaagctgtgggcctgcaacttctgctaccagagaaaccagttcccccccagctacgccggcatcagcgagctgaaccagcccgccgagctgctgccccagttcagcagcatcgagtacgtggtgctgagaggcccccagatgcccctgatcttcctgtacgtggtggacacctgcatggagtag

SEQ ID NO: 164329 - protein, 477 aa, Artificial Sequence
  derived and/or modified sequence
MANMQGLVERLERAVSRLESLSAESHRPPGNCGEVNGVIAGVAPSVEAFDKLMDSMVAEFLKNSRILAGDVETHAEMVHSAFQAQRAFLLMASQYQQPHENDVAALLKPISEKIQEIQTFRERNRGSNMFNHLSAVSESIPALGWIAVSPKPGPYVKEMNDAATFYTNRVLKDYKHSDLRHVDWVKSYLNIWSELQAYIKEHHTTGLTWSKTGPVASTVSAFSVLSSGPGLPPPPPPLPPPGPPPLFENEGKKEESSPSRSALFAQLNQGEAITKGLRHVTDDQKTYKNPSLRAQGGQTQSPTKSHTPSPTSPKSYPSQKHAPVLELEGKKWRVEYQEDRNDLVISETELKQVAYIFKCEKSTIQIKGKVNSIIIDNCKKLGLVFDNVVGIVEVINSQDIQIQVMGRVPTISINKTEGCHIYLSEDALDCEIVSAKSSEMNILIPQDGDYREFPIPEQFKTAWDGSKLITEPAEIMA

SEQ ID NO: 164330 - protein, 394 aa, Artificial Sequence
  derived and/or modified sequence
MANMQGLVERLERAVSRLESLSAESHRPPGNCGEVNGVIAGVAPSVEAFDKLMDSMVAEFLKNSRILAGDVETHAEMVHSAFQAQRAFLLMASQYQQPHENDVAALLKPISEKIQEIQTFRERNRGSNMFNHLSAVSESIPALGWIAVSPKPPPLPPPGPPPLFENEGKKEESSPSRSALFAQLNQGEAITKGLRHVTDDQKTYKNPSLRAQGGQTQSPTKSHTPSPTSPKSYPSQKHAPVLELEGKKWRVEYQEDRNDLVISETELKQVAYIFKCEKSTIQIKGKVNSIIIDNCKKLGLVFDNVVGIVEVINSQDIQIQVMGRVPTISINKTEGCHIYLSEDALDCEIVSAKSSEMNILIPQDGDYREFPIPEQFKTAWDGSKLITEPAEIMA

SEQ ID NO: 164331 - DNA, 1434 bp, Artificial Sequence
  derived and/or modified sequence
atggcaaatatgcaaggactggtggagcgccttgaaagggctgtgtcccgcctggagtcgctgagtgcggaatcccaccggccacccgggaactgtggagaagtaaacggggtcattgctggagtggcccctagcgtcgaagcattcgataagctgatggattccatggttgcagagttcctgaaaaacagtcggatccttgccggcgacgttgagacgcatgccgagatggttcacagcgccttccaagcacaacgggcgttcctgctgatggctagccagtatcaacaaccacacgaaaatgacgtggcagcgttgctcaagcctatttcagagaaaatccaggaaatccaaaccttcagagaaaggaaccgcggctctaatatgtttaaccaccttagcgccgtctctgaaagcattcctgcactgggttggatcgccgtgtctcccaaaccgggaccttacgtgaaagagatgaatgacgcggccacattctatacgaaccgggttcttaaggactataaacactcagacctgcgccatgtcgactgggtgaagagctatctgaacatctggagtgaactgcaggcatacattaaggagcaccacaccacggggctgacctggtctaaaacagggcccgtggcgtcgaccgtttctgccttttccgtcctgtctagcggcccaggtttgcctccaccaccccctcctctgccccctcctgggccccctcctctgtttgagaacgagggcaaaaaggaggagtcctcccccagtcggagcgcactgttcgctcagctaaaccaaggggaagctatcacaaagggcctgaggcatgtgacagatgaccaaaaaacatacaaaaacccctctctcagggcccaaggtggccagacccaatctcccactaagtcacatacacccagccctaccagcccgaaatcgtatcccagccagaagcacgctcctgtactggagctcgagggaaaaaagtggcgcgtggagtaccaggaggataggaacgatctggtgataagtgaaaccgaactaaagcaggtggcctacatctttaaatgcgaaaagagcaccattcagattaagggtaaggtcaacagcatcatcatagacaactgcaaaaaattaggcttggtgttcgacaacgtggtcgggattgtggaggtcatcaactctcaggacatacagatccaggtgatgggccgtgtcccaacgatctccattaataagaccgaaggctgtcacatatatctctctgaagatgctctggattgcgagatagtgtccgcaaaaagctctgaaatgaatatcctgatcccacaggatggggactaccgtgaatttcctatccccgaacaattcaaaacagcatgggatggctccaagcttatcacggagcctgctgagattatggcctag

SEQ ID NO: 164332 - DNA, 1434 bp, Artificial Sequence
  derived and/or modified sequence
atggccaacatgcagggcctggtggagcggctggagagagctgtgtcccggctggagagcctgtctgctgagagccaccggcccccaggcaactgtggggaggtgaatggagtgattgctggggtggcccccagcgtggaggcctttgacaagctgatggacagcatggtggccgagttcctgaagaacagccgcatcctggccggagatgtggagacccatgctgagatggtgcacagcgccttccaggcccagagggccttcctgctgatggccagccagtaccagcagccccatgaaaatgatgtggccgccctgctgaagcccatcagcgagaagatccaggagatccagaccttccgggagaggaacagaggcagcaacatgttcaaccacctgtctgctgtgtctgagagcatcccagccctgggctggattgctgtgagccccaagccaggcccctacgtgaaggagatgaatgatgctgccaccttctacaccaacagagtgctgaaggactacaagcacagcgacctgcggcacgtggactgggtgaagagctacctgaacatctggagcgagctgcaggcctacatcaaggagcaccacaccaccggcctgacctggagcaagacaggccctgtggccagcacagtgtctgccttctctgtgctgagcagcggccctggcctgcccccacctcctccacccctgcccccacctggccccccacccctgtttgaaaatgaaggcaagaaggaggagagcagccccagccgcagcgccctgtttgcccagctgaaccagggcgaggccatcaccaagggcctgcggcacgtgacagatgaccagaagacctacaagaaccccagcctgcgggcccagggcggccagacccagagccccaccaagagccacacccccagccccaccagccccaagagctaccccagccagaagcacgcccctgtgctggagctggagggcaagaagtggagggtggagtaccaggaggacagaaatgacctggtgatcagcgagacagagctgaagcaggtggcctacatcttcaagtgtgagaagagcaccatccagatcaagggcaaggtgaacagcatcatcatcgacaactgcaagaagctgggcctggtgtttgacaacgtggtgggcatcgtggaggtgatcaacagccaggacatccagatccaggtgatgggccgggtgcccaccatcagcatcaacaagacagagggctgccacatctacctgtctgaagatgccctggactgtgagatcgtgtctgccaagagcagcgagatgaacatcctgatcccccaggatggagactaccgggagttccccatccctgagcagttcaagacagcctgggatggcagcaagctgatcacagagcctgctgagatcatggcctag

SEQ ID NO: 164333 - DNA, 1434 bp, Artificial Sequence
  derived and/or modified sequence
atggccaacatgcagggcctggtggagcggctggagcgggccgtgtcccggcttgagtccctgagcgccgagagtcatcgtccacctggcaattgtggagaagtgaatggagtgatcgctggtgtcgcgcccagtgtggaagctttcgataagttgatggacagcatggtggcagaatttctgaagaacagtcgaatcctcgcaggcgacgttgaaacccacgcagagatggtgcatagcgcatttcaggcccagcgggcattcctgttgatggcgagccagtatcagcagccccacgagaatgacgtggcagcccttctgaagcccatcagcgagaaaatccaggaaattcagaccttcagggagaggaaccgcggttccaacatgttcaatcatctgtccgccgtctctgagtccatccctgctctgggttggatcgcggtcagccctaaaccgggtccctatgttaaggaaatgaacgatgctgctaccttttacacgaaccgtgttcttaaagattataagcacagtgatttgaggcacgttgattgggttaaatcctaccttaatatttggtccgagttacaagcatacatcaaggagcatcatacaacaggcctgacctggagcaaaactggtcctgtggcttctactgtctccgccttctccgtattgagcagcgggcctggtctcccaccccccccccctcccttgccacctccagggccgccccctctgttcgaaaatgagggtaaaaaagaggagtccagcccatccagatctgcattgtttgcccagttgaaccagggggaagcaatcaccaaaggactaaggcacgtgacagacgaccagaagacatacaagaatccttctctgcgagcgcagggaggacagacccagtcgccaactaagagtcatacgccgtccccaacgagcccaaagtcctatccaagccagaagcatgcccccgtcctggagctggaaggtaagaaatggagagtggagtaccaagaggacagaaatgacttggtgattagcgagaccgaacttaaacaggtggcctacattttcaagtgcgagaaaagtaccatccagattaaaggcaaagtgaatagcattatcatagataattgcaaaaaactgggcctggtgtttgataatgtggtgggaatcgtcgaagttatcaacagtcaagacatccagattcaggttatggggagagtgccgacaatttccataaacaaaactgaagggtgccacatctacctgagcgaagacgcactggactgtgagatagtttccgcaaagtcctccgagatgaacatcctgatcccccaggatggagattacagggaatttcctattcccgagcagttcaaaacggcctgggatggctccaagctgatcaccgaacctgccgagatcatggcctag

SEQ ID NO: 164334 - DNA, 1434 bp, Artificial Sequence
  derived and/or modified sequence
atggccaatatgcagggcttagtagagagactggaacgcgctgttagtcgactcgagagccttagcgccgaatcccataggccacctgggaactgcggagaggttaacggggtcatcgccggtgtcgctccatcggtggaagcgttcgacaaactgatggattctatggtcgctgagtttcttaagaactcaagaatactcgctggagatgtagagactcatgcagagatggtccattccgcctttcaggcgcagagagccttcctgttgatggccagccagtatcagcagccacatgaaaatgacgtggccgcactgttaaagccgattagtgaaaagatccaagagattcagactttccgtgagagaaacagaggatctaacatgttcaatcatctatcggcagtttcagaatccattccagcattaggatggatcgccgtaagccccaaacctggcccttacgttaaggaaatgaacgatgcggctactttctacaccaaccgggtgttgaaggattacaaacacagcgacctccgccacgttgattgggtcaaatcatacctgaacatttggtctgagctgcaagcctatattaaagagcatcatacaacaggtctgacttggagtaaaacaggccctgtggcctcaaccgtctccgcatttagcgtgctgtcaagtggacctggcttgccgcctcccccacctccgctgcccccacctggacccccaccactgttcgagaacgaagggaagaaggaggaatctagccctagtcgtagtgctctctttgctcagcttaatcagggcgaagccataaccaaagggttgagacatgtgactgacgatcaaaaaacatataaaaacccgtccctacgcgcacaggggggacagacacagtcccctacaaagtcgcatactccgagcccgacatccccaaagtcgtaccccagccagaaacacgcacccgttctggagctggagggcaagaaatggagggtcgaatatcaggaggaccgaaacgatctcgtcatttctgagaccgagctcaaacaggtagcatacatttttaaatgtgaaaaatcaactatccagattaagggaaaagttaattcaatcatcattgacaactgtaaaaaattaggcctggtgtttgataacgtggtcgggattgttgaggtcattaatagtcaagacattcagattcaggtgatgggaagagtgccaacgattagcataaacaaaacagaggggtgccatatctatctgagcgaagacgcactggactgcgagattgtgtctgccaagagctcagaaatgaacattctcattcctcaggacggagattatagagagtttccgattccagaacagttcaagactgcgtgggacggatctaaattgattacagagccagctgaaattatggcgtag

SEQ ID NO: 164335 - DNA, 3316 bp, Artificial Sequence
  derived and/or modified sequence
atattgggtctggggacacacatgccgtctcttgattcctaaggatccattacccatttctctgcacagatcttcgggtatccaacctatctgtgcctccttcagccaggagcctccggatctttccagacttctttgcaatactgcctcatgcactgaatccatttctcgcatagcctggcgcttggcaggcaggctggcgttccctggctctgccttccccatctccctgtcttttctcccacggcccatctgcccctcctttcctccacccccttctcctctctgctcccctttatttccactccccacccgcgtggctttgctctccctctcccccctcagctcgtctgtatttggagctccggaagctgccggcgactctcccctggagcagcgtgactgacaccggctcctattcagctgggaggagggagaggggaggagaaggggagggccgcgggaggagggtacgagtggccgaccacggatttgcattgccgaggacgggaccccagggcagcgaagcagaatggccaacatgcagggactggtggaaagactggaacgagctgtcagccgcctggagtcgctgtctgcagagtcccacaggccccctgggaactgcggggaagtcaatggtgtcattgcaggtgtggcaccctccgtggaagcctttgacaagctgatggacagtatggtggccgagtttttaaagaacagtaggatccttgctggggacgtggagacccatgcagaaatggtgcacagtgctttccaggcccagcgggctttccttctgatggcctctcagtaccaacaaccccacgagaatgacgtggccgcacttctgaaacccatatcggaaaagattcaggaaatccaaactttcagagagagaaaccgggggagtaacatgtttaatcatctttcggccgtcagcgaaagcatccctgcccttggatggatagctgtgtctcccaaacctggtccttatgtcaaggagatgaatgacgctgccaccttttacactaacagggtcttaaaggactacaaacacagtgatttgcgtcatgtggattgggtgaagtcatatttgaacatttggagtgaacttcaagcatacatcaaggaacaccacaccacgggcctcacatggagcaaaacaggtcctgtagcatccacagtatcagcgttttctgtcctctcctctgggcctggccttcctccaccccctcctcctctgcctcctccagggccacctccacttttcgagaatgaaggcaaaaaagaggaatcttctccttcacgctcagctttatttgcccaacttaaccagggagaagcaattacaaaagggctccgccatgtcacagatgaccagaagacatacaaaaatcccagcctgcgggctcaaggagggcaaactcaatctcccaccaaaagtcacactccaagtcccacatctcctaaatcttatccttctcaaaaacatgccccagtgttggagttggaaggaaagaaatggagagtggagtaccaagaggacaggaatgaccttgtgatttcagagactgagctgaaacaagtggcttacattttcaaatgcgaaaaatcaactattcagataaaagggaaagtaaactccattataattgacaactgtaaaaaactcggcctggtgtttgacaatgtggtgggcattgtggaagtgatcaactcccaggacattcaaatccaggtaatggggagagtgccaacaatttccattaataagacagaaggttgccacatatacctcagtgaagatgcattagactgtgagatcgtgagcgccaagtcatctgaaatgaacatacttatccctcaggatggtgattatagagaatttcccattcctgaacagttcaagacagcatgggatggatccaagttaatcactgaacctgcagaaattatggcctaacttcctgagagaccgaaccccctcacctgaatccccctctatcaaacaaacaaaaaagcagcagtaaagagctagaagttgcagtagcccctactgctttagctttggcctccaacgattctgtgctatagatacagcactgtttctggcacgcctcgtgggcattttgaaatatttaacgtttcctcatgatttgcctttgtgtgtgattttagttccacatgatgacttgtgaacattagggatttaaaggaaaaaaaaaaagaattctgttcccctcatatcatgaacacagtaactgataggtaaaaagactgcatgattcacttttacacttatatttcattgctagttaaaaaataaaacctttgagaatctaagatgtacatttttaccttttaggcaatttcaatataatgtagaagtagtagtgtgccctgaaaaatgtacacgttttttcttattgttaccacatgttcacctttatcagcgtggatactgtcagcatgagtacatatttcaacccacgcttgtaaaagacataagagtttataaaggaccaaattcagttccttggtccttggaagacctatattctctgtagttactgaaaaccgaaagtcaattctaattattcatcttacatatttttccaccatgtcatttgaaaacttgcttttcttctgcataagagattcttatgccaaaaacattaaacagaagaaatcattttttttgctatgtaatacctcgcaactttgctctaaaatcaagctcagttattattttccaagtttgaacatgttaaatatcagatgccttgtaaattatgtctttaacgttttcttatagactaatttcctcttttccacctgccagacttgctaaccaagctcgaaaatgaacatgaaaaagccatacatgtattatttctcctaaaacctaaggcattatctgttggtttggcttgctgctcctattttgtagtcttgatagtagatgcttcttcagcgtaagagtagctatgatattcctttttatcttttcagtacatagtgctgaaaaatctgcaacttcttggatcatatttaatgaattatagtataatgcttgcaggcccagtacaagcatatatattgtgcctcttacagcctttggaatacattgtttccattttttaaatatcttctatatccatatagtattcaaattattaatgctcatgtaccaaggttttgctataaaagttttgtctgtatgaataatgtggctttagtaaataatcatttttcaactgtaaacttattctgaaataaagtaaaattctaattgtttaaatactgtgatgaa

SEQ ID NO: 164336 - DNA, 1434 bp, Artificial Sequence
  derived and/or modified sequence
atggccaacatgcagggcctggtggagagactggagagagccgtgagcagactggagagcctgagcgccgagagccacagaccccccggcaactgcggcgaggtgaacggcgtgatcgccggcgtggcccccagcgtggaggccttcgacaagctgatggacagcatggtggccgagttcctgaagaacagcagaatcctggccggcgacgtggagacccacgccgagatggtgcacagcgccttccaggcccagagagccttcctgctgatggccagccagtaccagcagccccacgagaacgacgtggccgccctgctgaagcccatcagcgagaagatccaggagatccagaccttcagagagagaaacagaggcagcaacatgttcaaccacctgagcgccgtgagcgagagcatccccgccctgggctggatcgccgtgagccccaagcccggcccctacgtgaaggagatgaacgacgccgccaccttctacaccaacagagtgctgaaggactacaagcacagcgacctgagacacgtggactgggtgaagagctacctgaacatctggagcgagctgcaggcctacatcaaggagcaccacaccaccggcctgacctggagcaagaccggccccgtggccagcaccgtgagcgccttcagcgtgctgagcagcggccccggcctgccccccccccccccccccctgcccccccccggccccccccccctgttcgagaacgagggcaagaaggaggagagcagccccagcagaagcgccctgttcgcccagctgaaccagggcgaggccatcaccaagggcctgagacacgtgaccgacgaccagaagacctacaagaaccccagcctgagagcccagggcggccagacccagagccccaccaagagccacacccccagccccaccagccccaagagctaccccagccagaagcacgcccccgtgctggagctggagggcaagaagtggagagtggagtaccaggaggacagaaacgacctggtgatcagcgagaccgagctgaagcaggtggcctacatcttcaagtgcgagaagagcaccatccagatcaagggcaaggtgaacagcatcatcatcgacaactgcaagaagctgggcctggtgttcgacaacgtggtgggcatcgtggaggtgatcaacagccaggacatccagatccaggtgatgggcagagtgcccaccatcagcatcaacaagaccgagggctgccacatctacctgagcgaggacgccctggactgcgagatcgtgagcgccaagagcagcgagatgaacatcctgatcccccaggacggcgactacagagagttccccatccccgagcagttcaagaccgcctgggacggcagcaagctgatcaccgagcccgccgagatcatggcctag

SEQ ID NO: 164337 - protein, 371 aa, Artificial Sequence
  derived and/or modified sequence
MELELDAGDQDLLAFLLEESGDLGTAPDEAVRAPLDWALPLSEVPSDWEVDDLLCSLLSPPASLNILSSSNPCLVHHDHTYSLPRETVSMDLESESCRKEGTQMTPQHMEELAEQEIARLVLTDEEKSLLEKEGLILPETLPLTKTEEQILKRVRRKIRNKRSAQESRRKKKVYVGGLESRVLKYTAQNMELQNKVQLLEEQNLSLLDQLRKLQAMVIEISNKTSSSSTCILVLLVSFCLLLVPAMYSSDTRGSLPAEHGVLSRQLRALPSEDPYQLELPALQSEVPKDSTHQWLDGSDCVLQAPGNTSCLLHYMPQAPSAEPPLEWPFPDLFSEPLCRGPILPLQANLTRKGGWLPTGSPSVILQDRYSG

SEQ ID NO: 164338 - DNA, 1116 bp, Artificial Sequence
  derived and/or modified sequence
atggaactggagttggacgcaggcgaccaggacctgctcgccttcttgttggaagagagcggcgatctggggactgcaccggatgaagccgtcagagcacctctggattgggcactccccctcagtgaggtaccttctgattgggaggtcgatgatctgctgtgctccttactatctcctcctgcttcattgaacattctgagctcttcaaatccctgcctcgtgcatcatgaccatacctattcccttcctcgagaaactgtgtccatggacctcgaatcagaatcgtgtaggaaggagggcacgcagatgacaccgcagcatatggaggaattagccgagcaggaaatagcgagactcgtgctgaccgacgaggagaaaagcctgctggagaaagagggcctaattctgccggaaacattgccactgaccaaaaccgaagagcagattttgaagagagtgaggcgcaaaataaggaacaagcgatctgcacaggagtcccgccgaaagaagaaggtttacgttggaggcctagaaagcagagtcttgaaatacaccgcgcagaacatggagctccagaacaaggtccagctactggaagaacagaacctgtccctcctggatcagctccggaagttacaagcaatggtgatcgagatttcaaataagacaagtagcagctcgacgtgcattctggtgctgctggtctcattctgtctcttactcgtccctgctatgtactcaagcgacacacgaggttccctgcctgcggagcacggcgtgttgtcacgacagctacgcgccttgccctccgaagacccataccagctcgaattgcccgccctgcagtccgaggtgcctaaagactctacccaccagtggctagatgggtccgactgcgtgcttcaggcccctggcaacacatcctgtctcttgcactatatgccacaagccccatctgctgaaccccccctagagtggcctttcccggacctgttctctgagcctctgtgcaggggtccaatcctgcctctgcaagctaacctgacacgaaaaggcgggtggctgccaactgggagtccaagtgtaattctgcaggaccgctatagcggctag

SEQ ID NO: 164339 - DNA, 1116 bp, Artificial Sequence
  derived and/or modified sequence
atggagctggagctggatgctggggaccaggacctgctggccttcctgctggaggagagcggggacctgggcacagccccagatgaggccgtgcgggcccccctggactgggccctgcccctgtctgaggtgcccagcgactgggaggtggatgacctgctgtgcagcctgctgagccccccagccagcctgaacatcctgagcagcagcaacccctgcctggtgcaccacgaccacacctacagcctgccccgggagaccgtgtccatggacctggagagcgagagctgcaggaaggagggcacccagatgaccccccagcacatggaggagctggccgagcaggagatcgcccggctggtgctgacagatgaggagaagagcctgctggagaaggagggcctcatcctgcctgagaccctgcccctgaccaagacagaggagcagatcctgaagagggtgcggaggaagatccggaacaagaggtctgcccaggagagcaggaggaagaagaaggtgtatgtgggcggcctggagagccgggtgctgaagtacacagcccagaacatggagctgcagaacaaggtgcagctgctggaggagcagaacctgagcctgctggaccagctgaggaagctgcaggccatggtgattgagatcagcaacaagaccagcagcagcagcacctgcatcctggtgctgctggtgtccttctgcctgctgctggtgcctgccatgtacagcagtgacacccggggcagcctgcctgctgagcacggcgtgctgagccggcagctgcgggccctgcccagcgaggacccctaccagctggagctgcctgccctgcagagcgaggtgcccaaggacagcacccaccagtggctggatggcagtgactgtgtgctgcaggcccctggcaacaccagctgcctgctgcactacatgccccaggcccccagcgctgagccccccctggagtggcccttcccagacctcttcagcgagcccctgtgccggggccccatcctgcccctgcaggccaacctgaccaggaagggcggctggctgcccaccggcagccccagcgtcatcctgcaggaccgctacagcggctag

SEQ ID NO: 164340 - DNA, 1116 bp, Artificial Sequence
  derived and/or modified sequence
atggagctggagctggacgccggcgaccaggacctgctggccttcctcctagaagagtctggtgacttgggcaccgcccctgacgaggccgtacgggcaccattagactgggccttgcctctttcagaagttccgtcagactgggaagttgacgacctactctgttccctgctgagcccacccgccagtctcaacattctttcttcctcaaatccttgcttggtccaccacgaccacacttactccttgcccagggaaacagtctctatggaccttgagtctgagtcttgtagaaaggagggaacacagatgacaccacagcacatggaggagcttgctgagcaggaaattgctcgcttggttctgactgatgaggagaagtcactgctcgagaaggagggcctgatacttccagagaccctgccattgactaagacagaggaacagattctgaagagggtgcggcggaagatacggaacaaacggtctgcccaggaatcacgcagaaaaaagaaggtttatgtcggcgggcttgaatcacgcgtgctaaagtacactgcccagaacatggagcttcagaataaagtgcagctacttgaggaacagaatttgagcttactggatcagctgagaaaactccaagccatggttatcgagatttccaacaaaaccagcagttctagcacgtgtatcctcgtcctgttagtgtcattctgtctccttcttgtgccggccatgtacagttctgacacccgaggtagcctgccagcagagcacggtgtgctcagtcggcagttaagggcactaccctccgaggacccttaccagttagagttgccagctttgcagagtgaggtaccgaaggacagtactcaccagtggctggacgggtccgattgcgtgctgcaggctcctggaaatacatcttgtctgctgcattatatgccacaggctcccagtgctgagcccccacttgagtggccgttccctgacctattctccgaacctttgtgtcggggccctattctaccattgcaagcaaacctgacgcggaagggaggctggctccccactggaagcccctcagttattctccaagataggtactccggatag

SEQ ID NO: 164341 - DNA, 1116 bp, Artificial Sequence
  derived and/or modified sequence
atggagcttgagctggacgccggtgatcaggacttgctggcatttctactggaggaatccggagatctgggcaccgcaccagatgaagcagtgcgcgcaccattggactgggctttacctctcagcgaggtcccaagcgactgggaagtggacgacctgctgtgcagcctactgtcacccccagcttcacttaatattctaagttcatcaaacccatgcttggtacatcatgaccatacctattctctaccaagagaaaccgtctcaatggatctggagtctgaatcttgtcgcaaagaggggacccagatgacaccacagcatatggaggagctcgctgagcaggagatagcgagacttgtcctgaccgacgaggagaagagtctcttagagaaggagggcctaatcctgcccgaaactctacccctaacgaagactgaagagcagatattgaagagggttcgtagaaagattaggaacaaacgctctgcgcaagagtcaagacggaagaaaaaagtctacgtcgggggacttgaatcgcgggtgcttaagtacactgcacagaacatggaactgcagaacaaggtgcagctgctggaagagcagaaccttagcttgcttgatcagctgagaaaactgcaggcaatggtgatcgaaatctctaacaagactagctcctcatctacttgcatccttgtactccttgttagcttttgtctcctgctcgtcccggcaatgtatagttcggacacaagaggcagtctacccgcagagcatggtgtcctctcgcgccaactgagagcgctcccatcagaggacccctatcagctcgagctgcccgcactccaatcagaagtgcccaaggactccacccatcagtggctggacggctctgactgcgtccttcaagctcctggtaacacctcttgtctgctgcactacatgcctcaagcccctagcgcagagcctcctctggaatggccctttccagacctgttttctgagcctctttgcagaggccctattctgcccttgcaggccaatctcaccagaaaaggcggttggttgccaaccgggagcccttcagtcatcctgcaagacagatattctgggtag

SEQ ID NO: 164342 - DNA, 1832 bp, Artificial Sequence
  derived and/or modified sequence
gcgcaatccggagaggacgccaggacgacgcccgagttccctttcaggctagaactcttcctttttctagcttggggtagaaggcggagccggagccccggaacccccgccctcggggtgcgaggcggcagcagggccgtcccctacatttgcatagcccctgggacgtggcgctgcacccaagcctcttctcagttggagggaactccaagtcccacagtgccacggggtggggtgcgtcactttcgctgcgttggaggctgaggagaattgagcctgggaggcgggtccggagagggctatggaaagccgccggcggggaatcccggccgtagagggacagtggataggtgcccgaggcctacagctggcctggggctcgtgtctgggcttcggacgttggggcccggtggcccaccctttccgtagttgtcccaaatggagctggaattggatgctggtgaccaagacctgctggccttcctgctagaggaaagtggagatttggggacggcacccgatgaggccgtgagggccccactggactgggcgctgccgctttctgaggtaccgagcgactgggaagtagatgatttgctgtgctccctgctgagtcccccagcgtcgttgaacattctcagctcctccaacccctgccttgtccaccatgaccacacctactccctcccacgggaaactgtctctatggatctagagagtgagagctgtagaaaagaggggacccagatgactccacagcatatggaggagctggcagagcaggagattgctaggctagtactgacagatgaggagaagagtctattggagaaggaggggcttattctgcctgagacacttcctctcactaagacagaggaacaaattctgaaacgtgtgcggaggaagattcgaaataaaagatctgctcaagagagccgcaggaaaaagaaggtgtatgttgggggtttagagagcagggtcttgaaatacacagcccagaatatggagcttcagaacaaagtacagcttctggaggaacagaatttgtcccttctagatcaactgaggaaactccaggccatggtgattgagatatcaaacaaaaccagcagcagcagcacctgcatcttggtcctactagtctccttctgcctcctccttgtacctgctatgtactcctctgacacaagggggagcctgccagctgagcatggagtgttgtcccgccagcttcgtgccctccccagtgaggacccttaccagctggagctgcctgccctgcagtcagaagtgccgaaagacagcacacaccagtggttggacggctcagactgtgtactccaggcccctggcaacacttcctgcctgctgcattacatgcctcaggctcccagtgcagagcctcccctggagtggccattccctgacctcttctcagagcctctctgccgaggtcccatcctccccctgcaggcaaatctcacaaggaagggaggatggcttcctactggtagcccctctgtcattttgcaggacagatactcaggctagatatgaggatatgtggggggtctcagcaggagcctggggggctccccatctgtgtccaaataaaaagcggtgggcaagggctggccgcagctcctgtgccctgtcaggacgactgagggctcaaacacaccacacttaatggctttctgggtcttttatttgtacccatgtgtctgtcacaccatgaatgtacctggggaaatcaactgacctccctgaacatttcacgcagtcagggaacaggtgaggaaagaaataaataagtgattctaatgctg

SEQ ID NO: 164343 - DNA, 1116 bp, Artificial Sequence
  derived and/or modified sequence
atggagctggagctggacgccggcgaccaggacctgctggccttcctgctggaggagagcggcgacctgggcaccgcccccgacgaggccgtgagagcccccctggactgggccctgcccctgagcgaggtgcccagcgactgggaggtggacgacctgctgtgcagcctgctgagcccccccgccagcctgaacatcctgagcagcagcaacccctgcctggtgcaccacgaccacacctacagcctgcccagagagaccgtgagcatggacctggagagcgagagctgcagaaaggagggcacccagatgaccccccagcacatggaggagctggccgagcaggagatcgccagactggtgctgaccgacgaggagaagagcctgctggagaaggagggcctgatcctgcccgagaccctgcccctgaccaagaccgaggagcagatcctgaagagagtgagaagaaagatcagaaacaagagaagcgcccaggagagcagaagaaagaagaaggtgtacgtgggcggcctggagagcagagtgctgaagtacaccgcccagaacatggagctgcagaacaaggtgcagctgctggaggagcagaacctgagcctgctggaccagctgagaaagctgcaggccatggtgatcgagatcagcaacaagaccagcagcagcagcacctgcatcctggtgctgctggtgagcttctgcctgctgctggtgcccgccatgtacagcagcgacaccagaggcagcctgcccgccgagcacggcgtgctgagcagacagctgagagccctgcccagcgaggacccctaccagctggagctgcccgccctgcagagcgaggtgcccaaggacagcacccaccagtggctggacggcagcgactgcgtgctgcaggcccccggcaacaccagctgcctgctgcactacatgccccaggcccccagcgccgagccccccctggagtggcccttccccgacctgttcagcgagcccctgtgcagaggccccatcctgcccctgcaggccaacctgaccagaaagggcggctggctgcccaccggcagccccagcgtgatcctgcaggacagatacagcggctag

SEQ ID NO: 164344 - protein, 232 aa, Artificial Sequence
  derived and/or modified sequence
MASSAASSEHFEKLHEIFRGLHEDLQGVPERLLGTAGTEEKKKLIRDFDEKQQEANETLAEMEEELRYAPLSFRNPMMSKLRNYRKDLAKLHREVRSTPLTATPGGRGDMKYGIYAVENEHMNRLQSQRAMLLQGTESLNRATQSIERSHRIATETDQIGSEIIEELGEQRDQLERTKSRLVNTSENLSKSRKILRSMSRKVTTNKLLLSIIILLELAILGGLVYYKFFRSH

SEQ ID NO: 164345 - DNA, 699 bp, Artificial Sequence
  derived and/or modified sequence
atggccagcagcgccgccagcagcgagcacttcgagaagctgcacgagatcttcagaggcctgcacgaggacctgcagggcgtgcccgagagactgctgggcaccgccggcaccgaggagaagaagaagctgatcagagacttcgacgagaagcagcaggaggccaacgagaccctggccgagatggaggaggagctgagatacgcccccctgagcttcagaaaccccatgatgagcaagctgagaaactacagaaaggacctggccaagctgcacagagaggtgagaagcacccccctgaccgccacccccggcggcagaggcgacatgaagtacggcatctacgccgtggagaacgagcacatgaacagactgcagagccagagagccatgctgctgcagggcaccgagagcctgaacagagccacccagagcatcgagagaagccacagaatcgccaccgagaccgaccagatcggcagcgagatcatcgaggagctgggcgagcagagagaccagctggagagaaccaagagcagactggtgaacaccagcgagaacctgagcaagagcagaaagatcctgagaagcatgagcagaaaggtgaccaccaacaagctgctgctgagcatcatcatcctgctggagctggccatcctgggcggcctggtgtactacaagttcttcagaagccactag

SEQ ID NO: 164346 - DNA, 699 bp, Artificial Sequence
  derived and/or modified sequence
atggccagcagcgctgctagctctgagcacttcgagaagcttcatgagatcttccggggtctgcacgaagacctgcagggagttcccgagaggctgcttggtaccgcgggcactgaggagaaaaaaaaactaatccgggacttcgatgagaagcagcaagaggccaatgagaccctggccgagatggaggaggagctgcggtacgcgccgctgtcgttcagaaatcctatgatgagtaagcttaggaactataggaaagacctggctaagctgcaccgcgaagttcgatcaacgcctctcacggccacccctggcggcaggggggatatgaagtacgggatctatgccgttgagaacgaacatatgaaccggcttcagtcccaacgcgcaatgttattacaaggtactgaatcgctgaatcgagccacccagagcatagagcgcagtcatcggatagcgacagagacggaccagatcggctctgaaatcatcgaggaactgggagaacagagggaccagttagaaaggacaaagtctagactggttaatacttcagaaaaccttagtaagtcacggaagatccttcggtcaatgtctcgtaaggttaccactaataaactcctcctttcaatcattattctcctcgagcttgcaattttaggcggcctggtctattacaaattcttccggagccattag

SEQ ID NO: 164347 - DNA, 699 bp, Artificial Sequence
  derived and/or modified sequence
atggccagcagcgctgccagcagcgagcactttgagaagctgcacgagatcttccggggcctgcacgaggacctgcagggcgtgcctgagcggctgctgggcacagctggaacagaggagaagaagaagctgatccgggactttgatgagaagcagcaggaggccaatgagaccctggccgagatggaggaggagctgcgctatgcccccctgtccttcaggaaccccatgatgagcaagctgaggaactacaggaaggacctggccaagctgcaccgggaggtgcgcagcacccccctgacagccacccctgggggccgcggggacatgaagtatggcatctatgctgtggagaatgagcacatgaaccggctgcagagccagagggccatgctgctgcagggcacagagagcctgaacagagccacccagagcattgaaagaagccaccgcatcgccacagaaacagaccagatcggcagcgagatcatcgaggagctgggggagcagagggaccagctggagaggaccaagagccggctggtgaacaccagcgagaacctgagcaagagcaggaagatcctgcgctccatgagcaggaaggtgaccaccaacaagctgctgctgagcatcatcatcctgctggagctggccatcctgggcggcctggtgtactacaagttcttccgcagccactag

SEQ ID NO: 164348 - DNA, 699 bp, Artificial Sequence
  derived and/or modified sequence
atggccagcagcgccgccagcagcgagcacttcgagaagctgcacgaaatttttcgggggttacacgaggatctgcagggggtcccggagcgcctgttaggcacagcaggcactgaagagaagaagaaacttattagagacttcgatgaaaaacaacaagaggcaaacgaaactttggccgaaatggaagaggaactgcggtacgcacccttatcctttcggaatcctatgatgtcaaaactccggaattatcgtaaggatctcgccaagcttcaccgagaagtgcgatcaacccctctgaccgccactccagggggacgcggcgacatgaaatacgggatttacgcagtggaaaatgaacatatgaaccggctgcagtcacaaagggcgatgttgctgcagggcaccgagtcactgaatcgagccactcaaagcatcgaaaggtctcaccgcatcgccaccgagacagatcagataggaagtgaaataatcgaagaactgggagagcagcgggaccagctcgaacgcactaagagcagactggtgaacacatctgagaacctatcgaaatcccggaagatcttgaggtcaatgtcacgcaaggtaaccacgaataagctactcctgtcgatcatcatattgctagagctggcgatcctgggggggctcgtgtattacaaattctttaggagccattag

SEQ ID NO: 164349 - DNA, 699 bp, Artificial Sequence
  derived and/or modified sequence
atggcgagcagcgccgcatcgtccgagcattttgaaaagttacatgaaatcttccgaggcctgcatgaggatctgcaaggggtgccagagaggctcttaggaactgctggcaccgaagagaagaagaagctgatcagagacttcgatgaaaagcagcaggaggccaatgaaactctagcagaaatggaggaagagcttagatacgccccactgtcctttcgtaaccctatgatgtccaaactgcgcaattaccgcaaggatctggccaagctgcacagggaagtccgatctacacctctgacggccacccctggcggtcggggtgacatgaaatacgggatttatgcggttgagaacgagcatatgaatcgccttcaaagccagcgggctatgctgcttcaaggtaccgaatctctgaacagagcaactcagtccattgagagatcccatcgcatagccaccgagaccgatcagatcgggtctgaaattattgaagagctgggcgaacaacgcgatcagttggaaagaacaaagagccgcctcgtcaatacttccgaaaaccttagcaagagcagaaagattctccggtcaatgagtcggaaggtcactacaaataaacttctcctgagcattataattttgcttgaactggccattcttggcggtttagtctattataagttttttcggtcccactag

SEQ ID NO: 164350 - DNA, 5351 bp, Artificial Sequence
  derived and/or modified sequence
ccctttcgctgcggcctttccccaacccggacccggcacttctcgggttccgcgactgccgatcgccccggcgcggcaccgctccctcaggagtcgcctaggccgcgcagtctcccgacttctcgtcaggctttcgcgccggcgctccagcaatcactggctggagaaggtgggcgttccggctcgagaggaccctgccgcggctccggaagagcctcgtcctgggcggcggtggtgcggcggtcgccgttatggccactgggctgggcggctgaccgccgggctaggaaagggcccagggccccgaatctcggtggccgctgctccagcgcggcctgcgccatggcctcctccgccgcctcctcggagcatttcgagaagctgcacgagatcttccgcggcctccatgaagacctacaaggggtgcccgagcggctgctggggacggcggggaccgaagaaaagaagaaattgatcagggattttgatgaaaagcaacaggaagcaaatgaaacgctggcagagatggaggaggagctacgttatgcacccctgtctttccgaaaccccatgatgtctaagcttcgaaactaccggaaggaccttgctaaactccatcgggaggtgagaagcacacctttgacagccacacctggaggccgaggagacatgaaatatggcatatatgctgtagagaatgagcatatgaatcggctacagtctcaaagggcaatgcttctgcagggcactgaaagcctgaaccgggccacccaaagtattgaacgttctcatcggattgccacagagactgaccagattggctcagaaatcatagaagagctgggggaacaacgagaccagttagaacgtaccaagagtagactggtaaacacaagtgaaaacttgagcaaaagtcggaagattctccgttcaatgtccagaaaagtgacaaccaacaagctgctgctttccattatcatcttactggagctcgccatcctgggaggcctggtttactacaaattctttcgcagccattgaacttctatagggaagggtttgtggaccagaactttgaccttgtgaatgcatgatgttagggatgtggatagaataagcatattgctgctgtgggctgacagttcaaggatgcactgtatagccaggctgtgggaggagggaggaaagatgaaaaaccacttaaatgtgaaggaacaacagcaacaagaccagtatgatataccaaggtaataaatgctgtttatgacttctttaaatttacatagtactgtagcatattaataccctgtgaactgcaaaaaaccaaatacatttacagtagtattggtcaccaaaatagaggggaaactttacaattgtgagaatgtgtaaatgttctcattaaggcagtattgacccagacaaccatttagtattcatctatcccctcaatgcctcataattctggaatgcctgttgtgaaacatgtcagtgcacagtgtctcctaaattctcacacgtgcttgattttctgattcatctggtgaactgggagtaggaagttggtcatagacaatatgccctccttctcttgtctgaccaaagcttgaagcaatcacatctactgccaggttagctgtagtcttcgcctcttcctctgaggtggccaactgaggattgacttcaacaagatccagtgctgatagcaaccctggaagaacaaagtgtgacaaaacctcaggttcccttgctgctactctcagtgagggtcatcccactgggacagggagaacaagccaaagtaaaaacaagagtccattttatagtagaaaatacctatttttaggaagccccttgcacctcatcctcttggccatgaatttaagttaaaacactgttgtgctatagtagattaaaagaaaccttttaagataatgaaataaaccatccctgttcaactaacataacaggcataattgtcaggcgttctggaaaaggaaaaggcttggtgttgggtgggggaggttttcatcctgcttgttggcaaaatgtatgccacctccagtatgactaggaaccttccagatgcctgcctggaaatgaatcaagtatgaaggcagaggaaatctgccacttgcactagccaaactgcattcccacttttgaactctaatgtgttatctgtatctgttagagcaccacaccatatgccctgaaatgtagttattactgcaaacttcattctcacccctgcaggcctgagctctggaggcaggttccacatctaacaacatctttttgtctcccagcagactgacccagtgtcttgtacttgatcaagagaaaattcagccatatgttaattattttatctggacttcagttaccttctgttaaggtttgagaacttgtgtcaaagttctcggtagtgttcctttggcctggagcaagtggaagggaagcttaaaccagaagaacctatccagacctgctactatgctcacccctctaaatgcctcacttctctatagaatttaactttttagttggttattctggatgaagggtgatctgaacaagctagtattcaggaatacaagtatctaagaatatttagggtggccataaagtctggaaacacaggcaaatgtacctaatggtttattgatattacactatagtacatgatgtgctgaatgccatcatgtccgttcagcatcttcccttattagcaatgcatagttgagtgtacagtgccaaactgcaaccaacaggtgtattactgtagcatttccatcatttcctgcacatggacctgtgttcctgatttgtctctgatttccactgactaaacctgcacctttagcatatcccagaagtggtcatcaaagtttgcactattagaaatatatacatgacttatgtttccagactattgccaccctataaattaagcaaactgctttatgtatctagttgacagcattataacagtgcagtggcacaatcatggctcactgcagcctcaacctcccaagtagttgggacacctggctaattattttttgtagaaacggggtcacactatgttgcccacgctggtcttgaacccctggggtcaagtaatcctcttgccttggcctcccagagtactgggattataggtatgaaccactgtgcctagccccatgagtgtcttttggagtaaaatattgtagcataggaacaaagagacaagccatgccatatataagtgctagaggttattaacccctgctctaagtggtgtttttaggaagcaaagcagagaattgaacccccaagttctctggccaataacctaaggaccactggcaacatctaagattgcagatctgagaattagaccagtactgcctgcctttttgtactgcctaaggttctggcaggctgtggcgctaaggagaccatttctcaatgtgagtttctatcccagctagtcaagggttctctatagccctgaacctttcaatctggggtctctatctataccctagttccatcagatggttactgaagcagtatgatttggtagttctttaaattttggaatgaaaggtcatttgaagtagctttaaaaccagaagctttctgacagaaatggaaactgtttgcaaacaagtatgagttttggaaaagtagccagtcttgataacgtagaattcatcttagtactctttccatcagccattctcatctaactgtatcccccttattagaaatcctttcaggctctagtacaagacctaccctacataaaggacccaagatattgtccagtttgcagatttcttcaagagatcagctttagctccaaattcacaactcccaatgaaccaatctcttagagtgcaaattacagccttgcactcttatcttatcttgccttcttatcttaatctgcctttagataactcaaagaactgcatcagtttgacaatttattcttgtatttaattgtttaaatatacaattttttactcattattaccttagtgtaatttggtaagagccatgtccaagcatgactctaaaggactatatcctttttattagcatggccatataatttttagctacaaaagtttaagcaaaaacaaactctgcaatgatgtggaatagcagaaaagatcctttgcaggcaagagactctagcatatttacctatgtagttaacaggctgcagacctggttgctacatacctgtattgtgtatttcctcagcaatatacatgccttctcgataggttagtcccccgacaacaggagttcctgtggctggagccagtgtagggtcaaatgcatcaatatcaaaactcaaatggattggtctttgtctcctaaaaaggaagaggataaaataatacttaaaataatacttaactggttgtccttggacactcatccttcttatggttgcaactccttgattttgttgctattagtcctagtactttgttaataaagctgttaatacatttccaggcttcctattcttggaagttactgagattggcaatattaacttcctacataccacttcatgatactgccatttgttctgcatacctcagacagactaactccaatgtatatttctgccttacactgggtattagaacctcttatactaataactgtcaatagagagatttcttcacttctagatgagattgggctctcatctagagacaatttaattagacaatttaaattagtctaatttaaattggcttgatgtaagttatggttgctcttattctctgaacgtaacagcagctgaagtgaactctaattttaggtctgcagttttaacatcttccatttctaacttcattatagccccagtgtccaaaggctgaagctaacaactaagtttcttaacagcttatgaaatgacatactaccagataacaattctgacattaatcacccagaagtaaagacttggtattgggaaaatgctcttaaaattaccatttgattagtattcatctgccatctttctacactgccaagatttgcttaatataaaactcagatgaaacaatcgtgaggctgggaagaatgggacagttgaaacaataaatgcttgtcatctcagaagataagcattaaagatggagataaagaaaaattcatgagacagaagatctaggcaatgatttagaggaaacctcctcccaaaaaccccagaggaagaatatgacctgtgtttcaaattttgcctttctgaactatttaaaattatgtgtatgtttttgctttgtattttaaaagtaaagctgctgtcctcaagaaacaggctaaaa

SEQ ID NO: 164351 - protein, 401 aa, Artificial Sequence
  derived and/or modified sequence
MEPGRRGAAALLALLCVACALRAGRAQYERYSFRSFPRDELMPLESAYRHALDKYSGEHWAESVGYLEISLRLHRLLRDSEAFCHRNCSAAPQPEPAAGLASYPELRLFGGLLRRAHCLKRCKQGLPAFRQSQPSREVLADFQRREPYKFLQFAYFKANNLPKAIAAAHTFLLKHPDDEMMKRNMAYYKSLPGAEDYIKDLETKSYESLFIRAVRAYNGENWRTSITDMELALPDFFKAFYECLAACEGSREIKDFKDFYLSIADHYVEVLECKIQCEENLTPVIGGYPVEKFVATMYHYLQFAYYKLNDLKNAAPCAVSYLLFDQNDKVMQQNLVYYQYHRDTWGLSDEHFQPRPEAVQFFNVTTLQKELYDFAKENIMDDDEGEVVEYVDDLLELEETS

SEQ ID NO: 164352 - protein, 262 aa, Artificial Sequence
  derived and/or modified sequence
MEPGRRGAAALLALLCVACALRAGRAQYERYSFRSFPRDELMPLESAYRHALDKYSGEHWAESVGYLEISLRLHRLLRDSEAFCHRNCSAAPQPEPAAGLASYPELRLFGGLLRRAHCLKRCKQGLPAFRQSQPSREVLADFQRREPYKFLQFAYFKANNLPKAIAAAHTFLLKHPDDEMMKRNMAYYKSLPGAEDYLKTWKPSHMKACSSEQCGHTTVRTGEHPSQTWSWPFPTSSKPFTSVSQPARVPGRSRTSRISTFP

SEQ ID NO: 164353 - protein, 262 aa, Artificial Sequence
  derived and/or modified sequence
MEPGRRGAAALLALLCVACALRAGRAQYERYSFRSFPRDELMPLESAYRHALDKYSGEHWAESVGYLEISLRLHRLLRDSEAFCHRNCSAAPQPEPAAGLASYPELRLFGGLLRRAHCLKRCKQGLPAFRQSQPSREVLADFQRREPYKFLQFAYFKANNLPKAIAAAHTFLLKHPDDEMMKRNMAYYKSLPGAEDYIKDLETKSYESLFIEQCGHTTVRTGEHPSQTWSWPFPTSSKPFTSVSQPARVPGRSRTSRISTFP

SEQ ID NO: 164354 - protein, 388 aa, Artificial Sequence
  derived and/or modified sequence
MEPGRRGAAALLALLCVACALRAGRAQYERYSFRSFPRDELMPLESAYRHALDKYSGEHWAESVRDSEAFCHRNCSAAPQPEPAAGLASYPELRLFGGLLRRAHCLKRCKQGLPAFRQSQPSREVLADFQRREPYKFLQFAYFKANNLPKAIAAAHTFLLKHPDDEMMKRNMAYYKSLPGAEDYIKDLETKSYESLFIRAVRAYNGENWRTSITDMELALPDFFKAFYECLAACEGSREIKDFKDFYLSIADHYVEVLECKIQCEENLTPVIGGYPVEKFVATMYHYLQFAYYKLNDLKNAAPCAVSYLLFDQNDKVMQQNLVYYQYHRDTWGLSDEHFQPRPEAVQFFNVTTLQKELYDFAKENIMDDDEGEVVEYVDDLLELEETS

SEQ ID NO: 164355 - DNA, 1206 bp, Artificial Sequence
  derived and/or modified sequence
atggagcctgggaggcgtggtgccgcagctctattggccctgctctgtgtggcctgtgctctgagagcagggagggcccagtacgagaggtattctttcagaagttttccccgcgatgaactcatgccgctggaatccgcctatcgccatgccctggacaaatattcaggagagcactgggcagagtcagtggggtacctagagatttctctgcggctgcaccgcttgctccgtgatagtgaagcattctgtcatagaaactgctccgcagccccccagccggagcctgcggcagggctcgcttcctaccctgagctccgcctatttgggggcctcttgaggagggcccattgcctgaagcggtgtaagcaaggactgccagctttccgtcagtctcagccaagtagagaagtcctagctgacttccagcggcgcgaaccgtataagttcctgcagttcgcctatttcaaggctaataacctgcctaaagccatcgccgccgctcacacctttttgttgaaacaccctgacgacgagatgatgaagcgtaatatggcgtactataaaagcttgcctggggcagaagactatattaaggatctcgagaccaagtcttacgagagtttgttcatcagggcggtgagggcctacaacggggagaattggagaacctccatcacggacatggagctggccctgccagacttcttcaaggcgttttacgagtgcctagctgcctgtgagggaagtcgggaaataaaagactttaaggatttttacctgagcatcgccgaccattatgtggaagtactggaatgcaaaattcaatgcgaagaaaatctgacccctgtgatcggcggctaccccgttgagaaatttgtggctaccatgtaccactacctccagtttgcatattacaaattaaatgatttgaagaacgcagctccatgcgctgtgtcttacttattgttcgaccagaatgacaaggtcatgcagcagaacctagtgtattatcagtatcatcgggatacatgggggctttcagatgaacacttccagccaagaccagaggccgtgcagttctttaacgtaaccacactccagaaagaactttatgactttgctaaagagaatatcatggacgacgatgagggcgaggtagtggagtatgtggatgacctgctcgagctggaagaaactagctag

SEQ ID NO: 164356 - DNA, 789 bp, Artificial Sequence
  derived and/or modified sequence
atggagcccggacggagaggagcagctgcactactggccctgttgtgtgtcgcctgcgctctgagggctggtcgggctcagtacgagcggtattcttttcgctccttcccccgcgatgaactcatgccccttgagtcagcatatagacacgccctcgacaaatattctggtgagcattgggccgaaagcgtcgggtacttagaaattagtctgcgtctccatcgactactgcgggactccgaggcattttgtcatcgcaactgtagtgcggccccccagcccgagcccgcagccggcctcgccagctatcccgaactgagactgttcggcggattgctgcgtcgcgcccattgcctaaaaagatgcaaacagggcctgccggccttccgacagagtcagccttcacgcgaagtgttggcagacttccaacggcgggaaccctacaaatttcttcagtttgcttactttaaagccaataatctgccaaaggccatcgcggcggcccatacattcctcctcaaacaccccgacgacgagatgatgaagcggaatatggcgtactacaagtccctgcctggcgcagaggactatctgaagacatggaagccctctcacatgaaagcctgtagctctgaacaatgcggacacaccacggtgaggacaggtgagcatccttctcagacatggagctggccgttccccacaagctctaagcctttcacctctgtgagccagcctgccagagtgcccggacgtagcagaacgtcacgaataagtacctttccctag

SEQ ID NO: 164357 - DNA, 789 bp, Artificial Sequence
  derived and/or modified sequence
atggagcctggacggaggggggccgccgcgttgctcgcacttctgtgcgtggcttgcgctctccgcgctggcagggcacagtatgagcggtattcatttcgctcctttcctcgggacgagctgatgccattggaaagtgcctatcggcacgccctggacaagtacagtggcgagcattgggctgagtccgtaggctacctcgaaatcagcctcaggttgcacaggttgttgagggacagcgaggcattctgtcacaggaattgctccgccgccccacaacccgagcctgcagcagggctggccagttatccagaactgaggctgttcgggggtctactcaggagagcgcattgtcttaagcggtgtaagcaaggcttgcccgcatttcgacaatcccagccatctcgggaagtcctggcagacttccagcggcgcgaaccttacaagttcttgcagtttgcttacttcaaggccaacaatttgcctaaggccatcgccgccgcccacacgttcttgctgaagcaccctgatgatgagatgatgaaacgcaatatggcatattataagtcactgcccggggctgaagactacattaaggacctcgagactaagtcatacgaaagtttgtttatcgaacagtgtgggcacaccacggtacgcacgggagaacatccatctcagacttggtcctggccttttccaactagtagcaaaccattcacctccgttagccagcccgcccgcgtccctggccggtccagaacatcccgtatctcaacctttccgtag

SEQ ID NO: 164358 - DNA, 1167 bp, Artificial Sequence
  derived and/or modified sequence
atggagcccggcaggcgcggcgctgctgcgctccttgcactgctctgcgtagcttgcgctctccgagcaggcagagcgcaatacgagcggtacagcttccggagctttccacgcgacgaactgatgcccctcgaatctgcttatagacacgctctggacaagtatagtggggaacattgggcagaaagcgtgcgggacagcgaggctttctgtcatcgaaattgctccgccgctccccaaccggagcccgccgccggtctggcctcttaccccgagctccggttgtttggcggactcctgcgccgagcccactgcctgaagcggtgcaagcaaggtctacccgcctttcgacaaagtcaacctagcagggaggtcctcgccgacttccagaggcgtgaaccttataagtttcttcagttcgcgtacttcaaagccaacaacctgccaaaggccattgcagctgcacataccttcttactgaaacatcctgacgatgaaatgatgaagcggaacatggcgtactacaagtccctgcccggggcggaagactacataaaggatctggagactaaatcttacgagtccttgtttatccgggccgttagggcttacaatggagaaaattggcgcacaagcatcaccgacatggagctcgctctgcccgacttcttcaaagctttttacgaatgcctagctgcctgcgaaggaagtcgcgagattaaggattttaaggacttctatctgtccatagccgaccactacgttgaagttttggagtgcaagatccagtgtgaggaaaaccttacaccggtcataggtggatacccagtggaaaaattcgtggccactatgtaccattaccttcagttcgcatactacaagctgaatgatctcaaaaatgcagctccgtgcgccgtgtcctacctgctgttcgaccagaatgacaaggtcatgcagcagaacttagtctattaccagtatcatagggatacatggggtctgagcgacgaacatttccagccccggccggaggccgtccaattctttaacgttactaccctccagaaagaattatatgactttgccaaagaaaacatcatggatgacgacgaaggggaggtcgttgaatatgtggatgatcttctcgagctggaggaaacaagctag

SEQ ID NO: 164359 - DNA, 1206 bp, Artificial Sequence
  derived and/or modified sequence
atggagcctggaagaagaggagctgctgccctgctggccctgctgtgtgtggcctgtgccctgcgggccggccgggcccagtatgaaagatacagcttccgctccttccccagagatgagctgatgcccctggagagcgcctacagacatgccctggacaagtacagcggggagcactgggccgagagcgtgggctacctggagatcagcctgcggctgcaccggctgctgcgggacagcgaggccttctgccacaggaactgcagcgctgccccccagcctgagcctgctgctggcctggccagctacccagagctgcggctgtttggaggcctgctgcggcgggcccactgcctgaagcgctgcaagcagggcctgcctgccttccggcagagccagcccagccgggaggtgctggccgacttccagaggcgggagccctacaagttcctgcagtttgcctacttcaaggccaacaacctgcccaaggccatcgctgctgcccacaccttcctgctgaagcacccagatgatgagatgatgaagaggaacatggcctactacaagagcctgcccggggctgaggactacatcaaggacctggagaccaagagctatgagagcctcttcatccgggctgtgcgggcctacaacggggagaactggaggaccagcatcacagacatggagctggccctgcctgacttcttcaaggccttctatgagtgcctggccgcctgtgagggcagccgggagatcaaggacttcaaggacttctacctgagcattgctgaccactacgtggaggtgctggagtgcaagatccagtgtgaggagaacctgacccctgtgattggaggctaccctgtggagaagtttgtggccaccatgtaccactacctgcagtttgcctactacaagctgaatgacctgaagaatgctgccccctgtgctgtgtcctacctgctgtttgaccagaatgacaaggtgatgcagcagaacctggtgtactaccagtaccaccgggacacctggggcctgagtgatgagcacttccagcccaggcctgaggccgtgcagttcttcaacgtgaccaccctgcagaaggagctgtatgactttgccaaggagaacatcatggatgatgatgaaggagaggtggtggagtatgtggatgacctgctggagctggaggagaccagctag

SEQ ID NO: 164360 - DNA, 789 bp, Artificial Sequence
  derived and/or modified sequence
atggagcctggaagaagaggagctgctgccctgctggccctgctgtgtgtggcctgtgccctgcgggccggccgggcccagtatgaaagatacagcttccgctccttccccagagatgagctgatgcccctggagagcgcctacagacatgccctggacaagtacagcggggagcactgggccgagagcgtgggctacctggagatcagcctgcggctgcaccggctgctgcgggacagcgaggccttctgccacaggaactgcagcgctgccccccagcctgagcctgctgctggcctggccagctacccagagctgcggctgtttggaggcctgctgcggcgggcccactgcctgaagcgctgcaagcagggcctgcctgccttccggcagagccagcccagccgggaggtgctggccgacttccagaggcgggagccctacaagttcctgcagtttgcctacttcaaggccaacaacctgcccaaggccatcgctgctgcccacaccttcctgctgaagcacccagatgatgagatgatgaagaggaacatggcctactacaagagcctgcccggggctgaggactacctgaagacctggaagcccagccacatgaaggcctgcagcagcgagcagtgtggccacaccaccgtgaggactggagagcaccccagccagacctggagctggcccttccccaccagcagcaagcccttcacctctgtgtcccagcctgcccgggtgcccggccgcagcaggaccagccgcatcagcaccttcccctag

SEQ ID NO: 164361 - DNA, 789 bp, Artificial Sequence
  derived and/or modified sequence
atggagcctggaagaagaggagctgctgccctgctggccctgctgtgtgtggcctgtgccctgcgggccggccgggcccagtatgaaagatacagcttccgctccttccccagagatgagctgatgcccctggagagcgcctacagacatgccctggacaagtacagcggggagcactgggccgagagcgtgggctacctggagatcagcctgcggctgcaccggctgctgcgggacagcgaggccttctgccacaggaactgcagcgctgccccccagcctgagcctgctgctggcctggccagctacccagagctgcggctgtttggaggcctgctgcggcgggcccactgcctgaagcgctgcaagcagggcctgcctgccttccggcagagccagcccagccgggaggtgctggccgacttccagaggcgggagccctacaagttcctgcagtttgcctacttcaaggccaacaacctgcccaaggccatcgctgctgcccacaccttcctgctgaagcacccagatgatgagatgatgaagaggaacatggcctactacaagagcctgcccggggctgaggactacatcaaggacctggagaccaagagctatgagagcctcttcatcgagcagtgtggccacaccaccgtgaggactggagagcaccccagccagacctggagctggcccttccccaccagcagcaagcccttcacctctgtgtcccagcctgcccgggtgcccggccgcagcaggaccagccgcatcagcaccttcccctag

SEQ ID NO: 164362 - DNA, 1167 bp, Artificial Sequence
  derived and/or modified sequence
atggagcctggaagaagaggagctgctgccctgctggccctgctgtgtgtggcctgtgccctgcgggccggccgggcccagtatgaaagatacagcttccgctccttccccagagatgagctgatgcccctggagagcgcctacagacatgccctggacaagtacagcggggagcactgggccgagagcgtgcgggacagcgaggccttctgccacaggaactgcagcgctgccccccagcctgagcctgctgctggcctggccagctacccagagctgcggctgtttggaggcctgctgcggcgggcccactgcctgaagcgctgcaagcagggcctgcctgccttccggcagagccagcccagccgggaggtgctggccgacttccagaggcgggagccctacaagttcctgcagtttgcctacttcaaggccaacaacctgcccaaggccatcgccgccgcccacaccttcctgctgaagcacccagatgatgagatgatgaagaggaacatggcctactacaagagcctgcctggagctgaggactacatcaaggacctggagaccaagagctatgagagcctcttcatccgggctgtgcgggcctacaatggagagaactggaggaccagcatcacagacatggagctggccctgcctgacttcttcaaggccttctatgaatgtctggccgcctgtgagggcagccgggagatcaaggacttcaaggacttctacctgagcattgctgaccactacgtggaggtgctggagtgcaagatccagtgtgaggagaacctgacccctgtgattggaggctaccctgtggagaagtttgtggccaccatgtaccactacctgcagtttgcctactacaagctgaatgacctgaagaatgctgccccctgtgctgtgtcctacctgctgtttgaccagaatgacaaggtgatgcagcagaacctggtgtactaccagtaccaccgggacacctggggcctgagtgatgagcacttccagcccaggcctgaggccgtgcagttcttcaacgtgaccaccctgcagaaggagctgtatgactttgccaaggagaacatcatggatgatgatgaaggagaggtggtggagtatgtggatgacctgctggagctggaggagaccagctag

SEQ ID NO: 164363 - DNA, 1206 bp, Artificial Sequence
  derived and/or modified sequence
atggagcccggccggcggggcgccgccgccctgctggccctgctgtgtgtagcatgcgctttgcgagccggccgagcccaatacgagcgctactcttttcggagtttccctcgcgacgagctgatgcccttggagagtgcatatcgtcacgcacttgataagtatagcggtgagcactgggccgagagtgttggctacctggagatttcccttagattgcataggctcctcagagacagtgaagccttctgccacagaaactgctctgcggctccccagccagaacccgctgcgggcctagccagctaccccgagctgcggctgtttggaggcctcctgcgccgcgcccattgccttaaaaggtgcaagcaagggctgcccgctttcagacaaagccagcccagtcgcgaggtgctggctgactttcagcgtcgtgagccttacaagttcctgcaattcgcatattttaaagccaataaccttccgaaagccattgcagccgcccatacattccttctgaaacaccccgatgacgagatgatgaaacgcaatatggcatactataagtccctccctggagcagaggattacatcaaagacttagaaaccaaaagttatgaatccctgttcataagagcagttagagcatacaacggcgaaaattggcggactagtattactgatatggaattggctctcccagattttttcaaggcattctatgaatgcttagctgcctgcgaaggatcccgagagattaaagacttcaaagacttttacctctctatcgcagaccactatgttgaagtgttagaatgcaaaattcagtgcgaggagaatctcactcccgtgatcggcggctatcccgtcgagaaatttgtcgccaccatgtatcactacctacagtttgcatactacaaattgaatgacttgaagaatgcagctccctgcgctgtctcctatctgctctttgaccagaatgacaaagtaatgcagcagaatctcgtgtactaccagtaccatcgggatacttgggggcttagcgatgaacactttcagccccgcccagaagccgtgcagttctttaacgttactacacttcaaaaagaactgtatgattttgcaaaggaaaacatcatggatgacgatgagggtgaagtcgtagagtatgtggatgacctccttgagttggaggagacttcgtag

SEQ ID NO: 164364 - DNA, 789 bp, Artificial Sequence
  derived and/or modified sequence
atggagcccggccggcggggcgccgccgccctgctggccctgctgtgcgtggcctgtgcgctccgggccggcagggctcagtatgagaggtacagcttcagatcgtttcccagagatgagcttatgcccctagaatctgcttaccggcatgctctcgacaagtattccggagaacactgggctgagtctgttggctacctggaaataagcctcaggctgcacagactgctacgcgatagtgaggctttttgccacagaaactgctcagccgcaccccagcccgagcctgcagccggtctcgcctcctatcccgaactgcgtctgtttggcggcttgctgcgacgagcgcattgtctcaaaaggtgcaagcaagggcttcctgccttccgacagtctcaacccagtagagaggttcttgctgattttcagcggagggaaccatataagtttctacagtttgcatactttaaggccaataacctccccaaagccatcgccgcagcacacaccttcctcctcaagcatccggatgacgagatgatgaagaggaacatggcatactataaatccctgcccggcgcagaagactatcttaaaacttggaagccatctcacatgaaagcgtgtagctcagaacagtgtggccacactacagtgcggacaggcgagcacccttctcagacctggagctggccgttcccaacaagtagcaaaccattcacgtccgtgtcgcagccagccagagtgcctgggcggagtaggacgagtcgcattagtacattcccttag

SEQ ID NO: 164365 - DNA, 789 bp, Artificial Sequence
  derived and/or modified sequence
atggagcccggccggcggggcgccgccgccctgctggccctgctgtgcgtagcttgcgctctccgggccggacgcgctcagtatgagaggtatagcttccgttcctttccgcgtgatgaactcatgcccctggagagcgcgtaccgccatgctttagataaatattcaggagagcactgggcagaatccgtgggctacctggagataagcttaaggctccatcgcctgctgagagacagtgaggctttttgtcacagaaactgctccgcagcaccccagcccgagcctgcagcggggctcgcctcgtatcctgaacttcggttgtttggcgggctcctgaggcgggcccactgtctgaaaaggtgcaaacaaggcctgcccgccttccgtcagtcccagccgtctcgagaagtgttggctgactttcagcggagggaaccttataagtttctccagtttgcctatttcaaagcaaacaatctgccgaaggcaattgcggctgcccatacgtttctattaaaacaccccgatgatgagatgatgaaaaggaacatggcctattacaaatcactgcctggtgcagaagactatatcaaggacctagagacaaagagctatgaatctctattcatcgaacagtgcgggcacacaactgtcaggacaggtgagcacccatcccaaacctggtcctggcccttccccacttcctccaaaccttttactagcgtaagccagcccgctagagttccgggtcggtctcgtacatcgcggattagtactttcccatag

SEQ ID NO: 164366 - DNA, 1167 bp, Artificial Sequence
  derived and/or modified sequence
atggagcccggccggcggggcgccgccgccctgctggccctgctgtgtgtggcttgcgccctcagagccggacgcgcccagtacgaacgatacagtttcaggagtttcccccgggacgaattaatgcccctggagtccgcctaccgtcatgccctggacaaatacagtggggagcactgggctgagagcgtccgcgacagcgaagctttttgtcaccgaaattgcagtgcggctccccagcccgagccggccgcgggactggcaagctatcccgaactgagactgttcgggggcctcctgcgacgtgctcactgccttaaacggtgcaaacaggggcttccagcattcagacaaagccagcccagcagagaggtgctcgcagattttcagcggcgagaaccctacaaattccttcagttcgcgtactttaaggcaaacaacctgcctaaagctatcgccgctgcccatactttcctgctcaaacatcctgatgacgaaatgatgaaacggaacatggcttactacaaatcactccctggcgcagaagactatatcaaggacctcgaaaccaagagttacgaatccctttttatcagagccgttcgggcatataacggcgagaattggaggacaagcattactgatatggaactcgcccttccagacttcttcaaagcgttctatgaatgtcttgccgcttgcgagggatccagagaaataaaggattttaaggacttttacctctctatagccgatcactacgtcgaggtgctggaatgtaagatccaatgcgaggaaaacctcacacctgttatcgggggctatccagtggaaaaatttgtggctactatgtaccactatcttcaatttgcgtactacaaactgaacgacctgaaaaatgcggctccatgtgcagtttcgtacttgctgtttgatcagaatgacaaggtaatgcaacagaacctcgtctactatcaatatcatcgcgacacgtgggggctcagtgacgaacactttcaacccaggccagaagccgtccagttttttaatgtgacgaccctgcagaaggaactgtacgactttgcaaaagaaaacatcatggacgacgacgaaggcgaggtcgtggagtatgtagacgacctgctcgagcttgaagaaacctcatag

SEQ ID NO: 164367 - DNA, 1206 bp, Artificial Sequence
  derived and/or modified sequence
atggaaccagggcgaagaggggcagcggcattgctagctctgctgtgtgtggcttgcgctcttcgagccggaagggcccagtatgaaagatattccttccgcagctttccacgtgatgagctcatgcctctggagagcgcctaccgtcacgctctggacaaatactctggagagcattgggcagaatctgtaggctacttggaaatttccctaagactccacagactgcttcgggactccgaggcattttgtcacaggaactgcagcgccgctccacagccagagcccgctgctgggctggcatcgtatccagaactccggttgttcggtggcctgctccgacgagcgcattgcttaaagcgatgtaaacagggcctccctgcttttcggcagtcccagccgagtagagaagtgctagcagatttccagagacgtgagccgtacaagttccttcagtttgcatactttaaggcgaacaaccttccaaaggccattgctgcagcacacaccttcttactgaaacaccccgacgacgaaatgatgaagaggaacatggcctactacaagtcccttccaggtgccgaagattatatcaaagatttggagactaagagctacgagtctctatttatcagagcagtgcgcgcttataatggggagaattggcgcaccagcatcaccgatatggagctggctttacccgacttttttaaagcattctatgaatgcctggctgcatgcgaaggctcgcgcgaaattaaggactttaaggatttttacttgagcattgccgatcactatgtggaggtgcttgagtgcaagatccagtgtgaggagaatctcactcctgtgatcggagggtatcccgttgaaaaattcgtcgctacaatgtatcattatctgcagtttgcttattataaactgaacgacctcaagaacgccgcaccatgtgcagtgtcatacctgttattcgaccagaacgataaggtgatgcagcaaaatctggtatactaccagtatcatcgcgacacttggggcctttccgacgagcactttcagccacggcctgaagccgtacagttttttaacgtgactacattgcagaaggagttgtatgatttcgcgaaggagaacataatggacgatgatgagggagaggtcgtcgagtatgtggacgatctgctcgagctggaggagacctcgtag

SEQ ID NO: 164368 - DNA, 789 bp, Artificial Sequence
  derived and/or modified sequence
atggagcccggtaggcgtggggctgcggctctgcttgcccttctgtgcgtcgcatgcgccctgagagcaggtagagctcagtacgaaaggtacagctttcgctccttccccagggatgaactcatgcctctggaaagtgcctaccggcacgcgttggacaaatatagcggcgaacactgggccgaatcagtgggatacctggagataagtttaaggctgcacaggctactgcgagacagcgaggccttttgtcacaggaactgctccgccgctccccaacctgaaccggctgctggtttggccagctatcccgaacttcgcctgtttggaggactgctccgacgagcgcactgcctgaaacggtgcaaacaggggctcccagcttttcgacagagccagccatctcgagaggtccttgctgactttcaacgcagggaaccctataaatttctacagtttgcttattttaaagcaaataacctaccgaaggcaattgctgccgctcacacatttctgctgaaacatcctgatgatgaaatgatgaaaagaaatatggcctactataagagtcttcccggagccgaagactacttgaagacctggaagccaagccatatgaaggcttgctcgtctgagcagtgcggacacacaaccgttaggacaggcgagcatccctctcagacatggagctggccctttcctacatcgtccaaacccttcacctcagtgtcacagcctgctagagtgcctggaaggtcacgcacatcccgcatatcaactttcccgtag

SEQ ID NO: 164369 - DNA, 789 bp, Artificial Sequence
  derived and/or modified sequence
atggaaccagggagaagaggggctgctgcactgctggcgctgttgtgtgtagcctgtgcactgagagccggtagagctcagtacgagcggtattcatttcgttcctttccaagggatgagctgatgccactcgaaagcgcttatagacatgccctcgacaagtatagcggcgagcattgggcagagtccgtggggtatctggagataagtctccggctccacagattgctccgagatagcgaagctttctgtcaccgcaactgctctgcggcacctcagccagagcccgcagccggtttagcttcataccccgagctgcggctgtttggtgggctgctgcgcagggcacactgcctgaagaggtgtaaacaagggctgcccgctttccgccagtcacagcccagtcgcgaagttttggcagattttcagaggagagaaccatataagtttctgcagtttgcttatttcaaagccaacaatctgccaaaggctattgctgctgctcacacttttctgctgaagcaccctgatgatgagatgatgaagcgtaatatggcgtactacaagagcctcccgggagccgaagattacatcaaagacctggaaacgaagtcctacgagagtctgttcatcgaacagtgcggacacacaactgttaggactggcgaacatccttcccaaacttggtcttggccctttccgaccagttctaagccctttacatccgtatcacagccagctcgggtacctgggcgtagtcggaccagccgtattagtacttttccatag

SEQ ID NO: 164370 - DNA, 1167 bp, Artificial Sequence
  derived and/or modified sequence
atggagccaggcagaagaggagcagccgctctcttggccctgctgtgcgtcgcgtgcgctcttagggccggtcgcgcacagtacgaacgttattcttttcgtagcttcccccgtgacgaattaatgcccctggaaagcgcctaccggcacgctctggacaaatactccggtgagcactgggcagaatcggttcgcgactcagaggcattctgccataggaactgctctgccgcaccacagcccgaacctgccgctggcttggcctcctaccccgaactgagattgttcggcggactccttaggcgcgctcactgtcttaagcgttgcaagcagggattgcccgcatttaggcagtcccaaccatcaagagaagtccttgcagacttccagagacgggagccatacaagttcctgcagtttgcatactttaaagcaaacaatcttccaaaagccatcgctgccgcacacacattcttgctgaaacaccctgatgatgagatgatgaaaaggaacatggcctattataagagcctgccaggtgcagaagactacattaaagatttggagacaaagtcctacgagtcgcttttcatcagggctgtccgagcatacaatggcgagaactggcgaacatccatcacagacatggaacttgctcttcccgattttttcaaagccttctacgaatgtctggctgcgtgtgaaggctcacgggagattaaagacttcaaggatttctacctgagcattgctgaccattatgtagaagtcttggaatgtaaaatccagtgtgaggaaaacctgacccccgtgatcggcggatatcccgtggagaagttcgtggccacaatgtatcactatctacagttcgcgtattataagttaaatgatctgaagaatgcagcaccctgcgcagtctcgtatttgctgttcgatcagaatgacaaggtgatgcagcagaatctcgtgtattaccagtaccatcgtgatacttggggcctgtctgacgaacactttcagcccaggccagaggccgtgcagttcttcaatgtaacaactctccaaaaagaactgtatgatttcgccaaggaaaatatcatggacgacgacgagggcgaggtggtggagtacgtcgacgacctgctagaattggaagaaacgtcttag

SEQ ID NO: 164371 - DNA, 2518 bp, Artificial Sequence
  derived and/or modified sequence
aagcactgggcccgccgcgtcgcaccgtcctctttcctttccttctccctccccttttcccttccttcgtcccttccttccttcctttcgccgggcgcgatggagccggggcgccggggggccgcggcgctgctagcgctgctgtgcgtggcctgcgcgctgcgcgccgggcgcgcccaatacgaacgctacagcttccgcagcttcccacgggacgagctgatgccgctcgagtcggcctaccggcacgcgctggacaagtacagcggcgagcactgggccgagagcgtgggctacctggagatcagcctgcggctgcaccgcttgctgcgcgacagcgaggccttctgccaccgcaactgcagcgccgcgccgcagcccgagcccgccgccggcctcgccagctatcccgagctgcgcctcttcgggggcctgctgcgccgcgcgcactgcctcaagcgctgcaagcagggcctgccagccttccgccagtcccagcccagccgcgaggtgctggcggacttccagcgccgcgagccctacaagttcctgcagttcgcttacttcaaggcaaataatctccccaaagccatcgccgctgctcacacctttctactgaagcatcctgatgacgaaatgatgaagaggaacatggcatattataagagcctgcctggtgccgaggactacattaaagacctggaaaccaagtcatatgaaagcctgttcatccgagcagtgcgggcatacaacggtgagaactggagaacatccatcacagacatggagctggcccttcccgacttcttcaaagccttttacgagtgtctcgcagcctgcgagggttccagggagatcaaggacttcaaggatttctacctttccatagcagatcattatgtagaagttctggaatgcaaaatacagtgtgaagagaacctcaccccagttataggaggctatccggttgagaaatttgtggctaccatgtatcattacttgcagtttgcctattataagttgaacgacctgaagaatgcagccccctgtgcagtcagctatctgctctttgatcagaatgacaaggtcatgcagcagaacctggtgtattaccagtaccacagggacacttggggcctctcggatgagcacttccagcccagacctgaagcagttcagttctttaatgtgaccacactccagaaggagctgtatgactttgctaaggaaaatataatggatgatgatgagggagaagttgtggaatatgtggatgacctcttggaactggaggagaccagctagcccacagcaaccaaagagacttcctcttggcgttcaggaaacacagattctttgtccttttcccaacagcccaggctgttgatacctcagagccttctctttactctccaaagtgaaagggaagcccccgtctctctaactgcatgtcatcaggggtgagcctgcctttcctatcttcacacctgccacctcatgttcacacctatctttctcaccttttttttgagatggagtctcgctctcttgcccaggctggagtgcaatggcacgttctcagctcactgcaacctccgcctcttgggttcaagcaattctgctgcatcagcctcccgagtacctgggattacaggcatgtgccaccacgcccggctaattttgtatttttagtagagacggggttttgccatgttggccaggctggtctcgaactcttgacttcagatgatccatctgccttggcctcccacagtgctgggattacaggcgtgagccaccatgcccggcctctttctcacctttacacctgtcttcttatcctcacatctgttttcacaccttcatccctgtcttcctcatgttcacacttgtcttccccatgttcatagctgcctttcttaccattttggtttgaagggcagtcttctctggcttgtttttttgtttttcccagaaaatcagtattattttttaaataagaaaaacattcctagaagatgataattgtgaaaacctcctttggcttatttgcttttccagattttagtctcctttctccccatccgggaaagatggtggaagacataggctaaatttctccagcctcacaatggtcttcacttggtctgacttgtaccaattctagcacccactgaaaaacaagttgagtagagagtgtagagtgcagaaatgtggcttttgccccactttgcatctccaaaattacaacggttggccgatcccatttgaggacaatgcttagttataagtctccgagttggaaaaggaagaaagccagagctgtctagtttcattcattctttcagtaaatatttattgagtacctactgtgtgctaggcattgacctgggaactagagatacttcacagaataacagggaaagttccctgtgctcatggagcttacattctacagggagaaagagatagccaatacataggaataaatatatacaaggtatcatgtagtgataat

SEQ ID NO: 164372 - DNA, 1810 bp, Artificial Sequence
  derived and/or modified sequence
ccttccttcctttcgccgggcgcgatggagccggggcgccggggggccgcggcgctgctagcgctgctgtgcgtggcctgcgcgctgcgcgccgggcgcgcccaatacgaacgctacagcttccgcagcttcccacgggacgagctgatgccgctcgagtcggcctaccggcacgcgctggacaagtacagcggcgagcactgggccgagagcgtgggctacctggagatcagcctgcggctgcaccgcttgctgcgcgacagcgaggccttctgccaccgcaactgcagcgccgcgccgcagcccgagcccgccgccggcctcgccagctatcccgagctgcgcctcttcgggggcctgctgcgccgcgcgcactgcctcaagcgctgcaagcagggcctgccagccttccgccagtcccagcccagccgcgaggtgctggcggacttccagcgccgcgagccctacaagttcctgcagttcgcttacttcaaggcaaataatctccccaaagccatcgccgctgctcacacctttctactgaagcatcctgatgacgaaatgatgaagaggaacatggcatattataagagcctgcctggtgccgaggactacttaaagacctggaaaccaagtcatatgaaagcctgttcatccgagcagtgcgggcatacaacggtgagaactggagaacatccatcacagacatggagctggcccttcccgacttcttcaaagccttttacgagtgtctcgcagcctgcgagggttccagggagatcaaggacttcaaggatttctacctttccatagcagtgaacgacctgaagaatgcagccccctgtgcagtcagctatctgctctttgatcagaatgacaaggtcatgcagcagaacctggtgtattaccagtaccacagggacacttggggcctctcggatgagcacttccagcccagacctgaagcagttcagttctttaatgtgaccacactccagaaggagctgtatgactttgctaaggaaaatataatggatgatgatgagggagaagttgtggaatatgtggatgacctcttggaactggaggagaccagctagcccacagcaaccaaagagacttcctcttggcgttcaggaaacacagattctttgtccttttcccaacagcccaggctgttgatacctcagagccttctctttactctccaaagtgaaagggaagcccccgtctctctaactgcatgtcatcaggggtgagcctgcctttcctatcttcacacctgccacctcatgttcacacctatctttctcaccttttttttgagatggagtctcgctctcttgcccaggctggagtgcaatggcacgttctcagctcactgcaacctccgcctcttgggttcaagcaattctgctgcatcagcctcccgagtacctgggattacaggcatgtgccaccacgcccggctaattttgtatttttagtagagacggggttttgccatgttggccaggctggtctcgaactcttgacttcagatgatccatctgccttggcctcccacagtgctgggattacaggcgtgagccaccatgcccggcctctttctcacctttacacctgtcttcttatcctcacatctgttttcacaccttcatccctgtcttcctcatgttcacacttgtcttccccatgttcatagctgcctttcttaccattttggtttgaagggcagtcttctctggcttgtttttttgtttttcccagaaaatcagtattattttttaaataagaaaaacattcctag

SEQ ID NO: 164373 - DNA, 2010 bp, Artificial Sequence
  derived and/or modified sequence
actgggcccgccgcgtcgcaccgtcctctttcctttccttctccctccccttttcccttccttcgtcccttccttccttcctttcgccgggcgcgatggagccggggcgccggggggccgcggcgctgctagcgctgctgtgcgtggcctgcgcgctgcgcgccgggcgcgcccaatacgaacgctacagcttccgcagcttcccacgggacgagctgatgccgctcgagtcggcctaccggcacgcgctggacaagtacagcggcgagcactgggccgagagcgtgggctacctggagatcagcctgcggctgcaccgcttgctgcgcgacagcgaggccttctgccaccgcaactgcagcgccgcgccgcagcccgagcccgccgccggcctcgccagctatcccgagctgcgcctcttcgggggcctgctgcgccgcgcgcactgcctcaagcgctgcaagcagggcctgccagccttccgccagtcccagcccagccgcgaggtgctggcggacttccagcgccgcgagccctacaagttcctgcagttcgcttacttcaaggcaaataatctccccaaagccatcgccgctgctcacacctttctactgaagcatcctgatgacgaaatgatgaagaggaacatggcatattataagagcctgcctggtgccgaggactacattaaagacctggaaaccaagtcatatgaaagcctgttcatcgagcagtgcgggcatacaacggtgagaactggagaacatccatcacagacatggagctggcccttcccgacttcttcaaagccttttacgagtgtctcgcagcctgcgagggttccagggagatcaaggacttcaaggatttctacctttccatagcagatcattatgtagaagttctggaatgcaaaatacagtgtgaagagaacctcaccccagttataggaggctatccggttgagaaatttgtggctaccatgtatcattacttgcagtttgcctattataagttgaacgacctgaagaatgcagccccctgtgcagtcagctatctgctctttgatcagaatgacaaggtcatgcagcagaacctggtgtattaccagtaccacagggacacttggggcctctcggatgagcacttccagcccagacctgaagcagttcagttctttaatgtgaccacactccagaaggagctgtatgactttgctaaggaaaatataatggatgatgatgagggagaagttgtggaatatgtggatgacctcttggaactggaggagaccagctagcccacagcaaccaaagagacttcctcttggcgttcaggaaacacagattctttgtccttttcccaacagcccaggctgttgatacctcagagccttctctttactctccaaagtgaaagggaagcccccgtctctctaactgcatgtcatcaggggtgagcctgcctttcctatcttcacacctgccacctcatgttcacacctatctttctcaccttttttttgagatggagtctcgctctcttgcccaggctggagtgcaatggcacgttctcagctcactgcaacctccgcctcttgggttcaagcaattctgctgcatcagcctcccgagtacctgggattacaggcatgtgccaccacgcccggctaattttgtatttttagtagagacggggttttgccatgttggccaggctggtctcgaactcttgacttcagatgatccatctgccttggcctcccacagtgctgggattacaggcgtgagccaccatgcccggcctctttctcacctttacacctgtcttcttatcctcacatctgttttcacaccttcatccctgtcttcctcatgttcacacttgtcttccccatgttcatagctgcctttcttaccattttggtttgaagggcagtcttctctggcttgtttttttgtttttcccagaaaatcagtattattttttaaataagaaaaacattcctag

SEQ ID NO: 164374 - DNA, 1922 bp, Artificial Sequence
  derived and/or modified sequence
cttccttcgtcccttccttccttcctttcgccgggcgcgatggagccggggcgccggggggccgcggcgctgctagcgctgctgtgcgtggcctgcgcgctgcgcgccgggcgcgcccaatacgaacgctacagcttccgcagcttcccacgggacgagctgatgccgctcgagtcggcctaccggcacgcgctggacaagtacagcggcgagcactgggccgagagcgtgcgcgacagcgaggccttctgccaccgcaactgcagcgccgcgccgcagcccgagcccgccgccggcctcgccagctatcccgagctgcgcctcttcgggggcctgctgcgccgcgcgcactgcctcaagcgctgcaagcagggcctgccagccttccgccagtcccagcccagccgcgaggtgctggcggacttccagcgccgcgagccctacaagttcctgcagttcgcttacttcaaggcaaataatctccccaaagccatcgccgctgctcacacctttctactgaagcatcctgatgacgaaatgatgaagaggaacatggcatattataagagcctgcctggtgccgaggactacattaaagacctggaaaccaagtcatatgaaagcctgttcatccgagcagtgcgggcatacaacggtgagaactggagaacatccatcacagacatggagctggcccttcccgacttcttcaaagccttttacgagtgtctcgcagcctgcgagggttccagggagatcaaggacttcaaggatttctacctttccatagcagatcattatgtagaagttctggaatgcaaaatacagtgtgaagagaacctcaccccagttataggaggctatccggttgagaaatttgtggctaccatgtatcattacttgcagtttgcctattataagttgaacgacctgaagaatgcagccccctgtgcagtcagctatctgctctttgatcagaatgacaaggtcatgcagcagaacctggtgtattaccagtaccacagggacacttggggcctctcggatgagcacttccagcccagacctgaagcagttcagttctttaatgtgaccacactccagaaggagctgtatgactttgctaaggaaaatataatggatgatgatgagggagaagttgtggaatatgtggatgacctcttggaactggaggagaccagctagcccacagcaaccaaagagacttcctcttggcgttcaggaaacacagattctttgtccttttcccaacagcccaggctgttgatacctcagagccttctctttactctccaaagtgaaagggaagcccccgtctctctaactgcatgtcatcaggggtgagcctgcctttcctatcttcacacctgccacctcatgttcacacctatctttctcaccttttttttgagatggagtctcgctctcttgcccaggctggagtgcaatggcacgttctcagctcactgcaacctccgcctcttgggttcaagcaattctgctgcatcagcctcccgagtacctgggattacaggcatgtgccaccacgcccggctaattttgtatttttagtagagacggggttttgccatgttggccaggctggtctcgaactcttgacttcagatgatccatctgccttggcctcccacagtgctgggattacaggcgtgagccaccatgcccggcctctttctcacctttacacctgtcttcttatcctcacatctgttttcacaccttcatccctgtcttcctcatgttcacacttgtcttccccatgttcatagctgcctttcttaccattttggtttgaagggcagtcttctctggcttgtttttttgtttttcccagaaaatcagtattattttttaaataagaaaaacattcctagaagatg

SEQ ID NO: 164375 - DNA, 1206 bp, Artificial Sequence
  derived and/or modified sequence
atggagcccggcagaagaggcgccgccgccctgctggccctgctgtgcgtggcctgcgccctgagagccggcagagcccagtacgagagatacagcttcagaagcttccccagagacgagctgatgcccctggagagcgcctacagacacgccctggacaagtacagcggcgagcactgggccgagagcgtgggctacctggagatcagcctgagactgcacagactgctgagagacagcgaggccttctgccacagaaactgcagcgccgccccccagcccgagcccgccgccggcctggccagctaccccgagctgagactgttcggcggcctgctgagaagagcccactgcctgaagagatgcaagcagggcctgcccgccttcagacagagccagcccagcagagaggtgctggccgacttccagagaagagagccctacaagttcctgcagttcgcctacttcaaggccaacaacctgcccaaggccatcgccgccgcccacaccttcctgctgaagcaccccgacgacgagatgatgaagagaaacatggcctactacaagagcctgcccggcgccgaggactacatcaaggacctggagaccaagagctacgagagcctgttcatcagagccgtgagagcctacaacggcgagaactggagaaccagcatcaccgacatggagctggccctgcccgacttcttcaaggccttctacgagtgcctggccgcctgcgagggcagcagagagatcaaggacttcaaggacttctacctgagcatcgccgaccactacgtggaggtgctggagtgcaagatccagtgcgaggagaacctgacccccgtgatcggcggctaccccgtggagaagttcgtggccaccatgtaccactacctgcagttcgcctactacaagctgaacgacctgaagaacgccgccccctgcgccgtgagctacctgctgttcgaccagaacgacaaggtgatgcagcagaacctggtgtactaccagtaccacagagacacctggggcctgagcgacgagcacttccagcccagacccgaggccgtgcagttcttcaacgtgaccaccctgcagaaggagctgtacgacttcgccaaggagaacatcatggacgacgacgagggcgaggtggtggagtacgtggacgacctgctggagctggaggagaccagctag

SEQ ID NO: 164376 - DNA, 789 bp, Artificial Sequence
  derived and/or modified sequence
atggagcccggcagaagaggcgccgccgccctgctggccctgctgtgcgtggcctgcgccctgagagccggcagagcccagtacgagagatacagcttcagaagcttccccagagacgagctgatgcccctggagagcgcctacagacacgccctggacaagtacagcggcgagcactgggccgagagcgtgggctacctggagatcagcctgagactgcacagactgctgagagacagcgaggccttctgccacagaaactgcagcgccgccccccagcccgagcccgccgccggcctggccagctaccccgagctgagactgttcggcggcctgctgagaagagcccactgcctgaagagatgcaagcagggcctgcccgccttcagacagagccagcccagcagagaggtgctggccgacttccagagaagagagccctacaagttcctgcagttcgcctacttcaaggccaacaacctgcccaaggccatcgccgccgcccacaccttcctgctgaagcaccccgacgacgagatgatgaagagaaacatggcctactacaagagcctgcccggcgccgaggactacctgaagacctggaagcccagccacatgaaggcctgcagcagcgagcagtgcggccacaccaccgtgagaaccggcgagcaccccagccagacctggagctggcccttccccaccagcagcaagcccttcaccagcgtgagccagcccgccagagtgcccggcagaagcagaaccagcagaatcagcaccttcccctag

SEQ ID NO: 164377 - DNA, 789 bp, Artificial Sequence
  derived and/or modified sequence
atggagcccggcagaagaggcgccgccgccctgctggccctgctgtgcgtggcctgcgccctgagagccggcagagcccagtacgagagatacagcttcagaagcttccccagagacgagctgatgcccctggagagcgcctacagacacgccctggacaagtacagcggcgagcactgggccgagagcgtgggctacctggagatcagcctgagactgcacagactgctgagagacagcgaggccttctgccacagaaactgcagcgccgccccccagcccgagcccgccgccggcctggccagctaccccgagctgagactgttcggcggcctgctgagaagagcccactgcctgaagagatgcaagcagggcctgcccgccttcagacagagccagcccagcagagaggtgctggccgacttccagagaagagagccctacaagttcctgcagttcgcctacttcaaggccaacaacctgcccaaggccatcgccgccgcccacaccttcctgctgaagcaccccgacgacgagatgatgaagagaaacatggcctactacaagagcctgcccggcgccgaggactacatcaaggacctggagaccaagagctacgagagcctgttcatcgagcagtgcggccacaccaccgtgagaaccggcgagcaccccagccagacctggagctggcccttccccaccagcagcaagcccttcaccagcgtgagccagcccgccagagtgcccggcagaagcagaaccagcagaatcagcaccttcccctag

SEQ ID NO: 164378 - DNA, 1167 bp, Artificial Sequence
  derived and/or modified sequence
atggagcccggcagaagaggcgccgccgccctgctggccctgctgtgcgtggcctgcgccctgagagccggcagagcccagtacgagagatacagcttcagaagcttccccagagacgagctgatgcccctggagagcgcctacagacacgccctggacaagtacagcggcgagcactgggccgagagcgtgagagacagcgaggccttctgccacagaaactgcagcgccgccccccagcccgagcccgccgccggcctggccagctaccccgagctgagactgttcggcggcctgctgagaagagcccactgcctgaagagatgcaagcagggcctgcccgccttcagacagagccagcccagcagagaggtgctggccgacttccagagaagagagccctacaagttcctgcagttcgcctacttcaaggccaacaacctgcccaaggccatcgccgccgcccacaccttcctgctgaagcaccccgacgacgagatgatgaagagaaacatggcctactacaagagcctgcccggcgccgaggactacatcaaggacctggagaccaagagctacgagagcctgttcatcagagccgtgagagcctacaacggcgagaactggagaaccagcatcaccgacatggagctggccctgcccgacttcttcaaggccttctacgagtgcctggccgcctgcgagggcagcagagagatcaaggacttcaaggacttctacctgagcatcgccgaccactacgtggaggtgctggagtgcaagatccagtgcgaggagaacctgacccccgtgatcggcggctaccccgtggagaagttcgtggccaccatgtaccactacctgcagttcgcctactacaagctgaacgacctgaagaacgccgccccctgcgccgtgagctacctgctgttcgaccagaacgacaaggtgatgcagcagaacctggtgtactaccagtaccacagagacacctggggcctgagcgacgagcacttccagcccagacccgaggccgtgcagttcttcaacgtgaccaccctgcagaaggagctgtacgacttcgccaaggagaacatcatggacgacgacgagggcgaggtggtggagtacgtggacgacctgctggagctggaggagaccagctag

SEQ ID NO: 164379 - protein, 623 aa, Artificial Sequence
  derived and/or modified sequence
MATEHVNGNGTEEPMDTTSAVIHSENFQTLLDAGLPQKVAEKLDEIYVAGLVAHSDLDERAIEALKEFNEDGALAVLQQFKDSDLSHVQNKSAFLCGVMKTYRQREKQGTKVADSSKGPDEAKIKALLERTGYTLDVTTGQRKYGGPPPDSVYSGQQPSVGTEIFVGKIPRDLFEDELVPLFEKAGPIWDLRLMMDPLTGLNRGYAFVTFCTKEAAQEAVKLYNNHEIRSGKHIGVCISVANNRLFVGSIPKSKTKEQILEEFSKVTEGLTDVILYHQPDDKKKNRGFCFLEYEDHKTAAQARRRLMSGKVKVWGNVGTVEWADPIEDPDPEVMAKVKVLFVRNLANTVTEEILEKAFSQFGKLERVKKLKDYAFIHFDERDGAVKAMEEMNGKDLEGENIEIVFAKPPDQKRKERKAQRQAAKNQMYDDYYYYGPPHMPPPTRGRGRGGRGGYGYPPDYYGYEDYYDYYGYDYHNYRGGYEDPYYGYEDFQVGARGRGGRGARGAAPSRGRGAAPPRGRAGYSQRGGPGSARGVRGARGGAQQQRGRGVRGARGGRGGNVGGKRKADGYNQPDSKRRQTNNQNWGSQPIAQQPLQGGDHSGNYGYKSENQEFYQDTFGQQWK

SEQ ID NO: 164380 - protein, 185 aa, Artificial Sequence
  derived and/or modified sequence
MATEHVNGNGTEEPMDTTSAVIHSENFQTLLDAGLPQKVAEKLDEIYVAGLVAHSDLDERAIEALKEFNEDGALAVLQQFKDSDLSHVQNKSAFLCGVMKTYRQREKQGTKVADSSKGPDEAKIKALLERTGYTLDVTTGQRKYGGPPPDSVYSGQQPSVGTEIFVGKIPRDLFEDELVPLFEKA

SEQ ID NO: 164381 - protein, 242 aa, Artificial Sequence
  derived and/or modified sequence
MSDEREVAEAATGEDASSPPPKTEAASDPQHPAASEGAAAAAASPPLLRCLVLTGFGGYDKVKLQSRPAAPPAPGPGQLTLRLRACGLNFADLMARQGLYDRLPPLPVTPGMEGAGVVIAVGEGVSDRKAGDRVMVLNRSGMWQEEVTVPSVQTFLIPEAMTFEEAAALLVNYITAYMVLFDFGNLQPGHSVLVHMAAGGVGMAAVQLPYSGECDSVRNGLGQQARGTEGEWGHTSHRLSHD

SEQ ID NO: 164382 - protein, 393 aa, Artificial Sequence
  derived and/or modified sequence
MSDEREVAEAATGEDASSPPPKTEAASDPQHPAASEGAAAAAASPPLLRCLVLTGFGGYDKVKLQSRPAAPPAPGPGQLTLRLRACGLNFADLMARQGLYDRLPPLPVTPGMEGAGVVIAVGEGVSDRKAGDRVMVLNRSGMWQEEVTVPSVQTFLIPEAMTFEEAAALLVNYITAYMVLFDFGNLQPGHSVLVHMAAGGVGMAAVQLCRTVENVTVFGTASASKHEALKENGVTHPIDYHTTDYVDEIKKISPKGVDIVMDPLGGSDTAKGYNLLKPMGKVVTYGMANLLTGPKRNLMALARTWWNQFSVTALQLLQANRAVCGFHLGYLDGEVELVSGVVARLLALYNQGHIKPHIDSVWPFEKVADAMKQMQEKKNVGKVLLVPGPEKEN

SEQ ID NO: 164383 - protein, 259 aa, Artificial Sequence
  derived and/or modified sequence
MVLNRSGMWQEEVTVPSVQTFLIPEAMTFEEAAALLVNYITAYMVLFDFGNLQPGHSVLVHMAAGGVGMAAVQLCRTVENVTVFGTASASKHEALKENGVTHPIDYHTTDYVDEIKKISPKGVDIVMDPLGGSDTAKGYNLLKPMGKVVTYGMANLLTGPKRNLMALARTWWNQFSVTALQLLQANRAVCGFHLGYLDGEVELVSGVVARLLALYNQGHIKPHIDSVWPFEKVADAMKQMQEKKNVGKVLLVPGPEKEN

SEQ ID NO: 164384 - protein, 300 aa, Artificial Sequence
  derived and/or modified sequence
MARQGLYDRLPPLPVTPGMEGAGVVIAVGEGVSDRKAGDRVMVLNRSGMWQEEVTVPSVQTFLIPEAMTFEEAAALLVNYITAYMVLFDFGNLQPGHSVLVHMAAGGVGMAAVQLCRTVENVTVFGTASASKHEALKENGVTHPIDYHTTDYVDEIKKISPKGVDIVMDPLGGSDTAKGYNLLKPMGKVVTYGMANLLTGPKRNLMALARTWWNQFSVTALQLLQANRAVCGFHLGYLDGEVELVSGVVARLLALYNQGHIKPHIDSVWPFEKVADAMKQMQEKKNVGKVLLVPGPEKEN

SEQ ID NO: 164385 - DNA, 252 bp, Artificial Sequence
  derived and/or modified sequence
atggccgccgccaccgccagcccccggagcctgctggtgctgctgcaagtcgtcgtgctggcgctggcccagattcgcgggccccccggggagaggggccctccgggaccgccaggacccccgggggtccccggcagcgatggtatcgatggtccacccggacctgtgggcttgcctggggagatcggcattcgggggcctaagggggaccccggcccagacgggccttccgggcccccaggcccaccatag

SEQ ID NO: 164386 - DNA, 729 bp, Artificial Sequence
  derived and/or modified sequence
atgagcgacgagagagaggtggccgaggccgccaccggcgaggacgccagcagccccccccccaagaccgaggccgccagcgacccccagcaccccgccgccagcgagggcgccgccgccgccgccgccagcccccccctgctgagatgcctggtgctgaccggcttcggcggctacgacaaggtgaagctgcagagcagacccgccgccccccccgcccccggccccggccagctgaccctgagactgagagcctgcggcctgaacttcgccgacctgatggccagacagggcctgtacgacagactgccccccctgcccgtgacccccggcatggagggcgccggcgtggtgatcgccgtgggcgagggcgtgagcgacagaaaggccggcgacagagtgatggtgctgaacagaagcggcatgtggcaggaggaggtgaccgtgcccagcgtgcagaccttcctgatccccgaggccatgaccttcgaggaggccgccgccctgctggtgaactacatcaccgcctacatggtgctgttcgacttcggcaacctgcagcccggccacagcgtgctggtgcacatggccgccggcggcgtgggcatggccgccgtgcagctgccctacagcggcgagtgcgacagcgtgagaaacggcctgggccagcaggccagaggcaccgagggcgagtggggccacaccagccacagactgagccacgactag

SEQ ID NO: 164387 - DNA, 1182 bp, Artificial Sequence
  derived and/or modified sequence
atgagcgacgagagagaggtggccgaggccgccaccggcgaggacgccagcagccccccccccaagaccgaggccgccagcgacccccagcaccccgccgccagcgagggcgccgccgccgccgccgccagcccccccctgctgagatgcctggtgctgaccggcttcggcggctacgacaaggtgaagctgcagagcagacccgccgccccccccgcccccggccccggccagctgaccctgagactgagagcctgcggcctgaacttcgccgacctgatggccagacagggcctgtacgacagactgccccccctgcccgtgacccccggcatggagggcgccggcgtggtgatcgccgtgggcgagggcgtgagcgacagaaaggccggcgacagagtgatggtgctgaacagaagcggcatgtggcaggaggaggtgaccgtgcccagcgtgcagaccttcctgatccccgaggccatgaccttcgaggaggccgccgccctgctggtgaactacatcaccgcctacatggtgctgttcgacttcggcaacctgcagcccggccacagcgtgctggtgcacatggccgccggcggcgtgggcatggccgccgtgcagctgtgcagaaccgtggagaacgtgaccgtgttcggcaccgccagcgccagcaagcacgaggccctgaaggagaacggcgtgacccaccccatcgactaccacaccaccgactacgtggacgagatcaagaagatcagccccaagggcgtggacatcgtgatggaccccctgggcggcagcgacaccgccaagggctacaacctgctgaagcccatgggcaaggtggtgacctacggcatggccaacctgctgaccggccccaagagaaacctgatggccctggccagaacctggtggaaccagttcagcgtgaccgccctgcagctgctgcaggccaacagagccgtgtgcggcttccacctgggctacctggacggcgaggtggagctggtgagcggcgtggtggccagactgctggccctgtacaaccagggccacatcaagccccacatcgacagcgtgtggcccttcgagaaggtggccgacgccatgaagcagatgcaggagaagaagaacgtgggcaaggtgctgctggtgcccggccccgagaaggagaactag

SEQ ID NO: 164388 - DNA, 780 bp, Artificial Sequence
  derived and/or modified sequence
atggtgctgaacagaagcggcatgtggcaggaggaggtgaccgtgcccagcgtgcagaccttcctgatccccgaggccatgaccttcgaggaggccgccgccctgctggtgaactacatcaccgcctacatggtgctgttcgacttcggcaacctgcagcccggccacagcgtgctggtgcacatggccgccggcggcgtgggcatggccgccgtgcagctgtgcagaaccgtggagaacgtgaccgtgttcggcaccgccagcgccagcaagcacgaggccctgaaggagaacggcgtgacccaccccatcgactaccacaccaccgactacgtggacgagatcaagaagatcagccccaagggcgtggacatcgtgatggaccccctgggcggcagcgacaccgccaagggctacaacctgctgaagcccatgggcaaggtggtgacctacggcatggccaacctgctgaccggccccaagagaaacctgatggccctggccagaacctggtggaaccagttcagcgtgaccgccctgcagctgctgcaggccaacagagccgtgtgcggcttccacctgggctacctggacggcgaggtggagctggtgagcggcgtggtggccagactgctggccctgtacaaccagggccacatcaagccccacatcgacagcgtgtggcccttcgagaaggtggccgacgccatgaagcagatgcaggagaagaagaacgtgggcaaggtgctgctggtgcccggccccgagaaggagaactag

SEQ ID NO: 164389 - DNA, 903 bp, Artificial Sequence
  derived and/or modified sequence
atggccagacagggcctgtacgacagactgccccccctgcccgtgacccccggcatggagggcgccggcgtggtgatcgccgtgggcgagggcgtgagcgacagaaaggccggcgacagagtgatggtgctgaacagaagcggcatgtggcaggaggaggtgaccgtgcccagcgtgcagaccttcctgatccccgaggccatgaccttcgaggaggccgccgccctgctggtgaactacatcaccgcctacatggtgctgttcgacttcggcaacctgcagcccggccacagcgtgctggtgcacatggccgccggcggcgtgggcatggccgccgtgcagctgtgcagaaccgtggagaacgtgaccgtgttcggcaccgccagcgccagcaagcacgaggccctgaaggagaacggcgtgacccaccccatcgactaccacaccaccgactacgtggacgagatcaagaagatcagccccaagggcgtggacatcgtgatggaccccctgggcggcagcgacaccgccaagggctacaacctgctgaagcccatgggcaaggtggtgacctacggcatggccaacctgctgaccggccccaagagaaacctgatggccctggccagaacctggtggaaccagttcagcgtgaccgccctgcagctgctgcaggccaacagagccgtgtgcggcttccacctgggctacctggacggcgaggtggagctggtgagcggcgtggtggccagactgctggccctgtacaaccagggccacatcaagccccacatcgacagcgtgtggcccttcgagaaggtggccgacgccatgaagcagatgcaggagaagaagaacgtgggcaaggtgctgctggtgcccggccccgagaaggagaactag

SEQ ID NO: 164390 - DNA, 729 bp, Artificial Sequence
  derived and/or modified sequence
atgtcagatgagagagaggttgcggaggctgcaacaggcgaagacgctagcagcccgccacccaaaaccgaggccgcctcagatccccaacatccggctgcttccgagggtgcagccgccgccgcagcatcgccacctctgttgcgatgtcttgttctcacgggctttggtggctacgacaaagtcaagctgcagagccgccccgctgccccgccagcaccaggcccagggcagctgaccttacggttacgcgcttgcggcctgaacttcgccgatctgatggctagacagggactctacgaccgcctgccaccactcccagtgacgccaggtatggaaggcgccggtgtcgtaattgcagtgggagaaggggtcagcgatcggaaggccggtgatcgggttatggtactgaaccgatcaggcatgtggcaggaggaggtgacagtcccgtctgtgcaaacattcctgattcccgaagccatgactttcgaagaagctgccgccctcctggttaattacatcactgcttacatggtattgtttgactttggaaatctgcagccaggccacagtgtgctggtgcatatggctgcaggcggggttggaatggccgcagtgcagctgccgtacagtggagagtgcgacagtgtgaggaatggattaggtcaacaggcacggggcaccgagggagagtggggtcacacctcccacaggttgtcacacgattag

SEQ ID NO: 164391 - DNA, 1182 bp, Artificial Sequence
  derived and/or modified sequence
atgtctgatgagagagaggtcgcagaagcagccaccggcgaggacgcctcaagccccccacctaaaaccgaggccgcgagcgacccacagcatcccgcggcctccgagggcgccgccgcagccgccgccagccccccactactccggtgcttggtgctgacggggttcggaggctatgataaagtcaagttacagtcgagaccggcggccccacccgctcctggacctggacaactgaccctccgtctacgtgcttgcggtcttaatttcgccgacctcatggcgcgccaaggtttgtatgacagactgccacctctgcctgtgacacccggcatggaaggagccggagttgtcatagctgtcggcgagggggtgtcggaccgaaaggccggcgatcgcgtgatggtacttaatcgatcaggtatgtggcaggaggaagtgaccgtgccatctgtacagacattcctgattccggaggcaatgacattcgaggaagcggcagcacttctcgttaattacattaccgcttacatggtgctctttgatttcggcaacttgcagcctggccacagtgtgctcgtgcacatggcagctgggggcgtgggcatggcagctgttcaattgtgtcggactgttgagaacgtaaccgtgtttggcacggcctccgcttctaaacacgaggccctcaaggaaaacggcgtgacgcatcccattgattatcatactaccgattacgtagacgagatcaagaagatctcacccaagggcgtggacatcgtgatggatccgcttggggggtccgatacagccaaggggtataatctgctgaaaccaatggggaaggtcgtgacctatgggatggccaacctgttaaccggccccaaacgcaacttgatggcccttgctaggacatggtggaaccagttcagcgtcacggccctccaactattacaagcaaacagagcagtgtgtggcttccatttggggtacctggacggtgaagtggaattagtttcaggcgttgttgcaaggctgctagccctttacaatcaaggacacatcaagccccatatcgatagcgtgtggcccttcgaaaaggttgctgatgctatgaaacagatgcaggagaaaaagaatgtcggaaaggttctactggtccccggaccagagaaggagaattag

SEQ ID NO: 164392 - DNA, 780 bp, Artificial Sequence
  derived and/or modified sequence
atggttctcaatagatccgggatgtggcaggaggaagtcacggtaccttctgttcagactttccttatccccgaagccatgacgttcgaggaggctgccgctttactcgtaaattatatcacagcctacatggtcctattcgattttggtaatctccagcccggtcactctgtccttgtgcacatggctgcgggcggagtggggatggccgccgtgcaactctgtcggacggtggagaatgtgacagtatttgggactgccagtgcctcgaaacatgaggccttgaaggagaatggcgtgactcatccgattgactatcacactaccgactatgtagacgaaattaaaaagatctcacccaagggagtggatatcgtgatggatcccctcggtgggtcagatacagcaaaaggatataacctattaaaaccgatgggcaaagtcgtcacttacggaatggcaaatctcctgaccggcccaaaaaggaatctgatggctctggcgcggacgtggtggaaccaattttctgtcacagccctccagttgctgcaggcgaatagagccgtgtgcggattccacctgggttatctagacggggaggtggagctggtctctggagtggtcgccaggctgttagctctgtataaccagggccacataaaacctcacatagattctgtgtggcccttcgagaaagtcgcggatgctatgaagcaaatgcaggagaagaaaaacgtggggaaagtcctcctggtcccaggtccggagaaggagaattag

SEQ ID NO: 164393 - DNA, 903 bp, Artificial Sequence
  derived and/or modified sequence
atggcccgacaggggctttacgatcggttaccaccgctcccggtgacacccgggatggaaggcgctggagtcgtaatcgcggtgggggagggggtctccgatagaaaagccggggacagagtgatggtcctgaatcggtccggcatgtggcaggaggaggtgactgtgcccagcgtccagacattccttatcccagaagccatgacattcgaagaagcggctgccctgttggtcaactatataacagcttatatggttctgttcgattttggtaatctacagcctggacactctgtgcttgtgcacatggcggctggcggcgtcgggatggccgcagtgcagctctgcaggaccgtggagaacgtgaccgtttttggtaccgcgtctgcatcaaagcacgaagccttgaaggaaaacggagtgacccaccctattgattatcacactactgattatgttgacgagataaaaaagatctctcctaagggcgtggatattgtgatggatccgctgggagggtctgataccgcaaaagggtacaatttactgaaacctatgggcaaggtcgttacatatggcatggctaacttgttgacaggtcccaaacggaatctgatggccttagctaggacttggtggaatcagttctcggttacggctctccagttgctccaggccaatagagccgtgtgcggctttcatcttggatacctggatggcgaggtcgagctcgtgtccggggtggtggccaggctgctcgcattgtataatcaggggcatatcaagccccacattgattccgtctggccattcgaaaaggtggcagatgccatgaagcagatgcaggaaaaaaagaatgttgggaaggttctcctggtgcctggacccgagaaggagaactag

SEQ ID NO: 164394 - DNA, 729 bp, Artificial Sequence
  derived and/or modified sequence
atgtctgatgagcgggaggtggccgaggccgccaccggggaggatgccagcagccccccacccaagacagaagctgccagtgacccccagcaccctgctgccagcgagggcgctgctgctgctgctgccagcccccccctgctgcgctgcctggtgctgaccggctttggaggctatgacaaggtgaagctgcagagcaggcctgctgcccccccagcccctggccctggccagctgaccctgcggctgcgggcctgtggcctgaactttgctgacctgatggcccggcagggcctgtatgaccggctgccccccctgcctgtgaccccaggcatggagggcgccggcgtggtgattgctgtgggggagggcgtgtctgacaggaaggccggggacagagtgatggtgctgaacagaagtggcatgtggcaggaggaggtgacagtgcccagcgtgcagaccttcctgatccctgaggccatgacctttgaggaggccgccgccctgctggtgaactacatcacagcctacatggtgctgtttgattttggaaacctgcagcccggccacagcgtgctggtgcacatggccgccggcggcgtgggcatggctgctgtgcagctgccctacagcggagaatgtgacagcgtgagaaatggcctgggccagcaggcccggggcacagaaggagagtggggccacaccagccaccggctgagccatgactag

SEQ ID NO: 164395 - DNA, 1182 bp, Artificial Sequence
  derived and/or modified sequence
atgtctgatgagcgggaggtggccgaggccgccaccggggaggatgccagcagccccccacccaagacagaagctgccagtgacccccagcaccctgctgccagcgagggcgctgctgctgctgctgccagcccccccctgctgcgctgcctggtgctgaccggctttggaggctatgacaaggtgaagctgcagagcaggcctgctgcccccccagcccctggccctggccagctgaccctgcggctgcgggcctgtggcctgaactttgctgacctgatggcccggcagggcctgtatgaccggctgccccccctgcctgtgaccccaggcatggagggcgccggcgtggtgattgctgtgggggagggcgtgtctgacaggaaggccggggacagagtgatggtgctgaacagaagtggcatgtggcaggaggaggtgacagtgcccagcgtgcagaccttcctgatccctgaggccatgacctttgaggaggccgccgccctgctggtgaactacatcacagcctacatggtgctgtttgattttggaaacctgcagcccggccacagcgtgctggtgcacatggccgccggcggcgtgggcatggctgctgtgcagctgtgcaggacagtggagaatgtgacagtgtttggaacagccagcgccagcaagcatgaggccctgaaggaaaatggagtgacccaccccatcgactaccacaccacagattatgtggatgagatcaagaagatcagccccaagggcgtggacatcgtgatggaccccctgggcggcagtgacacagccaagggctacaacctgctgaagcccatgggcaaggtggtgacctacggcatggccaacctgctgaccggccccaagaggaacctgatggccctggcccggacctggtggaaccagttctctgtgacagccctgcagctgctgcaggccaacagagctgtgtgtggcttccacctgggctacctggatggagaggtggagctggtgtctggagtggtggcccggctgctggccctgtacaaccagggccacatcaagccccacatcgacagcgtgtggccctttgagaaggtggctgatgccatgaagcagatgcaggagaagaagaatgtgggcaaggtgctgctggtgcccggccctgagaaggagaactag

SEQ ID NO: 164396 - DNA, 780 bp, Artificial Sequence
  derived and/or modified sequence
atggtgctgaacagaagtggcatgtggcaggaggaggtgacagtgcccagcgtgcagaccttcctgatccctgaggccatgacctttgaggaggccgccgccctgctggtgaactacatcacagcctacatggtgctgtttgattttggaaacctgcagcccggccacagcgtgctggtgcacatggccgccggcggcgtgggcatggctgctgtgcagctgtgcaggacagtggagaatgtgacagtgtttggaacagccagcgccagcaagcatgaggccctgaaggaaaatggagtgacccaccccatcgactaccacaccacagattatgtggatgagatcaagaagatcagccccaagggcgtggacatcgtgatggaccccctgggcggcagtgacacagccaagggctacaacctgctgaagcccatgggcaaggtggtgacctacggcatggccaacctgctgaccggccccaagaggaacctgatggccctggcccggacctggtggaaccagttctctgtgacagccctgcagctgctgcaggccaacagagctgtgtgtggcttccacctgggctacctggatggagaggtggagctggtgtctggagtggtggcccggctgctggccctgtacaaccagggccacatcaagccccacatcgacagcgtgtggccctttgagaaggtggctgatgccatgaagcagatgcaggagaagaagaatgtgggcaaggtgctgctggtgcccggccctgagaaggagaactag

SEQ ID NO: 164397 - DNA, 903 bp, Artificial Sequence
  derived and/or modified sequence
atggcccggcagggcctgtatgaccggctgccccccctgcctgtgaccccaggcatggagggcgctggggtggtgattgctgtgggggagggcgtgtctgacaggaaggccggggacagagtgatggtgctgaacagaagtggcatgtggcaggaggaggtgacagtgcccagcgtgcagaccttcctgatccctgaggccatgacctttgaggaggccgccgccctgctggtgaactacatcacagcctacatggtgctgtttgattttggaaacctgcagcccggccacagcgtgctggtgcacatggctgctggaggagtgggcatggctgctgtgcagctgtgcaggacagtggagaatgtgacagtgtttggaacagccagcgccagcaagcatgaggccctgaaggaaaatggagtgacccaccccatcgactaccacaccacagattatgtggatgagatcaagaagatcagccccaagggcgtggacatcgtgatggaccccctgggcggcagtgacacagccaagggctacaacctgctgaagcccatgggcaaggtggtgacctacggcatggccaacctgctgaccggccccaagaggaacctgatggccctggcccggacctggtggaaccagttctctgtgacagccctgcagctgctgcaggccaacagagctgtgtgtggcttccacctgggctacctggatggagaggtggagctggtgtctggagtggtggcccggctgctggccctgtacaaccagggccacatcaagccccacattgattctgtgtggccctttgagaaggtggctgatgccatgaagcagatgcaggagaagaagaatgtgggcaaggtgctgctggtgcccggccctgagaaggaaaattag

SEQ ID NO: 164398 - DNA, 729 bp, Artificial Sequence
  derived and/or modified sequence
atgagcgacgagcgggaggtggccgaggccgccaccggcgaggacgcgtcatctccaccccccaagacagaggccgcgtctgatccacagcaccctgccgctagcgagggggctgctgctgccgccgcgagcccccccctgttacgttgtttggttctgaccgggtttggcggatacgacaaagtgaagctgcagagccggcctgctgcccctccggcccctggtcctgggcaactgacattgcgtctgcgggcttgtgggctgaattttgccgatctgatggccagacaggggctgtacgaccgcctgcctcccttgcctgtgactcctggcatggagggcgcgggcgtcgttatcgccgttggcgaaggagtaagtgacagaaaggcaggggatcgagtgatggttttgaacaggtcaggcatgtggcaggaggaagtaacagtcccgagtgtgcagaccttccttattcctgaggccatgactttcgaagaggcagctgctcttttggttaattatataaccgcttacatggtgctgttcgattttggtaatctgcagccaggccattctgtgctggtgcatatggcagccggaggagtggggatggcagctgtgcagttgccttattccggcgagtgcgactccgtaaggaacgggctgggccagcaggccaggggtacagagggcgagtggggacatacctcacatagattatctcacgattag

SEQ ID NO: 164399 - DNA, 1182 bp, Artificial Sequence
  derived and/or modified sequence
atgagcgacgagcgggaggtggccgaggccgccaccggcgaggacgccagtagcccccctcctaaaacagaagccgcctcagacccccagcacccggctgcctccgaaggagcagccgccgctgcagcatctcctccactcctgagatgcctggtactgacagggttcggaggttacgacaaagtcaagctgcaatccaggccagctgccccccccgctccgggaccaggccagttgactttgagactccgggcatgtggccttaatttcgccgacctgatggcccggcagggtctctatgatagactccccccattaccggtgactcccgggatggagggcgcaggagtggtcatcgcagtgggagagggggtaagcgaccggaaggccggtgacagagtgatggtgctcaacagatccgggatgtggcaggaagaagtgactgtgccgtccgtccagacatttctaattccagaggccatgacgttcgaggaagctgctgcgctcctggtgaattatattacagcctacatggtgttattcgactttggaaacctgcagccaggacactccgtgctcgtccacatggccgctggcggcgtgggcatggcggctgtgcaattgtgtcggactgtggagaatgtcactgtcttcggcaccgcgtcggcctcaaaacacgaggctttaaaggaaaatggcgtcacccaccctatcgattatcacacaacggattacgtcgatgagatcaaaaagatcagtcccaagggcgtagacatcgttatggatccactgggcggtagtgataccgccaaagggtataacctgctgaagccaatgggaaaagtggtgacctacggaatggcgaatctactcactgggccgaagcgaaaccttatggcactcgcacgaacatggtggaaccagttttccgtaactgcactgcagctcttacaagcaaatagagcagtgtgtggatttcacctgggctacctggacggcgaagtggagctcgtgtctggggtggtcgcaaggctgctggctctgtataaccagggacatattaaaccccacatcgatagcgtttggcctttcgagaaggttgctgatgccatgaagcagatgcaagaaaaaaagaacgttgggaaggtgctgctagtgccaggcccagaaaaggagaattag

SEQ ID NO: 164400 - DNA, 780 bp, Artificial Sequence
  derived and/or modified sequence
atggtgctgaaccggagcggcatgtggcaggaggaggtgaccgtgccatccgtgcagactttcctcatacccgaggctatgactttcgaggaagcagcggccctccttgtcaactacattacagcgtatatggtgctctttgactttggcaacctgcaacctggccattcagtcctcgtgcatatggctgccggaggagtgggaatggctgccgtgcaactttgtagaacagtggagaacgttaccgtttttggaaccgccagtgcctcgaagcacgaagcacttaaagagaatggcgtgactcaccccatcgactaccatactacagattacgtggatgagatcaagaagatctcacctaagggggtggacattgtcatggacccactgggcggctcagatactgccaaaggctacaatctgttaaaacccatgggaaaggtggtcacatacggaatggctaatttactgacgggacctaagcggaacctcatggctctggccaggacctggtggaatcagttctccgtcaccgcattacaactgctgcaggctaatcgggccgtctgcggctttcaccttgggtacttggacggtgaagtagagttggtcagcggcgtcgtcgctcgattgcttgcattgtataatcagggccatataaagcctcatattgattctgtgtggccttttgagaaagtcgccgacgccatgaagcagatgcaggaaaagaagaacgtggggaaagtcctgttggttcctggacctgaaaaagaaaactag

SEQ ID NO: 164401 - DNA, 903 bp, Artificial Sequence
  derived and/or modified sequence
atggcccggcagggcctgtacgaccggctgccccccctgcccgtgacccctgggatggagggtgctggcgtggtgatcgccgtgggagaaggtgtttcagaccggaaagccggagatagggtgatggttctcaatagatccggaatgtggcaggaggaggtaactgtccctagcgtacagacctttctgatcccagaggctatgacatttgaagaggccgcagctttgttggtgaactacattacagcatacatggtgttgttcgactttggaaatctacagcccgggcacagtgtgctagtccatatggccgcaggaggggttggaatggctgcggtgcagttatgcaggaccgttgagaacgtgacggtgttcgggaccgcttcagcttccaaacacgaggcactgaaggagaatggggtgactcaccccatcgactaccatacgaccgactatgttgacgagatcaagaaaatttcgcccaaaggtgtggacatcgtgatggatccactcggggggtctgacacagcaaaagggtacaacctcctaaaacccatgggcaaagttgtcacgtatgggatggccaatctcctaactggccccaaaagaaacctgatggctctggcccgaacttggtggaatcagttttccgtgactgccttgcagctgctacaggccaaccgcgccgtatgcggttttcacctaggatatctggatggggaggtcgaactcgtttctggggttgtggctcgtcttctggccttgtacaaccaggggcatataaagcctcacatcgatagtgtctggccctttgagaaagttgctgatgcgatgaaacagatgcaagaaaaaaagaacgtggggaaagtgctgctggttcccgggcccgagaaagaaaattag

SEQ ID NO: 164402 - DNA, 729 bp, Artificial Sequence
  derived and/or modified sequence
atgtctgatgagagggaggtggctgaggctgccacaggagaggacgcctctagtcccccacctaaaaccgaggccgcttctgatcctcagcatccagccgctagcgagggcgctgctgctgcagcagccagcccacctcttctgaggtgcctcgtgctgaccgggtttggaggttatgacaaggtaaagctgcaaagtcgtccagccgcacctccagccccagggccaggccaattgacactgagacttagagcatgcggcctaaattttgccgatttaatggctcgccagggcttgtacgatcgtttacctccgctaccggtgacgcccggaatggagggtgcgggagtggtcatagcggtaggcgaaggggtgtccgacagaaaagctggcgaccgcgtgatggtgctcaacagatctggcatgtggcaggaggaggttaccgtgcccagtgtacagaccttcctgatcccggaggcaatgacgttcgaggaagccgcagctttgcttgtgaattacatcacagcttatatggtactattcgatttcggcaatctccagccaggccactccgtcctcgtgcatatggcagctggcggtgtgggaatggctgcagttcaactaccttattccggcgagtgcgattctgtgcgaaacggcttaggtcagcaagctaggggtactgagggcgaatggggacatactagtcatcgcctatctcacgactag

SEQ ID NO: 164403 - DNA, 1182 bp, Artificial Sequence
  derived and/or modified sequence
atgagtgatgaacgggaagtcgcagaagctgcaacaggcgaagatgccagttcgccccctcccaagacagaagccgcatccgaccctcagcaccctgcggcatccgagggggctgctgctgctgccgcatccccgccactgctccgctgcctggtactgacagggtttggcggttacgacaaggtgaagctgcaaagccgacccgcagctccacctgcccctggtccaggacagctgacactgcgcttgcgagcttgcggcttgaacttcgccgacctaatggccaggcagggactctacgaccgcctacctccccttcctgtgacccccggtatggaaggtgctggggtggtaatcgccgtgggcgaaggggtatccgacaggaaggcaggagaccgagtgatggtcctgaaccgaagcggaatgtggcaggaggaggtcactgtccccagcgtgcaaaccttcctgatccctgaggccatgacttttgaagaagccgctgccctgctcgttaactacattacagcttatatggttttatttgatttcggaaatctgcagccgggacactctgtcttagtacacatggcagccggaggcgtcggaatggcagccgtgcagctttgccgaactgtggagaacgtaaccgtctttggtactgcaagcgcctcgaagcacgaagcactcaaagaaaatggagtaacccaccccattgattatcatactacagactacgtagacgagatcaagaaaatctcccccaagggagtagatatagttatggatccattaggtggcagcgatactgctaagggctataacttacttaaaccaatgggtaaggtggttacctatggtatggcgaatcttcttacgggacctaaaagaaatctgatggcactagccagaacttggtggaaccagttcagcgtgaccgcattgcagctcctacaagcgaaccgagctgtgtgtgggttccacttgggctacttagacggcgaagtcgagttggtgtccggggtggtcgctcgcctgttagctctgtacaatcagggccatattaagccgcatattgattccgtatggccattcgagaaggttgctgatgccatgaaacagatgcaggaaaagaagaatgtagggaaagtcctgctggtgccaggcccagaaaaagagaattag

SEQ ID NO: 164404 - DNA, 780 bp, Artificial Sequence
  derived and/or modified sequence
atggtgttaaatagaagcggaatgtggcaggaagaggttactgtcccaagtgtgcagactttcctgatcccagaagcaatgacgttcgaggaagctgcggcacttttggtgaactacattacagcctacatggttctgttcgacttcggtaatctacagccaggccattccgtactggtgcatatggctgccggaggtgtggggatggccgctgtccagctgtgtcgcacagttgaaaatgtgaccgtcttcggtactgcatccgcttcgaaacacgaagctctgaaagaaaatggcgtcacccaccctatcgattatcatactactgattacgtggatgagattaagaagataagtccgaaaggcgtagacatcgtcatggaccccctgggcggttctgatacagccaagggctacaacctgttaaagccaatgggaaaagtagtcacctatggtatggcaaatctgcttacaggccctaaacggaacttaatggctcttgcaagaacatggtggaatcagttcagcgtcaccgcactgcagttattgcaggctaatagggcggtttgtggattccacctgggttatctagatggagaggtggagcttgtctccggagtagtcgctcgactcctggctctctataaccagggacatattaagccgcatatcgacagcgtgtggccctttgagaaagttgcggacgcaatgaaacaaatgcaagagaagaaaaatgtcgggaaggtactcctggttccaggacctgagaaagagaactag

SEQ ID NO: 164405 - DNA, 903 bp, Artificial Sequence
  derived and/or modified sequence
atggctagacaaggactttacgacagactgcctcccctgcctgtgactccaggaatggaaggggcaggcgtggttatagccgtcggggagggtgtgagcgaccggaaagcgggagacagagtgatggtcctgaacaggagcggcatgtggcaggaggaggtcaccgtgccatccgtgcagacttttctgataccagaagcaatgaccttcgaagaggccgcagccctccttgtcaattatatcaccgcctacatggtactcttcgacttcgggaatctccagcctggtcacagcgtcctggtgcatatggcagcaggcggagttggtatggcagccgtccagctgtgcagaacagtggaaaacgtcacagtgtttgggaccgcttccgcatccaagcacgaagccttgaaggagaatggcgttacacacccaatcgattaccacaccaccgactatgtagacgaaattaagaaaatcagtcctaaaggggtggacatcgtcatggatcctctgggcggatccgatacagccaaggggtacaacctattgaaaccgatggggaaggttgtaacatacggcatggccaaccttttaaccggcccaaaacggaaccttatggcattggccaggacctggtggaaccagttttccgtgacggctttacaattgctgcaagccaacagggctgtgtgcgggttccacctcggttacttggacggcgaagtagagttggtgagcggcgtggttgctcgcctcctcgctctctacaatcagggccatattaaacctcatatcgatagcgtctggccctttgagaaggtggcagacgccatgaaacagatgcaggagaaaaagaacgtcggaaaagtgctgctggtcccgggaccggagaaggaaaactag

SEQ ID NO: 164406 - DNA, 787 bp, Artificial Sequence
  derived and/or modified sequence
gccttccccagctgtgcactctccatccagctgtgcgctctcgtcgggagtcccagccatgtccgacgagagagaggtagccgaggcagcgaccggggaagacgcctcttcgccgcctccgaaaaccgaggcagcgagcgacccccagcatcccgcggcctccgaaggggccgccgccgccgccgcctcgccgccactgctgcgctgcctagtgctcaccggctttggaggctacgacaaggtgaagctgcagagccggccggcagcgcccccggcccctgggcccggccagctgacgctgcgtctgcgggcctgcgggctcaacttcgcagacctcatggctaggcaggggctgtacgaccgtctcccgcctctgcctgtcactccgggcatggagggcgcgggtgttgtgatcgcagtgggcgagggagtcagcgaccgcaaggcaggagaccgggtgatggtgttgaaccggtcagggatgtggcaggaagaggtgactgtgccctcggtccagaccttcctgattcctgaggccatgacctttgaggaagctgctgccttgctcgtcaattacattacagcctacatggtcctctttgacttcggcaacctacagcctggccacagcgtcttggtacacatggctgcagggggtgtgggtatggctgccgtgcagctgccgtacagtggagaatgtgacagtgttcggaacggcctcggccagcaagcacgaggcactgaaggagaatggggtcacacatcccatcgactatcacacgactga

SEQ ID NO: 164407 - DNA, 2758 bp, Artificial Sequence
  derived and/or modified sequence
ctcgcccggcgccccgcccctcccgctggatcccgcagccgcggctcttcccgacgcgttccgccttccccagctgtgcactctccatccagctgtgcgctctcgtcgggagtcccagccatgtccgacgagagagaggtagccgaggcagcgaccggggaagacgcctcttcgccgcctccgaaaaccgaggcagcgagcgacccccagcatcccgcggcctccgaaggggccgccgccgccgccgcctcgccgccactgctgcgctgcctagtgctcaccggctttggaggctacgacaaggtgaagctgcagagccggccggcagcgcccccggcccctgggcccggccagctgacgctgcgtctgcgggcctgcgggctcaacttcgcagacctcatggctaggcaggggctgtacgaccgtctcccgcctctgcctgtcactccgggcatggagggcgcgggtgttgtgatcgcagtgggcgagggagtcagcgaccgcaaggcaggagaccgggtgatggtgttgaaccggtcagggatgtggcaggaagaggtgactgtgccctcggtccagaccttcctgattcctgaggccatgacctttgaggaagctgctgccttgctcgtcaattacattacagcctacatggtcctctttgacttcggcaacctacagcctggccacagcgtcttggtacacatggctgcagggggtgtgggtatggctgccgtgcagctgtgccgtacagtggagaatgtgacagtgttcggaacggcctcggccagcaagcacgaggcactgaaggagaatggggtcacacatcccatcgactatcacacgactgactacgtggatgagatcaagaagatttcccctaaaggagtggacattgtcatggaccctctgggtgggtcagatactgccaagggctacaacctcctgaaacccatgggcaaagtcgtcacctatggaatggccaacctgctgacgggccccaaacggaacctgatggccctggcccggacatggtggaatcagttcagcgtgacagctctgcagctgctgcaggccaaccgggctgtgtgtggcttccacctgggctacctggatggtgaggtggagctggtcagtggtgtggtggcccgcctcctggctctgtacaaccagggccacatcaagccccacattgactcagtctggcccttcgagaaggtggctgatgccatgaaacagatgcaggagaagaagaatgtgggcaaggtcctcctggttccagggccagagaaggagaactagggcaagtggctgtgagaccctagagaccagcgaagggagaagttgggaagctacgttctgttggccaccagacttgcatttcagcctctgtcataatgctctgccctccctcccccgaaggtctctgtggtgatgaccgctctcccctgcccctccccgcttcctgacctctgaagaggttgggaagtgaccatttggatgtctgggccctgccaaggcgacagggagggtcagagggaggccggctgcttcctgcccccaccctttccccgggcctgctgtgctgcttttgtgccaaggttagccagtcccccctgttgtgttccatgtgctttcacctctgcctcatctttcctcccgtccctgccccgccacctccccaaagaattgaaacgtcagctcaggatatggggccaatctctgtgagtccagcatgtacctgtctctccctagtgtcccttcagcctgggctgaccagtgcccgcctctgggcttgaccagttcccaatctcgtcctctgtccccaacttcttaagcacaattgggcttcttccatctccaggttttctgccattcttaaccaaggctgcctcttccaacagggcgggaatcagacctactcccctaggtcacaactctgggaaggatacagagcccccacccttcactgagttctctggatttgttctcagtgccttagcaacgaaaacctgtgcttgtgtgtgtgtggcggcggggagggaggatcctgtttcccacctccttctcctcccctgtactccccagtgccttccttgttctggtggagctggggtttctctcctccccagtcccacaacactgccaaaaatctgtgtatgtgccattgggtggggcagccccaagcctcctggggaggcagggcaaaaacaggtgccctcatcgtggtctgtgccatgtcccgtctctatggtggttgaggagaaaggcggggaagcttcctcagccttgcagatatgtgtggcatttactagccagagctctgaaaggcagtgctgtctgtttcttgtactgggaccaaagtaaaaatccaagcacattccccttgcagttaggggaggccctactgccttctcaaagcagagaggcagcttatcaaactcagcccaaaactctgtttacatgggtggggagatggagcagggaagtacagagtgggatggtcaggacctgggccattgcaaccaaaatggggacttcctgggtagggaggtcactccctctactcactgagctaggattagggagggttattgccccaaccattgcaatgggaggtggagggacaggctcagcctcctcattgtctaaatgaggcctaaatgtgtgaagtgcgatttctgcttttgtgtaccccaccaccccattaccacagctgcctttgtgtgtttgtgtcaataaaaagccaaaccctggg

SEQ ID NO: 164408 - DNA, 1007 bp, Artificial Sequence
  derived and/or modified sequence
tcctggtgtctgggttggggaggggtcatggccctgatttggatggcctgagggttagcatgagccagggcaggagaccgggtgatggtgttgaaccggtcagggatgtggcaggaagaggtgactgtgccctcggtccagaccttcctgattcctgaggccatgacctttgaggaagctgctgccttgctcgtcaattacattacagcctacatggtcctctttgacttcggcaacctacagcctggccacagcgtcttggtacacatggctgcagggggtgtgggtatggctgccgtgcagctgtgccgtacagtggagaatgtgacagtgttcggaacggcctcggccagcaagcacgaggcactgaaggagaatggggtcacacatcccatcgactatcacacgactgactacgtggatgagatcaagaagatttcccctaaaggagtggacattgtcatggaccctctgggtgggtcagatactgccaagggctacaacctcctgaaacccatgggcaaagtcgtcacctatggaatggccaacctgctgacgggccccaaacggaacctgatggccctggcccggacatggtggaatcagttcagcgtgacagctctgcagctgctgcaggccaaccgggctgtgtgtggcttccacctgggctacctggatggtgaggtggagctggtcagtggtgtggtggcccgcctcctggctctgtacaaccagggccacatcaagccccacattgactcagtctggcccttcgagaaggtggctgatgccatgaaacagatgcaggagaagaagaatgtgggcaaggtcctcctggttccagggccagagaaggagaactagggcaagtggctgtgagaccctagagaccagcgaagggagaagttgggaagctacgttctgttggccaccagacttgcatttcagcctctgtcataatgctctgccctccctcccccgaaggtctctgtggtgatgaccgctct

SEQ ID NO: 164409 - DNA, 2583 bp, Artificial Sequence
  derived and/or modified sequence
actctccatccagctgtgcgctctcgtcgggagtcccagccatgtccgacgagagagaggtagccgaggcagcgaccggggaagacgcctcttcgccgcctccgaaaaccgaggcagcgagcgacccccagcatcccgcggcctccgaaggggccgccgccgccgccgcctcgccgccactgctgcgctgcgtctgcgggcctgcgggctcaacttcgcagacctcatggctaggcaggggctgtacgaccgtctcccgcctctgcctgtcactccgggcatggagggcgcgggtgttgtgatcgcagtgggcgagggagtcagcgaccgcaaggcaggagaccgggtgatggtgttgaaccggtcagggatgtggcaggaagaggtgactgtgccctcggtccagaccttcctgattcctgaggccatgacctttgaggaagctgctgccttgctcgtcaattacattacagcctacatggtcctctttgacttcggcaacctacagcctggccacagcgtcttggtacacatggctgcagggggtgtgggtatggctgccgtgcagctgtgccgtacagtggagaatgtgacagtgttcggaacggcctcggccagcaagcacgaggcactgaaggagaatggggtcacacatcccatcgactatcacacgactgactacgtggatgagatcaagaagatttcccctaaaggagtggacattgtcatggaccctctgggtgggtcagatactgccaagggctacaacctcctgaaacccatgggcaaagtcgtcacctatggaatggccaacctgctgacgggccccaaacggaacctgatggccctggcccggacatggtggaatcagttcagcgtgacagctctgcagctgctgcaggccaaccgggctgtgtgtggcttccacctgggctacctggatggtgaggtggagctggtcagtggtgtggtggcccgcctcctggctctgtacaaccagggccacatcaagccccacattgactcagtctggcccttcgagaaggtggctgatgccatgaaacagatgcaggagaagaagaatgtgggcaaggtcctcctggttccagggccagagaaggagaactagggcaagtggctgtgagaccctagagaccagcgaagggagaagttgggaagctacgttctgttggccaccagacttgcatttcagcctctgtcataatgctctgccctccctcccccgaaggtctctgtggtgatgaccgctctcccctgcccctccccgcttcctgacctctgaagaggttgggaagtgaccatttggatgtctgggccctgccaaggcgacagggagggtcagagggaggccggctgcttcctgcccccaccctttccccgggcctgctgtgctgcttttgtgccaaggttagccagtcccccctgttgtgttccatgtgctttcacctctgcctcatctttcctcccgtccctgccccgccacctccccaaagaattgaaacgtcagctcaggatatggggccaatctctgtgagtccagcatgtacctgtctctccctagtgtcccttcagcctgggctgaccagtgcccgcctctgggcttgaccagttcccaatctcgtcctctgtccccaacttcttaagcacaattgggcttcttccatctccaggttttctgccattcttaaccaaggctgcctcttccaacagggcgggaatcagacctactcccctaggtcacaactctgggaaggatacagagcccccacccttcactgagttctctggatttgttctcagtgccttagcaacgaaaacctgtgcttgtgtgtgtgtggcggcggggagggaggatcctgtttcccacctccttctcctcccctgtactccccagtgccttccttgttctggtggagctggggtttctctcctccccagtcccacaacactgccaaaaatctgtgtatgtgccattgggtggggcagccccaagcctcctggggaggcagggcaaaaacaggtgccctcatcgtggtctgtgccatgtcccgtctctatggtggttgaggagaaaggcggggaagcttcctcagccttgcagatatgtgtggcatttactagccagagctctgaaaggcagtgctgtctgtttcttgtactgggaccaaagtaaaaatccaagcacattccccttgcagttaggggaggccctactgccttctcaaagcagagaggcagcttatcaaactcagcccaaaactctgtttacatgggtggggagatggagcagggaagtacagagtgggatggtcaggacctgggccattgcaaccaaaatggggacttcctgggtagggaggtcactccctctactcactgagctaggattagggagggttattgccccaaccattgcaatgggaggtggagggacaggctcagcctcctcattgtctaaatgaggcctaaatgtgtgaagtgcgatttctgcttttgtgtaccccaccaccccattaccacagctgcctttgtgtgtttgtgtcaataaaaagccaaaccctg

SEQ ID NO: 164410 - protein, 1591 aa, Artificial Sequence
  derived and/or modified sequence
MSLLCVRVKRAKFQGSPDKFNTYVTLKVQNVKSTTVAVRGDQPSWEQDFMFEISRLDLGLSVEVWNKGLIWDTMVGTVWIALKTIRQSDEEGPGEWSTLEAETLMKDDEICGTRNPTPHKILLDTRFELPFDIPEEEARYWTYKWEQINALGADNEYSSQEESQRKPLPTAAAQCSFEDPDSAVDDRDSDYRSETSNSFPPPYHTASQPNASVHQFPVPVRSPQQLLLQGSSRDSCNDSMQSYDLDYPERRAISPTSSSRYGSSCNVSQGSSQLSELDQYHEQDDDHRETDSIHSCHSSHSLSRDGQAGFGEQEKPLEVTGQAEKEAACEPKEMKEDATTHPPPDLVLQKDHFLGPQESFPEENASSPFTQARAHWIRAVTKVRLQLQEIPDDGDPSLPQWLPEGPAGGLYGIDSMPDLRRKKPLPLVSDLSLVQSRKAGITSAMATRTSLKDEELKSHVYKKTLQALIYPISCTTPHNFEVWTATTPTYCYECEGLLWGIARQGMRCSECGVKCHEKCQDLLNADCLQRAAEKSCKHGAEDRTQNIIMAMKDRMKIRERNKPEIFEVIRDVFTVNKAAHVQQMKTVKQSVLDGTSKWSAKITITVVCAQGLQAKDKTGSSDPYVTVQVSKTKKRTKTIFGNLNPVWEEKFHFECHNSSDRIKVRVWDEDDDIKSRVKQRLKRESDDFLGQTIIEVRTLSGEMDVWYNLEKRTDKSAVSGAIRLQISVEIKGEEKVAPYHVQYTCLHENLFHYLTDIQGSGGVRIPEARGDDAWKVYFDETAQEIVDEFAMRYGIESIYQAMTHFACLSSKYMCPGVPAVMSTLLANINAYYAHTTASTNVSASDRFAASNFGKERFVKLLDQLHNSLRIDLSTYRNNFPAGSPERLQDLKSTVDLLTSITFFRMKVQELQSPPRASQVVKDCVKACLNSTYEYIFNNCHDLYSRQYQLKQELPPEEQGPSIRNLDFWPKLITLIVSIIEEDKNSYTPVLNQFPQELNVGKVSAEVMWHLFAQDMKYALEEHEKDHLCKSADYMNLHFKVKWLHNEYVRDLPVLQGQVPEYPAWFEQFVLQWLDENEDVSLEFLRGALERDKKDGFQQTSEHALFSCSVVDVFTQLNQSFEIIRKLECPDPSILAHYMRRFAKTIGKVLMQYADILSKDFPAYCTKEKLPCILMNNVQQLRVQLEKMFEAMGGKELDLEAADSLKELQVKLNTVLDELSMVFGNSFQVRIDECVRQMADILGQVRGTGNASPDARASAAQDADSVLRPLMDFLDGNLTLFATVCEKTVLKRVLKELWRVVMNTMERMIVLPPLTDQTGTQLIFTAAKELSHLSKLKDHMVREETRNLTPKQCAVLDLALDTIKQYFHAGGNGLKKTFLEKSPDLQSLRYALSLYTQTTDTLIKTFVRSQTTQGSGVDDPVGEVSIQVDLFTHPGTGEHKVTVKVVAANDLKWQTAGMFRPFVEVTMVGPHQSDKKRKFTTKSKSNNWAPKYNETFHFLLGNEEGPESYELQICVKDYCFAREDRVLGLAVMPLRDVTAKGSCACWCPLGRKIHMDETGLTILRILSQRSNDEVAREFVKLKSESRSTEEGS

SEQ ID NO: 164411 - DNA, 4776 bp, Artificial Sequence
  derived and/or modified sequence
atgagcctgctgtgcgtgagagtgaagagagccaagttccagggcagccccgacaagttcaacacctacgtgaccctgaaggtgcagaacgtgaagagcaccaccgtggccgtgagaggcgaccagcccagctgggagcaggacttcatgttcgagatcagcagactggacctgggcctgagcgtggaggtgtggaacaagggcctgatctgggacaccatggtgggcaccgtgtggatcgccctgaagaccatcagacagagcgacgaggagggccccggcgagtggagcaccctggaggccgagaccctgatgaaggacgacgagatctgcggcaccagaaaccccaccccccacaagatcctgctggacaccagattcgagctgcccttcgacatccccgaggaggaggccagatactggacctacaagtgggagcagatcaacgccctgggcgccgacaacgagtacagcagccaggaggagagccagagaaagcccctgcccaccgccgccgcccagtgcagcttcgaggaccccgacagcgccgtggacgacagagacagcgactacagaagcgagaccagcaacagcttcccccccccctaccacaccgccagccagcccaacgccagcgtgcaccagttccccgtgcccgtgagaagcccccagcagctgctgctgcagggcagcagcagagacagctgcaacgacagcatgcagagctacgacctggactaccccgagagaagagccatcagccccaccagcagcagcagatacggcagcagctgcaacgtgagccagggcagcagccagctgagcgagctggaccagtaccacgagcaggacgacgaccacagagagaccgacagcatccacagctgccacagcagccacagcctgagcagagacggccaggccggcttcggcgagcaggagaagcccctggaggtgaccggccaggccgagaaggaggccgcctgcgagcccaaggagatgaaggaggacgccaccacccaccccccccccgacctggtgctgcagaaggaccacttcctgggcccccaggagagcttccccgaggagaacgccagcagccccttcacccaggccagagcccactggatcagagccgtgaccaaggtgagactgcagctgcaggagatccccgacgacggcgaccccagcctgccccagtggctgcccgagggccccgccggcggcctgtacggcatcgacagcatgcccgacctgagaagaaagaagcccctgcccctggtgagcgacctgagcctggtgcagagcagaaaggccggcatcaccagcgccatggccaccagaaccagcctgaaggacgaggagctgaagagccacgtgtacaagaagaccctgcaggccctgatctaccccatcagctgcaccaccccccacaacttcgaggtgtggaccgccaccacccccacctactgctacgagtgcgagggcctgctgtggggcatcgccagacagggcatgagatgcagcgagtgcggcgtgaagtgccacgagaagtgccaggacctgctgaacgccgactgcctgcagagagccgccgagaagagctgcaagcacggcgccgaggacagaacccagaacatcatcatggccatgaaggacagaatgaagatcagagagagaaacaagcccgagatcttcgaggtgatcagagacgtgttcaccgtgaacaaggccgcccacgtgcagcagatgaagaccgtgaagcagagcgtgctggacggcaccagcaagtggagcgccaagatcaccatcaccgtggtgtgcgcccagggcctgcaggccaaggacaagaccggcagcagcgacccctacgtgaccgtgcaggtgagcaagaccaagaagagaaccaagaccatcttcggcaacctgaaccccgtgtgggaggagaagttccacttcgagtgccacaacagcagcgacagaatcaaggtgagagtgtgggacgaggacgacgacatcaagagcagagtgaagcagagactgaagagagagagcgacgacttcctgggccagaccatcatcgaggtgagaaccctgagcggcgagatggacgtgtggtacaacctggagaagagaaccgacaagagcgccgtgagcggcgccatcagactgcagatcagcgtggagatcaagggcgaggagaaggtggccccctaccacgtgcagtacacctgcctgcacgagaacctgttccactacctgaccgacatccagggcagcggcggcgtgagaatccccgaggccagaggcgacgacgcctggaaggtgtacttcgacgagaccgcccaggagatcgtggacgagttcgccatgagatacggcatcgagagcatctaccaggccatgacccacttcgcctgcctgagcagcaagtacatgtgccccggcgtgcccgccgtgatgagcaccctgctggccaacatcaacgcctactacgcccacaccaccgccagcaccaacgtgagcgccagcgacagattcgccgccagcaacttcggcaaggagagattcgtgaagctgctggaccagctgcacaacagcctgagaatcgacctgagcacctacagaaacaacttccccgccggcagccccgagagactgcaggacctgaagagcaccgtggacctgctgaccagcatcaccttcttcagaatgaaggtgcaggagctgcagagcccccccagagccagccaggtggtgaaggactgcgtgaaggcctgcctgaacagcacctacgagtacatcttcaacaactgccacgacctgtacagcagacagtaccagctgaagcaggagctgccccccgaggagcagggccccagcatcagaaacctggacttctggcccaagctgatcaccctgatcgtgagcatcatcgaggaggacaagaacagctacacccccgtgctgaaccagttcccccaggagctgaacgtgggcaaggtgagcgccgaggtgatgtggcacctgttcgcccaggacatgaagtacgccctggaggagcacgagaaggaccacctgtgcaagagcgccgactacatgaacctgcacttcaaggtgaagtggctgcacaacgagtacgtgagagacctgcccgtgctgcagggccaggtgcccgagtaccccgcctggttcgagcagttcgtgctgcagtggctggacgagaacgaggacgtgagcctggagttcctgagaggcgccctggagagagacaagaaggacggcttccagcagaccagcgagcacgccctgttcagctgcagcgtggtggacgtgttcacccagctgaaccagagcttcgagatcatcagaaagctggagtgccccgaccccagcatcctggcccactacatgagaagattcgccaagaccatcggcaaggtgctgatgcagtacgccgacatcctgagcaaggacttccccgcctactgcaccaaggagaagctgccctgcatcctgatgaacaacgtgcagcagctgagagtgcagctggagaagatgttcgaggccatgggcggcaaggagctggacctggaggccgccgacagcctgaaggagctgcaggtgaagctgaacaccgtgctggacgagctgagcatggtgttcggcaacagcttccaggtgagaatcgacgagtgcgtgagacagatggccgacatcctgggccaggtgagaggcaccggcaacgccagccccgacgccagagccagcgccgcccaggacgccgacagcgtgctgagacccctgatggacttcctggacggcaacctgaccctgttcgccaccgtgtgcgagaagaccgtgctgaagagagtgctgaaggagctgtggagagtggtgatgaacaccatggagagaatgatcgtgctgccccccctgaccgaccagaccggcacccagctgatcttcaccgccgccaaggagctgagccacctgagcaagctgaaggaccacatggtgagagaggagaccagaaacctgacccccaagcagtgcgccgtgctggacctggccctggacaccatcaagcagtacttccacgccggcggcaacggcctgaagaagaccttcctggagaagagccccgacctgcagagcctgagatacgccctgagcctgtacacccagaccaccgacaccctgatcaagaccttcgtgagaagccagaccacccagggcagcggcgtggacgaccccgtgggcgaggtgagcatccaggtggacctgttcacccaccccggcaccggcgagcacaaggtgaccgtgaaggtggtggccgccaacgacctgaagtggcagaccgccggcatgttcagacccttcgtggaggtgaccatggtgggcccccaccagagcgacaagaagagaaagttcaccaccaagagcaagagcaacaactgggcccccaagtacaacgagaccttccacttcctgctgggcaacgaggagggccccgagagctacgagctgcagatctgcgtgaaggactactgcttcgccagagaggacagagtgctgggcctggccgtgatgcccctgagagacgtgaccgccaagggcagctgcgcctgctggtgccccctgggcagaaagatccacatggacgagaccggcctgaccatcctgagaatcctgagccagagaagcaacgacgaggtggccagagagttcgtgaagctgaagagcgagagcagaagcaccgaggagggcagctag

SEQ ID NO: 164412 - DNA, 4776 bp, Artificial Sequence
  derived and/or modified sequence
atgtccctcctttgcgtacgggtgaagcgtgccaaattccagggatctccggacaaatttaacacttatgtgactctcaaggtgcaaaatgtcaagtccacgactgttgctgtgcgcggagatcagccaagttgggaacaggatttcatgtttgagatatcccggctcgacctcggcctcagtgtggaggtatggaacaaaggactgatttgggataccatggtgggcacagtgtggattgccctcaaaacgattcgacagtccgatgaggaaggtcccggcgagtggtccaccctggaggctgagactttgatgaaagatgatgaaatttgcgggactagaaaccctacgcctcacaagatcctcttagacactcgatttgagcttccttttgatattccagaggaggaagctcgctactggacatacaagtgggaacagatcaacgctttaggtgccgataatgagtactcaagtcaggaggagtcacagcggaagccactgcccacagctgcggcccagtgttcattcgaagatcccgacagcgcagtcgacgatcgtgatagcgattatcgctccgagacaagcaattccttcccccccccatatcatacggcctcccagcctaacgcttccgtgcaccagttccccgttcccgtacgttccccgcagcagcttctactgcaaggctctagccgagatagttgcaatgacagcatgcagtcatatgacctcgactatcccgaacggagagctatctccccaacttcctcaagtcgatatgggtcctcctgcaatgtaagccagggaagcagccagctctccgagctggatcagtaccatgagcaggatgacgatcatcgagaaacagactcaattcactcttgccattcctcccactctctgtctcgcgatggacaggccgggttcggtgaacaagagaaaccactggaggttaccggacaggctgagaaggaggccgcgtgtgagccaaaggagatgaaagaggacgctacaacgcatccccctcccgatctcgtcttacaaaaggaccattttctgggtccacaagagtctttccccgaagagaatgcatcttcacctttcacacaagcccgggctcactggatacgcgccgtcacaaaggtaagactccagttacaggagatcccagacgacggtgaccccagcctgccgcagtggcttccagagggccccgcagggggtctgtatggcatagacagcatgcctgacctgcgtaggaaaaaaccattgccattggtctcagacttgagtctggtgcaatcccgcaaggctggcattacgtcagcaatggctacccgaacctccctgaaggacgaggaactgaagtcccacgtttataaaaaaaccctccaggctctgatctatcccatctcatgtactacgccccacaacttcgaagtgtggaccgccactacaccgacgtattgctatgagtgcgaaggactgctttggggtatcgcccggcagggcatgaggtgcagcgaatgcggtgtgaagtgtcacgagaagtgtcaggatctgctgaacgctgactgcctgcagcgcgcggctgagaagagctgcaagcatggagctgaggatcgaacgcagaatataatcatggcaatgaaagatcggatgaagatccgcgagcgtaacaagcccgagatttttgaggtgattcgagatgtgtttaccgtcaacaaagcggcacatgtccagcagatgaagacagttaaacaatccgtgcttgacgggaccagcaagtggtctgccaagataacaatcacagtagtttgtgcccaggggctacaagccaaggacaagacgggcagctccgacccttacgtgacagtgcaggtttctaaaacaaaaaaacgcacgaaaacaatttttggtaacctgaacccagtttgggaagagaaatttcacttcgaatgtcacaacagcagcgatagaattaaggtgagggtctgggatgaagatgatgatatcaagagccgggtaaagcagcgcctgaagcgcgagagcgatgatttcttgggccagaccatcatagaagtgcggactctttccggggagatggatgtgtggtacaacttggaaaagcggactgacaaatctgcagtcagtggggcaattagacttcagataagtgtagagatcaagggcgaggaaaaggtggcaccataccatgtccagtacacatgcctgcatgaaaacctgtttcattatctgacagacatccagggttctggaggcgtgcggatccccgaggccagaggtgatgacgcatggaaagtgtattttgatgagacagcgcaggagattgtggacgagtttgcgatgcggtacggcatagagagcatttatcaggccatgacacactttgcgtgtctcagttccaagtacatgtgtcctggagtgcctgcggttatgagcacattgctggcaaacattaacgcttactacgcccatacaacagccagcacgaacgtgagcgcctcagacagattcgcagcaagcaattttgggaaagaacggttcgtgaagttgctggaccaactccacaactctttgcggatcgacttaagtacgtataggaataacttcccagctggctcacccgaacggctccaagatctgaagtcgactgtggacctcctgactagtataactttttttcggatgaaagtccaagagctgcaatcaccacctagggccagccaggtggtcaaagactgcgtgaaggcatgcttgaacagcacatacgagtatattttcaacaattgtcatgatctgtattccaggcagtatcagctgaaacaagagctcccacccgaagaacaaggaccctccatccgtaacctagatttctggcctaagctgattacattaatcgtatccatcattgaggaggacaagaacagctacacaccggtcctgaatcagtttccacaagagctgaacgtgggaaaggtgtccgccgaggtgatgtggcacctctttgcacaggatatgaagtacgcccttgaggaacacgagaaggaccacctctgtaagtctgcagactatatgaatctgcattttaaggtgaaatggctccacaacgagtacgtgagagatcttcccgtcttacaaggacaggtacctgaatatccagcatggtttgaacaatttgtcctccagtggttggacgaaaatgaagacgtgtcacttgagtttctgcggggggccctggagagagacaagaaggatggcttccaacagacctcagaacatgccttattctcatgctcagtggtggatgtgttcacccagctgaatcagagtttcgaaattatcaggaagcttgagtgccctgaccctagcatcctggctcattacatgaggagatttgccaaaaccataggcaaagtgcttatgcagtatgcagacatactgagtaaagactttcctgcttattgtaccaaagagaagctgccgtgcatactgatgaacaacgttcagcagctcagggtgcagctggaaaagatgtttgaagcaatgggggggaaggagctggacctggaggcagcagactcactgaaggagcttcaggttaagttgaataccgtcctggacgagctgtcgatggtttttgggaactcctttcaggtcagaatagacgaatgcgttaggcaaatggcagacattttaggacaggttagaggaacaggcaacgccagcccagatgcaagagcctccgcggcacaagacgcagacagtgtgctccgtcccttgatggatttcctcgacggcaacctgaccttgttcgcgacggtgtgcgagaaaactgtgttgaagagagtcctgaaggagctgtggcgcgttgtcatgaatactatggaaaggatgatcgtgcttccaccactgaccgaccagacaggcacacaactcatctttacggccgccaaggagctctcccaccttagtaagctgaaggaccatatggtgagagaggagacgcgaaatctgactccgaaacagtgtgctgtgctcgacctggccctggacaccataaaacagtacttccatgccggtggtaacggcctgaagaaaaccttcctggaaaaatcaccagacttgcagtccctccgttatgccctgagcctctatacacagacaacagacactctcatcaagaccttcgtgcggagtcagaccactcagggctccggcgtggacgacccggtcggcgaggtatccatccaggtcgatctcttcacgcatccgggaacaggggagcataaggtcacagttaaggtggtagcagccaacgatctgaaatggcagactgctgggatgttccgacccttcgtcgaggtaacaatggtgggaccccaccaaagtgacaaaaaacgaaagttcacaaccaagtctaagagtaacaactgggcccccaagtacaatgagacgttccacttcctgttaggcaatgaagaaggacccgagagttacgagctgcagatttgcgttaaagactactgcttcgcacgagaggatcgggtgcttggactcgccgtaatgcccctacgcgacgttaccgcgaagggttcttgcgcttgctggtgcccattgggaagaaagattcatatggatgagaccggattaacaatcttgcgcattctgtctcaacgttctaacgacgaagtagcgcgcgaatttgtgaaactgaagtccgagagccgatccactgaagaggggtcatag

SEQ ID NO: 164413 - DNA, 4776 bp, Artificial Sequence
  derived and/or modified sequence
atgagcctgctgtgtgtgcgggtgaagagggccaagttccagggcagcccagacaagttcaacacctacgtgaccctgaaggtgcagaatgtgaagagcaccaccgtggccgtgcggggggaccagcccagctgggagcaggacttcatgtttgagatcagccggctggacctgggcctgtctgtggaggtgtggaacaagggcctcatctgggacaccatggtgggcaccgtgtggatcgccctgaagaccatccggcagagtgatgaggagggccctggagagtggagcaccctggaggccgagaccctgatgaaggatgatgagatctgtggcaccaggaaccccaccccccacaagatcctgctggacaccaggtttgagctgccctttgacatccctgaggaggaggcccgctactggacctacaagtgggagcagatcaatgccctgggcgctgacaatgagtacagcagccaggaggagagccagaggaagcccctgcccacagctgctgcccagtgcagctttgaggaccctgacagcgctgtggatgaccgggacagcgactacagaagtgagaccagcaacagcttccccccaccctaccacacagccagccagcccaatgcctctgtgcaccagtttcctgtgcctgtgcgcagcccccagcagctgctgctgcagggcagcagccgggacagctgcaatgacagcatgcagagctatgacctggactacccagagcggcgggccatcagccccaccagcagcagccgctatggcagcagctgcaatgtgtcccagggcagcagccagctgtctgagctggaccagtaccacgagcaggatgatgaccaccgggagacagacagcatccacagctgccacagcagccacagcctgagcagagatggccaggccggctttggagagcaggagaagcccctggaggtgacaggccaggccgagaaggaggccgcctgtgagcccaaggagatgaaggaggatgccaccacccaccccccaccagacctggtgctgcagaaggaccacttcctgggcccccaggagagcttcccagaagaaaatgccagcagccccttcacccaggcccgggcccactggatccgggctgtgaccaaggtgcggctgcagctgcaggagatcccagatgatggagaccccagcctgccccagtggctgcctgagggccctgctgggggcctgtatggaattgacagcatgccagacctgcggaggaagaagcccctgcccctggtgtctgacctgagcctggtgcagagcaggaaggccggcatcaccagcgccatggccaccaggaccagcctgaaggatgaggagctgaagagccacgtgtacaagaagaccctgcaggccctgatctaccccatcagctgcaccaccccccacaactttgaggtgtggacagccaccacccccacctactgctatgaatgtgagggcctgctgtggggcatcgcccggcagggcatgcgctgcagtgaatgtggggtgaagtgccacgagaagtgccaggacctgctgaatgctgactgcctgcagagagctgctgagaagagctgcaagcacggggctgaggacaggacccagaacatcatcatggccatgaaggacaggatgaagatccgggagaggaacaagccagagatctttgaggtgatcagagatgtgttcaccgtgaacaaggccgcccacgtgcagcagatgaagacagtgaagcagagcgtgctggatggcaccagcaagtggagcgccaagatcaccatcaccgtggtgtgtgcccagggcctgcaggccaaggacaagacaggcagcagtgacccctacgtgacagtgcaggtgtccaagaccaagaagaggaccaagaccatcttcggcaacctgaaccctgtgtgggaggagaagttccactttgagtgccacaacagcagtgaccgcatcaaggtgcgggtgtgggatgaagatgatgacatcaagagccgggtgaagcagaggctgaagcgggagagtgatgacttcctgggccagaccatcatcgaggtgaggaccctgagcggggagatggatgtgtggtacaacctggagaagaggacagacaagtctgctgtgtctggggccatccggctgcagatctctgtggagatcaagggggaggagaaggtggccccctaccacgtgcagtacacctgcctgcacgagaacctcttccactacctgacagacatccagggcagcggcggcgtgcgcatccctgaggcccggggagatgatgcctggaaggtgtactttgatgaaacagcccaggagatcgtggatgaatttgccatgagatatggaattgagagcatctaccaggccatgacccactttgcctgcctgagcagcaagtacatgtgccctggggtgcctgctgtgatgagcaccctgctggccaacatcaatgcctactatgcccacaccacagccagcaccaacgtgtctgccagtgacagatttgctgccagcaactttgggaaggagagatttgtgaagctgctggaccagctgcacaacagcctgagaattgacctgagcacctacagaaacaacttccctgctggcagccctgagcggctgcaggacctgaagagcacagtggacctgctgaccagcatcaccttcttcaggatgaaggtgcaggagctgcagagccccccccgggccagccaggtggtgaaggactgtgtgaaggcctgcctgaacagcacctatgagtacatcttcaacaactgccacgacctgtacagccggcagtaccagctgaagcaggagctgcccccagaggagcagggccccagcatccggaacctggacttctggcccaagctgatcaccctgattgtgtccatcatcgaggaggacaagaacagctacacccctgtgctgaaccagttcccccaggagctgaatgtgggcaaggtgtctgctgaggtgatgtggcacctgtttgcccaggacatgaagtatgccctggaggagcacgagaaggaccacctgtgcaagtctgctgactacatgaacctgcacttcaaggtgaagtggctgcacaatgaatatgtgcgggacctgcctgtgctgcagggccaggtgcctgagtacccagcctggtttgagcagtttgtgctgcagtggctggatgaaaatgaagatgtgtccctggagttcctgcggggggccctggagcgggacaagaaggatggcttccagcagaccagcgagcacgccctcttcagctgcagcgtggtggatgtgttcacccagctgaaccagagctttgagatcatcaggaagctggagtgcccagaccccagcatcctggcccactacatgagaagatttgccaagaccatcggcaaggtgctgatgcagtatgctgacatcctgagcaaggacttccctgcctactgcaccaaggagaagctgccctgcatcctgatgaacaacgtgcagcagctgcgggtgcagctggagaagatgtttgaggccatgggcggcaaggagctggacctggaggccgctgacagcctgaaggagctgcaggtgaagctgaacacagtgctggatgagctgtccatggtgtttggaaacagcttccaggtgagaattgatgaatgtgtgcggcagatggctgacatcctgggccaggtgcggggcactggaaatgccagcccagatgcccgggccagcgctgcccaggatgctgacagcgtgctgcggcccctgatggacttcctggatggcaacctgaccctgtttgccaccgtgtgtgagaagacagtgctgaagagggtgctgaaggagctgtggagggtggtgatgaacaccatggagaggatgattgtgctgccccccctgacagaccagacaggcacccagctgatcttcaccgctgccaaggagctgagccacctgagcaagctgaaggaccacatggtgcgggaggagaccaggaacctgacccccaagcagtgtgctgtgctggacctggccctggacaccatcaagcagtacttccacgccggcggcaatggcctgaagaagaccttcctggagaagagcccagacctgcagagcctgcgctatgccctgagcctgtacacccagaccacagacaccctcatcaagacctttgtgcgcagccagaccacccagggcagcggcgtggatgatcctgtgggggaggtgtccatccaggtggacctcttcacccaccctggcactggagagcacaaggtgacagtgaaggtggtggccgccaatgacctgaagtggcagacagctggcatgttccggccctttgtggaggtgaccatggtgggcccccaccagagcgacaagaagaggaagttcaccaccaagagcaagagcaacaactgggcccccaagtacaatgagaccttccacttcctgctgggcaatgaggagggccctgagagctatgagctgcagatctgtgtgaaggactactgctttgcccgggaggacagagtgctgggcctggccgtgatgcccctgagagatgtgacagccaagggcagctgtgcctgctggtgccccctgggcaggaagatccacatggatgaaacaggcctgaccatcctgcgcatcctgagccagaggagcaatgatgaggtggcccgggagtttgtgaagctgaagtctgagagccgcagcacagaggagggcagctag

SEQ ID NO: 164414 - DNA, 4776 bp, Artificial Sequence
  derived and/or modified sequence
atgagcctgctgtgcgtgcgggtgaagcgggccaagttccagggctcgccagacaagttcaatacctatgtgaccctgaaggtacagaatgtgaagtctaccacagtggccgtgaggggagatcagccttcctgggagcaggattttatgttcgaaatctcacggctcgacctcggattgagtgtggaggtgtggaataagggtttgatttgggacactatggtagggacggtatggattgcacttaaaactattagacaaagtgatgaggaggggcccggcgagtggtctactctggaggccgaaacactaatgaaagatgatgaaatctgcggaactaggaatcccacccctcacaaaatcctccttgacacacggtttgagctgcctttcgacatcccagaggaggaagccagatattggacctataaatgggagcaaattaacgccctcggtgcggacaacgaatactcatcgcaggaagaatcccagaggaaacccctacccaccgctgcagcgcaatgttccttcgaggaccctgacagcgcagtggacgatagagactccgactatagaagtgagacttcaaactctttccctcctccctaccacactgcaagccaacccaacgcatcagtacatcagtttcccgtgccagtcaggtcaccccaacagctgttgctgcagggctcttccagggactcatgcaatgactctatgcagagctatgacctcgactacccggagcgccgcgcaatcagccctacaagtagttcgagatatgggagttcctgcaatgtttctcagggctcgtctcaacttagcgagctcgatcagtatcacgagcaggacgatgatcaccgagaaaccgattccattcacagttgtcattcttcccacagtctgtctagggacggccaggccggcttcggagaacaagaaaaaccactggaagtgaccggtcaggcagaaaaggaggcagcgtgtgagcctaaagaaatgaaagaggatgccactacacaccccccaccggacctagttctgcagaaagatcattttctggggcctcaggagagctttcccgaagaaaacgcctctagtcctttcacccaagccagggctcactggatccgagcagtgacaaaagttagactgcagctccaggagattccagacgatggagatccttccctcccacaatggctgcccgagggacctgcaggcggactttatggaatagattcaatgcccgatctgagaagaaagaagccactgcctttagtgagtgacctttccctcgtccagagccgaaaggcgggtatcacatctgcaatggctaccagaacttccctgaaggacgaagaactgaagtcccacgtttataagaagacgcttcaggctctcatctacccaatcagctgcactacaccccacaactttgaagtgtggactgctacaactcctacatactgttatgaatgcgaaggtctgttgtggggtattgcccggcagggcatgaggtgcagcgagtgcggtgttaagtgtcacgaaaagtgtcaggacctcctcaatgccgattgcctacaaagagccgctgaaaagtcttgtaagcatggcgctgaggatagaactcagaacatcatcatggccatgaaggatagaatgaagataagagagcgaaataaacccgagatctttgaagtgatccgtgatgtgtttacggtgaacaaagccgctcatgttcagcagatgaaaacagtaaaacaatctgtgctggacggtacgtctaagtggtcggcaaaaatcacaatcaccgtggtctgtgcccagggtcttcaggccaaagacaaaacagggtccagcgatccctacgtgaccgtacaggtttctaaaacaaagaagaggactaaaacaatctttggaaacctgaaccccgtatgggaagaaaaattccattttgaatgccacaattctagcgatcggataaaggtgcgcgtatgggacgaagatgacgacattaagtctcgggtcaagcagcgcctgaaaagagaaagcgacgactttctcggccagacaatcatcgaagtccgcacactcagcggagaaatggatgtgtggtataacttggaaaaaagaaccgacaaatcagctgtgagtggcgcaatccgccttcagatctcagtcgagattaagggagaggagaaggtagctccttaccatgtgcagtacacatgtctgcacgagaatttgttccactatctgaccgatattcagggtagcggtggagtccgcataccagaagcccgaggcgacgacgcctggaaggtgtatttcgacgagacagcacaggagatagtagacgagttcgccatgagatacgggatagaaagcatttatcaggcgatgacccacttcgcttgtctcagttcaaaatacatgtgtcctggagtgcccgctgtgatgtccaccttgctcgcaaatatcaacgcttactacgctcacacgacagccagcactaacgtgtcagccagcgatcggtttgctgctagcaatttcggaaaggaacgcttcgttaaattgctggaccagctccacaatagcctgcggatcgacctttcgacctaccgtaataatttcccagcaggcagtcctgagcgtctgcaggacttaaagtctaccgtagatttgctgacatccatcacatttttccgcatgaaggtacaggagctgcaaagcccacctagagcgtcccaagtcgtgaaggactgtgtcaaggcttgcctgaattcaacatatgagtacattttcaataattgtcatgacctatactctcgtcagtaccagctcaaacaggagctgcctcctgaagagcagggtccctcaatcaggaacctcgatttttggccaaagctgattacccttattgtgtcaataatcgaagaggacaagaatagttatacccccgtgttgaaccaatttcctcaggaattaaatgtcggaaaagtgtcagccgaggtgatgtggcacctcttcgcccaagacatgaagtacgcccttgaagagcacgagaaggatcacctgtgtaaaagcgcagactatatgaatctgcactttaaagtcaagtggctgcacaacgaatatgtgcgggatctgcctgtcctgcagggtcaggtgcccgaataccctgcctggtttgaacaatttgtgttgcagtggctcgatgaaaatgaagatgtgagcctggagttcctacggggggcgctggagcgggataaaaaagatgggttccagcaaacaagcgaacacgcactgttctcatgtagtgttgtggatgtcttcacccagcttaaccagtccttcgagattataaggaagctggagtgtcccgacccctcgatactagcccactacatgcgaaggttcgcaaagacaattggcaaagtcctgatgcaatatgccgatattctgtctaaggatttcccagcctattgtaccaaagaaaaactgccttgtatactcatgaataacgtgcaacaactgcgggtccaactcgagaaaatgttcgaggccatggggggtaaggaactggatctcgaagctgccgactctctgaaggaactccaggttaaacttaataccgtgttagacgagttatcgatggtgttcgggaactcctttcaggtgcggatcgatgagtgtgtccgccaaatggccgatattttgggccaggtaaggggcactggtaatgcgagcccggacgctagagcatcagctgcacaggacgctgattctgtactgcggccactgatggatttcctggacggcaacctcacgctgttcgccaccgtatgtgagaaaacggttttaaaacgggtactaaaagagctgtggcgagtggtgatgaacactatggagcgaatgatcgtgctgccaccgctaaccgatcagaccgggactcagctcatctttacagctgcaaaggagctctcacatctgagcaagctaaaggatcacatggtgagagaggagaccaggaatctgactcccaagcagtgcgctgtgctggatttagctttagacaccatcaagcaatattttcatgccggcgggaatggactgaagaagactttccttgagaagagcccagatctacagtccctgcgatacgccctatctctgtatacacagactactgatactctgataaagacgttcgtgcggtcccagaccacccagggctctggtgttgacgatcccgtcggcgaggtgtccattcaggtcgacctgttcacccatcctgggacaggtgagcacaaggtgacggtgaaagtggtggccgccaatgatctgaagtggcagacagccggcatgttcaggccttttgtcgaggtgaccatggtagggccccatcagtctgataagaaaaggaagttcacgactaaaagcaaatccaacaattgggcccccaagtacaatgagaccttccacttccttctcggcaacgaagagggcccagagtcttacgagcttcaaatttgcgtaaaggattactgttttgcccgtgaagatagagtgctcggtctggctgtaatgcctctgagagatgtcactgctaaggggagttgtgcctgctggtgccctctgggcagaaaaattcatatggacgaaaccggtctgactatcctgaggattctcagtcaacggtctaatgatgaggtggcccgggaatttgtcaagcttaagtccgagtctcggtccacagaggagggcagctag

SEQ ID NO: 164415 - DNA, 4776 bp, Artificial Sequence
  derived and/or modified sequence
atgagtcttctgtgcgttagggttaagagggcaaagtttcaaggcagtccggataaattcaatacctatgtcaccctgaaggtccagaatgtgaaaagcacaaccgtggctgtgcgcggagatcagccttcctgggagcaagatttcatgtttgagatcagtaggctcgacctggggctgtccgtggaggtgtggaacaagggactgatatgggacactatggtagggactgtttggattgcgctcaagaccatccggcagagcgatgaggagggtcccggtgagtggtccaccctggaggctgagaccctgatgaaagatgacgagatttgcggaacacgcaaccctacaccccacaaaatcctcttagacaccaggttcgaattgccgttcgatatccctgaggaggaagcgcgatactggacatacaaatgggagcaaatcaatgctttgggcgctgataacgagtactcgtcacaggaagagagccaaagaaagccactccctacagccgcagcacaatgcagctttgaagatccagacagtgcagtggacgatagagattctgactataggagcgaaacctcaaactcatttccgcctccatatcacaccgccagtcagcccaatgcctctgtgcatcagtttccagtacccgtgagatccccacagcagcttcttctgcaggggagttcaagggattcttgtaatgattccatgcagagctacgatctggactatcccgagcgacgagctatcagtccaacatcttctagtcgttatggctcttcatgtaatgtgagccagggctctagccagctcagtgaactggaccagtatcacgagcaggatgacgaccacagagagaccgatagcatacactcttgccatagcagccattcattgagtcgcgatgggcaggccggttttggcgaacaggagaagcccctcgaagtgaccggccaggctgagaaagaggctgcatgcgaacccaaggagatgaaagaggacgccaccacccacccccctccagatcttgtgttgcagaaagaccactttcttggcccacaggaaagcttcccagaggagaatgcgtcctcacccttcacccaagcccgagcacactggattcgggctgtgacaaaagtgcgcctgcagttgcaggaaattcccgatgacggagacccctctctgcctcagtggctacctgaaggccctgctggaggactgtatggcatcgacagtatgccggacctaagacggaagaagcctcttccgttagtatccgacttgagtctagtgcagtctagaaaagccggaataacctctgcaatggccactcgcaccagcctcaaagatgaggaactgaaatcccatgtgtataagaagactctgcaggccctcatctatcccatctcttgtaccacacctcacaatttcgaagtgtggaccgcgactactcctacatactgctatgagtgtgagggcctgctttggggcattgcacgccaaggtatgagatgttcagagtgtggcgtcaaatgccatgaaaagtgccaagatcttctgaatgcagactgtctgcagagggcggctgaaaaaagctgcaaacatggagctgaagacagaacacagaatattattatggctatgaaagataggatgaagattagggaacgcaataaacctgaaatatttgaagtgatcagggacgttttcacggtcaacaaggccgctcatgtgcagcagatgaaaaccgtcaaacaaagcgtgctggacggcacatcaaagtggtccgccaagattaccattacagtggtgtgcgcccaggggctgcaagccaaggataaaacaggatcctccgacccttacgtcactgtccaggtaagtaagaccaagaaaaggaccaaaaccatcttcgggaaccttaatcccgtgtgggaagaaaagttccacttcgagtgtcacaatagcagcgaccgaatcaaggtgagagtgtgggacgaggatgacgatatcaagagccgggtcaaacagcgcctgaagagggagtctgatgattttctgggccagaccatcatcgaagttaggactctaagcggggaaatggatgtctggtacaatctggaaaaacgaaccgataaaagcgctgtgtcaggcgctatacgtctgcagataagtgttgagataaaaggtgaggagaaggtagccccttatcatgttcagtacacctgtttgcatgagaatctcttccactatctgaccgacatacagggcagcgggggtgtacgaatcccagaagccaggggcgatgatgcatggaaagtgtactttgatgaaactgcacaagaaatcgtggacgaatttgccatgcgctacggcatagagagtatttaccaggcaatgacacacttcgcctgcctgtcttccaagtacatgtgcccaggggtacccgcagtgatgagcaccctcctagccaacataaacgcctattacgcgcataccacagcgagtaccaatgtctctgcttctgacagatttgccgctagcaatttcggcaaagagcggttcgtcaagttgcttgaccagctacacaactctctccgcatcgacctgtcgacctacaggaataatttccccgcaggctcacccgagcggctgcaggacttgaagtctacagtagatttgctgacaagtataaccttttttcgcatgaaggtgcaggaactgcagtcacctcccagggctagtcaggtggtgaaagattgcgtgaaagcctgcctgaactcaacttatgagtatatttttaacaattgccacgatttgtacagtaggcagtatcagctgaaacaggagctgccccctgaagagcaggggccttctattcgcaacttggacttctggccaaagctgataacactgattgtgtcaattattgaggaggataaaaacagctacaccccagtgctcaaccaattccctcaggagttaaatgtcggcaaagtgtccgctgaggttatgtggcatctgtttgcgcaagacatgaagtatgctcttgaagagcatgaaaaggatcacctttgtaaatcagcggactacatgaatctgcacttcaaggttaaatggctgcataatgagtacgttagagacttgcccgtgctccagggacaggtgcctgaataccccgcatggtttgagcagtttgtgctccagtggctggacgaaaacgaggatgtgagcttggagttcctgagaggagccctggaacgcgacaaaaaagacgggtttcagcaaacgtctgagcatgctctgtttagctgttctgtagtggacgtgttcacacagctaaatcagagcttcgagatcatacgaaaattagagtgtccagatccctccatcttggctcattacatgaggaggtttgcaaaaacaatcggcaaagtcctgatgcagtatgccgacatcctctctaaagattttccagcgtactgcacgaaagagaagttaccttgtattctgatgaataatgtacaacagctgcgcgtccagttggaaaagatgtttgaagcaatgggcggaaaggaactggatctggaggcggctgacagcctaaaagaactgcaagtcaagttgaacacagtgttggacgaactttccatggtttttgggaactctttccaggtgaggattgatgaatgtgtgcgacagatggccgacatcctagggcaggtcagaggtaccggtaacgcgtccccggatgctagagcctcagccgcacaggacgctgactcagttcttcggcctttaatggatttcctcgatggcaacttgaccctgtttgccactgtgtgcgaaaaaacagtgctgaaacgagtgctaaaagagttgtggcgtgtggttatgaacactatggagcgtatgatcgtcctacccccattgacagaccaaaccggaacccagctgatctttaccgccgcaaaagaactgagtcatctctcaaagcttaaagatcacatggtgcgagaagagactaggaatctcacacctaagcaatgcgcggttctcgatctggccctggacactattaaacaatacttccacgcaggaggcaacggactgaagaagacgtttctcgagaaaagccccgacctgcaaagtcttagatacgctctttccctttacacccaaaccaccgatacactgataaaaacattcgtgagaagccaaacaacccaggggtctggtgtagacgaccctgtgggagaggtcagtatacaagtcgaccttttcacacacccgggaaccggtgagcataaggtaacagtgaaggtggtggcggcaaatgacctgaagtggcagacagccggaatgttcagaccctttgtggaggtcacaatggtcggtcctcaccaaagtgacaagaagaggaagttcacaacgaagagcaaaagcaacaattgggcccctaagtacaacgagacgttccactttctgctaggcaatgaggaagggccagagtcctatgaactgcagatctgcgttaaggactactgctttgctagggaggacagagtgctgggattggccgtgatgcccctgcgcgatgtcacagccaagggcagctgcgcctgctggtgtcccctcggaaggaaaatacatatggatgaaaccggcctaacgattctgagaatactgtctcagaggagcaacgacgaagtagccagagaattcgtgaaactgaaaagtgagtcgcgaagcacagaggaaggctcatag

SEQ ID NO: 164416 - DNA, 6303 bp, Artificial Sequence
  derived and/or modified sequence
cccagcctgccggccggtactcaccgctacccggagttcgctcagacggtgagatttggggcgggtccgaggcagcggcgggacgctacctgcgaccgggaccatgaggagctgccagacccgtggggccggtaacgagagcagtcgcggcacctgctgagaggaaagagggagcggtccggcgcggctggggcgcggcagaggcttgcccgatcctcggccatgtcactgctctgcgtgcgcgttaaaagggccaaattccagggttcaccagataaatttaacacatatgtgaccctgaaagtacagaatgtgaagagcacaactgtagcagttcgtggtgatcagccttcctgggaacaggatttcatgtttgagattagtcgcctggacctgggtctaagtgtggaggtatggaacaaaggactgatctgggacaccatggtggggactgtgtggattgcgctgaagactattcgtcagtcggatgaggaagggcctggggaatggtccacattagaggcagagacgttaatgaaagacgatgagatctgtggaactagaaacccaactcctcataaaattttgcttgatacaagatttgagttgccttttgatatcccagaggaggaagccagatattggacctacaaatgggagcaaatcaatgccttgggagctgacaatgagtattctagtcaagaagaaagccagaggaagccattgcccactgctgccgcccagtgttcttttgaagaccctgatagtgccgtcgatgaccgagatagtgactatcgcagtgagaccagcaacagcttcccacctccttaccatacagcttcccagcccaacgcttctgtgcaccagttccctgtgccggtgcgatcgccacagcagctgctacttcaaggcagttcccgggactcttgtaatgactctatgcaaagttatgaccttgattatccagagcggcgggctatcagccccaccagcagcagtaggtatggctcctcctgtaatgtgagtcaaggaagctctcagctaagtgaactagaccagtatcacgaacaagatgacgaccatcgggagacggactcgattcattcttgccacagctctcacagcctgtccagagatggccaagcaggttttggagaacaagagaaacccttggaggtgacaggtcaagcagagaaggaggcagcatgtgaacccaaggagatgaaagaagatgccacaacccaccctcccccagatctggtgctgcaaaaagaccacttcctaggtccccaggagagttttcctgaggagaatgcatcttcaccatttacccaagccagagcacattggatccgagcagttaccaaggttcgactccagctgcaggagattccagatgatggtgacccctctctgcctcagtggctcccggaagggccagccggagggctctatggcattgacagcatgccagatttacgcagaaagaagccactgccacttgtcagtgatctgtcactggtccagtctcggaaggcaggaatcacttctgcaatggctacacgcacttctcttaaggacgaagagctgaaatcccacgtgtataagaaaaccctgcaggccttaatctaccccatttcgtgcaccactcctcataactttgaggtctggacggccactaccccaacctactgctatgagtgtgaaggcctgctctggggcattgcccggcagggcatgcgctgcagcgaatgtggagtcaagtgccatgagaagtgccaggatctgctcaatgctgactgcctgcagcgggctgcagaaaagagctgtaaacatggagctgaggaccggacccagaacattatcatggccatgaaggaccgcatgaagatccgagagcgaaataagccagagatctttgaagttatccgggacgtcttcacagtgaacaaagctgcccatgtgcagcagatgaaaacagtgaagcagagtgtactggatggcacctccaaatggtcagccaagatcaccattactgtggtgtgtgcccagggcctacaagccaaggacaaaacaggatccagtgacccttacgtgactgtgcaagtcagcaaaactaagaagcgtaccaagaccatttttggaaacttgaatcctgtttgggaggagaagttccattttgagtgccacaactcctctgaccgcattaaggtgcgtgtatgggatgaggatgatgacatcaagtcaagagtaaagcaacgcctaaagcgagagtctgatgatttccttggccaaaccatcattgaggttcggaccctaagtggcgagatggacgtctggtacaacttggagaagaggacagacaaatcagccgtctcaggggctatccgactacaaatcagtgtggagatcaagggggaggagaaagtagccccataccacgtgcagtatacatgtctccatgagaatcttttccattacctcacagacattcagggcagtggaggagtccgcatccctgaagctcgaggagacgatgcctggaaggtgtactttgatgagacagcccaagaaattgtggatgaatttgccatgcgttatggcattgagtccatatatcaggccatgacgcactttgcatgtttatcatccaagtacatgtgtcctggtgtgccagcagtgatgagcaccttactggccaacatcaacgcctactatgcccacacaactgcctctaccaatgtctctgcatctgatcgctttgcagcctccaactttgggaaagagagatttgtaaaactgctggaccagctacacaactcactgaggatcgacctctctacatacaggaataatttccctgctgggagtcctgaacggcttcaggacttaaaatccacagtggatttgctgaccagcattactttcttcagaatgaaggtacaagaactgcaaagccctccaagagccagccaggtggtaaaggattgtgtgaaggcctgtttgaactccacatatgaatatatcttcaacaactgccacgacttatacagccgccagtaccagctgaagcaggagctacctccagaggaacaagggcccagcattcggaacctggatttctggcccaagctcatcacactcatcgtgtcaatcatagaggaagataagaattcctacacacctgttctgaaccagtttcctcaggagttgaatgtgggaaaagtcagcgcagaagtgatgtggcatttgtttgcccaagacatgaaatatgcattggaggagcatgagaaagaccacctgtgtaaaagtgctgactacatgaacctgcacttcaaggtgaagtggctccacaatgaatacgtgcgggatctgcctgtcctccaggggcaggtgcctgagtacccagcgtggtttgagcagttcgtgctacaatggctggatgagaatgaggatgtatccctggaattcctgcgtggggccctggaacgagataagaaggatggattccagcagacatcagagcatgcactcttttcctgctctgtggtggatgtcttcacacaactcaatcagagctttgagatcatccggaagctggaatgcccagaccccagcatccttgcccactacatgaggaggtttgctaagaccatcgggaaggtgctgatgcagtatgcagacatcttgtcaaaggacttcccagcctattgcacaaaggagaaactgccctgcatcctgatgaacaacgtgcagcaactgagggtccagctggagaaaatgtttgaggccatgggaggcaaggagctggaccttgaagctgcagacagtctgaaggagctgcaggtgaaactgaatacggttctggatgagctcagcatggtgtttggaaacagtttccaggtacggattgatgagtgtgttcgacaaatggccgacatcctgggccaggttcggggcacagggaatgcatctccagacgccagggcctcagcggctcaggatgcagatagcgtactccggcctctcatggacttcctggatggcaacctcaccctctttgccactgtgtgtgagaagacggttctgaagcgtgtactgaaggagctctggcgcgtggtgatgaacacaatggagaggatgattgttctgcccccactcactgaccagacgggcacccagctgatcttcactgctgccaaggagctgagccatctttccaaactcaaggatcacatggtacgagaggaaacacggaatctcactccaaagcagtgtgcagtccttgacctcgccctggacaccatcaagcaatacttccatgcaggaggcaatgggctgaagaaaaccttcctggagaagagcccagatctgcagtctctacgctatgccctgtctctgtacacacagactactgacactctcatcaagacctttgtgcgctcgcagaccacccaagggtctggtgtggacgatcctgtgggagaagtctctattcaggtggacttgtttacacaccctggtactggggagcacaaggtcacagtgaaagtggtggctgccaatgacctcaagtggcagacagcgggtatgttccggcctttcgtggaggtgactatggttggcccacaccaaagtgataagaagaggaagttcacaaccaaatccaaaagcaacaactgggcccccaagtacaatgagacattccacttcctcctgggaaatgaggaggggcccgagtcctatgagttgcagatatgcgtgaaggattactgctttgcccgggaagatcgcgtgctagggctggctgtgatgcctctgagggatgtcacagccaagggcagctgtgcctgctggtgccccttgggccggaagatccatatggatgagacaggcctgaccattctccggattttatctcagaggagcaatgacgaggtggcccgagaatttgtgaaactcaaatcagagtctcgttccacggaggaggggagctgaacaccttcgactcctgtgccaatcaggcagcagcaatttcacaaatcagggccagtgggagttagctgtgtaaccggcttagggtctttgcagtcaagaggctgaccccttcagttaaagatatttaaggaaaaatttggggtggtgataatatggcttttcacagaaagggtcatgaagccctggcccaacaggactgtggtactaggggctgggatgtggggttaccacatggagagattttccattaagagagaaggacaaacatttctgagagtgtcagccattcttggtagacacctctccactcctcatcccacctctacccatctccatgccacaccttatccagttagacacatacataccaatcattagaagaacaagtttagaaggtgtggaacttgtgcctggctggctgggtagtcagctgagcctgttgctgagcccggtggtctggattggagtatggccagggcaggagtacacagaatagaatttagactgtcccttgagtagaatccactgattttctgtggctccagtgagaacaaggctttgaaactgaacaagataacttctagaaatgaactgtactaatccctttccccagattgtatcatgagtagaatcaggttcacgtggtgcttcaaagccctgagaagaatatttctttggaccccaggcactaggggccacctgcctgggagtctccctgcctcactcctctaggcaggggagtgatgcttcaggacgtgacaggctgttctaacatgtgtctacctgagggctagttgaaggatccaggagtattttcttcttgggtgggccctgaacaaagccaaaaattgtagaaaccagtctagaaaaagtcctgctcatctgtggccactgccttctagccgtcctccaccttgcagaaagaatctagcctttggtctctctctctctcatcggggtcatttgctattcccctctgatattcaaccctatagaaggagcctggactctgatccctctgtacaggctggatggaaggggccctccacacttcctgggaggtcagagacaaactgtttcagagagtcagatggacttcccaagacttgttgagagatgtgacatggttcttggatttcctctgtagcagcctcctggacttcctgaggactcgacattgtccacagatgtactggccattacatgaaacaagaaaccaagcatctttgctgttgttaattattatatgtgccattgttacaggagattataggctagtctgtaataaattatcttatagcagcc

SEQ ID NO: 164417 - protein, 751 aa, Artificial Sequence
  derived and/or modified sequence
MAFRTICVLVGVFICSICVKGSSQPQARVYLTFDELRETKTSEYFSLSHHPLDYRILLMDEDQDRIYVGSKDHILSLNINNISQEALSVFWPASTIKVEECKMAGKDPTHGCGNFVRVIQTFNRTHLYVCGSGAFSPVCTYLNRGRRSEDQVFMIDSKCESGKGRCSFNPNVNTVSVMINEELFSGMYIDFMGTDAAIFRSLTKRNAVRTDQHNSKWLSEPMFVDAHVIPDGTDPNDAKVYFFFKEKLTDNNRSTKQIHSMIARICPNDTGGLRSLVNKWTTFLKARLVCSVTDEDGPETHFDELEDVFLLETDNPRTTLVYGIFTTSSSVFKGSAVCVYHLSDIQTVFNGPFAHKEGPNHQLISYQGRIPYPRPGTCPGGAFTPNMRTTKEFPDDVVTFIRNHPLMYNSIYPIHKRPLIVRIGTDYKYTKIAVDRVNAADGRYHVLFLGTDRGTVQKVVVLPTNNSVSGELILEELEVFKNHAPITTMKISSKKQQLYVSSNEGVSQVSLHRCHIYGTACADCCLARDPYCAWDGHSCSRFYPTGKRRSRRQDVRHGNPLTQCRGFNLKAYRNAAEIVQYGVKNNTTFLECAPKSPQASIKWLLQKDKDRRKEVKLNERIIATSQGLLIRSVQGSDQGLYHCIATENSFKQTIAKINFKVLDSEMVAVVTDKWSPWTWASSVRALPFHPKDIMGAFSHSEMQMINQYCKDTRQQHQQGDESQKMRGDYGKLKALINSRKSRNRRNQLPES

SEQ ID NO: 164418 - protein, 233 aa, Artificial Sequence
  derived and/or modified sequence
MDQVFMIDSKCESGKGRCSFNPNVNTVSVMINEELFSGMYIDFMGTDAAIFRSLTKRNAVRTDQHNSKWLSEPMFVDAHVIPDGTDPNDAKVYFFFKEKLTDNNRSTKQIHSMIARICPNDTGGLRSLVNKWTTFLKARLVCSVTDEDGPETHFDELEDVFLLETDNPRTTLVYGIFTTSSSVFKGSAVCVYHLSDIQTVFNGPFAHKEGPNHQLISYQGRIPYPRPGTNTCV

SEQ ID NO: 164419 - protein, 769 aa, Artificial Sequence
  derived and/or modified sequence
MLSKKGIFPWILTCISEEMAFRTICVLVGVFICSICVKGSSQPQARVYLTFDELRETKTSEYFSLSHHPLDYRILLMDEDQDRIYVGSKDHILSLNINNISQEALSVFWPASTIKVEECKMAGKDPTHGCGNFVRVIQTFNRTHLYVCGSGAFSPVCTYLNRGRRSEDQVFMIDSKCESGKGRCSFNPNVNTVSVMINEELFSGMYIDFMGTDAAIFRSLTKRNAVRTDQHNSKWLSEPMFVDAHVIPDGTDPNDAKVYFFFKEKLTDNNRSTKQIHSMIARICPNDTGGLRSLVNKWTTFLKARLVCSVTDEDGPETHFDELEDVFLLETDNPRTTLVYGIFTTSSSVFKGSAVCVYHLSDIQTVFNGPFAHKEGPNHQLISYQGRIPYPRPGTCPGGAFTPNMRTTKEFPDDVVTFIRNHPLMYNSIYPIHKRPLIVRIGTDYKYTKIAVDRVNAADGRYHVLFLGTDRGTVQKVVVLPTNNSVSGELILEELEVFKNHAPITTMKISSKKQQLYVSSNEGVSQVSLHRCHIYGTACADCCLARDPYCAWDGHSCSRFYPTGKRRSRRQDVRHGNPLTQCRGFNLKAYRNAAEIVQYGVKNNTTFLECAPKSPQASIKWLLQKDKDRRKEVKLNERIIATSQGLLIRSVQGSDQGLYHCIATENSFKQTIAKINFKVLDSEMVAVVTDKWSPWTWASSVRALPFHPKDIMGAFSHSEMQMINQYCKDTRQQHQQGDESQKMRGDYGKLKALINSRKSRNRRNQLPES

SEQ ID NO: 164420 - DNA, 2310 bp, Artificial Sequence
  derived and/or modified sequence
atgctgagcaagaagggcatcttcccctggatcctgacctgcatcagtgaggaaatggcattccggaccatatgtgttctagttggtgtgtttatttgctcaatatgcgtaaagggcagttcacagcctcaggcacgggtgtatcttacctttgatgagcttagggagactaaaacatccgaatacttctccctgtctcaccatccattggattatcggatcctgctgatggacgaggaccaggatcgtatctatgtagggtcaaaggaccacatcctgtccctaaacattaacaacattagccaggaagccctttctgtgttctggccagcatccacgatcaaagtcgaggaatgtaagatggcagggaaagaccctacacatggttgtgggaatttcgtgcgcgtgattcagacctttaaccggacacatttgtatgtctgtggtagcggagccttttcccctgtatgcacgtaccttaacagaggtcgacggtctgaggaccaagtctttatgatagacagcaaatgcgaaagcggcaagggcaggtgttcttttaatcccaacgttaatacagtgtctgtcatgattaacgaggagcttttcagtggcatgtatatcgactttatggggacagacgcagccatattccgtagcctgactaagcgcaatgctgtaaggaccgaccagcacaattctaaatggctgagcgagcctatgtttgtggacgcgcatgttatccctgatggaacggaccctaatgatgctaaagtctactttttctttaaggaaaagctgaccgataacaaccgtagcaccaagcaaatccactcaatgattgcccgaatttgtccaaatgacacgggcgggcttcgcagtctggtaaataagtggaccaccttcctaaaggctcgcctcgtgtgcagcgtaactgacgaggacggccccgagactcactttgacgaactcgaggacgtgttcctgctggaaaccgacaacccccgcacgacgctggtgtatggcatctttaccacctcgagctccgtgtttaagggctcggcggtgtgcgtgtatcacctaagtgacattcaaacagtgttcaatggacccttcgcacacaaggaggggcctaaccatcagctcataagctatcaaggccgaattccttacccgaggccaggaacctgtccaggcggtgcctttacaccaaatatgcggactactaaagaattccctgacgatgtggtgacattcattagaaatcatcctttgatgtacaatagtatttatcctatccacaaacgacccctgatcgtacgcatcgggactgactataaatatacaaaaatcgcagtggatcgggtcaatgctgcggacggtagatatcatgtgcttttcctggggacagatagagggacagttcagaaggtcgttgtgctcccgaccaacaactccgtgtctggcgagttaattcttgaagaactggaggttttcaagaaccacgcaccaatcactactatgaaaatcagctccaaaaagcaacagctctacgtgagctcaaacgagggcgttagccaggtgtcactccacagatgccacatttacgggaccgcctgtgcagattgttgtctagctagagacccatattgtgcatgggacgggcacagctgtagccggttttatcccactggcaaacgccggtcccgtaggcaggacgtccgccacggaaatccactcacccagtgccgcggatttaatttgaaggcctatcggaacgcagctgagatcgtacagtacggggttaagaataacacaacctttctcgaatgcgcccctaaaagcccgcaggcctctattaaatggctcctccagaaggataaggacaggaggaaggaagtcaaattaaacgaacgaatcattgccacctcccagggcctgctgatccgttcagtccaggggagcgatcaggggctgtaccattgcattgccactgagaattccttcaaacaaacaatagctaaaatcaactttaaggtgctggatagcgagatggtagctgtagtaacagataagtggtcaccatggacctgggcatcaagcgtgagagctcttcccttccatcctaaggatattatgggagcgttctcccacagtgagatgcagatgattaaccaatattgtaaggacactcggcagcagcatcaacagggtgatgaaagccagaaaatgaggggagattatggcaaactcaaggcactgataaattccaggaaaagccgaaaccggcgtaaccagctgcccgagagttag

SEQ ID NO: 164421 - DNA, 2256 bp, Artificial Sequence
  derived and/or modified sequence
atggctttccgcactatctgtgtccttgtgggggttttcatatgttccatctgtgtgaaagggtcaagtcagccccaggctagggtatacctgacttttgatgagctcagggaaactaaaacttcagaatattttagcctatcacaccaccccctagattatcggatcctgctcatggatgaggatcaggatcgcatatacgttgggtccaaggaccacattttgtccctcaacatcaacaatatcagccaggaagctctctcggtgttttggcctgcctctaccattaaagtggaggaatgtaagatggccggtaaggatcccactcatggatgtggcaacttcgtccgcgttattcaaaccttcaacaggacacacctctacgtgtgtggctctggggcattcagccccgtgtgtacatacctaaaccgcggtaggcgaagtgaggatcaggtatttatgatcgactccaagtgtgagtctgggaagggtcggtgctcctttaaccccaatgttaataccgtgtcagttatgatcaacgaagagctgttctccgggatgtacattgactttatgggtacagatgccgctatttttcggagtctgactaaacgtaatgcagtgcggactgaccagcacaattccaaatggctatctgagccaatgttcgtcgatgcgcacgtgatccccgacggtactgacccaaatgatgctaaggtgtacttctttttcaaggaaaagttaaccgacaataaccggagcactaagcaaatccatagtatgatcgctaggatctgccccaacgacaccgggggtctccggagtttggtgaataaatggacgacctttctgaaagccaggctcgtctgttcagtcacagacgaagacggcccagagactcacttcgacgaactggaagatgtgtttctcctggaaacggacaaccctagaaccaccctcgtctacggtatatttacaacttccagctctgtgttcaagggcagcgcagtgtgtgtgtaccacctgtcagacatacagacagtgttcaatggaccgtttgctcacaaagagggtcctaatcaccagctgatttcctaccagggacgtatcccctatcctcgtcctgggacatgccctggtggggcttttactccgaatatgagaacaaccaaagagttccctgatgacgttgttacattcattaggaatcacccgctcatgtacaacagcatctaccctatccacaaacgccctctaattgtccggataggtaccgactataaatacactaagattgccgtggatagggtcaacgcagctgacggtagataccatgtcctgtttctgggtactgaccgtggcactgttcaaaaggtggtggtgctccctactaacaatagcgtaagcggggagctaattctcgaagagctggaagtgttcaagaatcatgctcccatcacaactatgaaaatcagctcaaagaaacagcagctttacgtctcttcaaacgaaggagtgtcacaggttagtctccatcggtgtcatatctacggcacagcctgcgctgactgttgtctggccagagacccatactgtgcatgggatggacactcatgctcgcggttttatcccacaggcaaacgcagatccaggcgccaggatgtccgacacgggaaccctctgacccaatgtcgcggattcaacctgaaagcttaccggaacgccgcagagattgtacagtatggagtgaaaaataatacgactttcctagaatgtgcgcctaagtccccccaggccagtatcaagtggctgttgcagaaagataaggacagacggaaggaggtgaagctgaacgaacggatcattgcaacatcacaggggcttttgataaggtcggtccagggatccgaccaaggactgtatcactgcatcgccacagagaactcattcaaacaaaccatagctaaaatcaatttcaaagtcttagactctgaaatggtggccgtagtaaccgataagtggtccccatggacctgggcgagcagcgtgcgggctctgcccttccaccccaaagatattatgggggcattttcccacagtgagatgcagatgatcaatcaatactgcaaggataccaggcaacagcaccagcagggtgacgagtcgcaaaaaatgaggggagattatggaaagcttaaagcactgatcaactcgcggaagtcccggaaccgacggaatcaacttcccgagtcatag

SEQ ID NO: 164422 - DNA, 2256 bp, Artificial Sequence
  derived and/or modified sequence
atggcgtttcgcacaatctgcgtcctggtgggggtgttcatttgctctatttgtgtgaaagggtccagtcaaccacaagccagggtttaccttactttcgacgaactccgggaaacaaagacttcagagtacttttctctgtcacaccatccactggactatcggatcctcctcatggatgaggaccaggatcggatttacgtaggaagtaaggatcatattttgtccctaaacattaacaatattagccaagaggccctctcagtcttttggccagcttccaccatcaaagtggaggagtgtaagatggccggtaaagatcccactcacgggtgtgggaattttgtgcgtgtgattcagacatttaatcggacacatctttacgtgtgcgggtccggcgctttcagccccgtatgcacctatctgaatcgagggaggcggagcgaggaccaggtgtttatgatcgatagcaagtgcgaatctgggaagggtcgttgctcattcaatcccaatgtcaatacagtctccgtcatgatcaatgaggagctttttagtggcatgtatattgatttcatgggtactgacgcagccatcttccgatccctcactaaacgcaacgccgtcaggactgaccagcacaactctaagtggctgtcggagccgatgttcgtagatgcacacgtcatcccagatggcaccgaccccaatgacgccaaggtctacttctttttcaaggagaaacttaccgacaataacagatcaaccaagcagattcactccatgattgctcggatttgtccaaacgatacagggggtctgaggtccctggtcaacaaatggaccaccttcttgaaagctaggctcgtatgtagcgtcactgacgaggatggcccagagacacatttcgacgagctcgaggatgtttttctcttggagaccgacaacccacgcaccacattggtctacggaatctttacaaccagctcatccgtcttcaagggaagtgctgtgtgtgtctaccatctgagtgacatccaaaccgtgtttaatggcccattcgcccacaaggagggccctaaccatcaattaattagctaccagggcagaattccatatccaaggcctgggacctgtccaggtggtgctttcactccgaacatgcgaaccactaaagagttccccgacgatgtggtcacattcatccgcaaccaccccttgatgtataattcaatctaccctatccataaacggcctctcattgtcaggatagggactgactataagtatacaaaaatagctgtcgatcgggtgaacgccgcagatggtagataccacgtgttgttcctgggaacagaccgaggaacagtccaaaaagtggtcgttctgcctaccaataattccgtcagcggggagcttatcctggaggagctggaggtatttaaaaatcatgcacccattaccaccatgaagattagcagcaaaaaacagcagctgtacgtgtcctccaacgagggggtttctcaagtgagtctccacagatgtcatatttatggtactgcctgtgctgactgctgcttggccagagatccttattgcgcgtgggatggccatagctgttccagattctaccccactggtaagagaagatctcgcaggcaggacgttcgacacgggaatccattgactcagtgtagggggtttaacctgaaggcctacaggaacgctgcagaaattgtccagtacggagttaagaataacaccactttcctggaatgcgcgccaaaaagccctcaagctagcatcaagtggcttttgcagaaggataaagatcggaggaaggaagtcaagttaaacgagcgcatcatagcgacttcccagggtctgctcatccggtctgtccagggttctgatcagggactgtaccactgtatcgcaaccgagaacagctttaaacagacaattgcaaaaattaacttcaaagtactggacagtgagatggtggcggttgttactgacaaatggtcaccttggacttgggcctcctccgttcgagccctgccattccacccgaaggatatcatgggtgccttctctcattctgagatgcaaatgatcaaccagtattgtaaagataccaggcagcagcaccaacagggagatgaaagccagaagatgcggggagattatggaaaactcaaagccctcatcaatagccgcaagtcccgtaacagacgtaaccagctgccagagtcgtag

SEQ ID NO: 164423 - DNA, 2310 bp, Artificial Sequence
  derived and/or modified sequence
atgctgtctaagaaaggaatattcccctggatcctgacctgcattagcgaagagatggcattccggaccatttgcgtgctggtaggcgtttttatttgctcgatttgcgttaagggaagcagccagccccaggcacgagtatacctcacttttgatgaactgcgggaaaccaagacctcagagtacttctctctgagccaccatccactggactatcgaatattgctgatggatgaggaccaggacagaatctatgtgggaagcaaagatcatattctaagtctaaacattaacaacatttcccaggaagccctgtctgtgttttggcctgcaagcactatcaaggtggaagagtgtaagatggccggtaaagacccaacccacgggtgtgggaatttcgtgcgggtgatccagaccttcaaccggacccatctctacgtttgcggatccggagccttcagcccagtgtgtacatatctgaatcggggacgcaggagcgaagaccaggtcttcatgatcgacagcaagtgcgagagtggtaagggtcgatgttccttcaacccgaacgtgaacacagtttccgtcatgattaacgaggaactgttcagtgggatgtacatagatttcatggggacggacgcggcaatttttagatcgctcaccaaaaggaatgccgtgcgaactgatcagcacaactcaaaatggttaagcgagcctatgttcgtggacgctcacgtgataccggacggtacggaccccaacgacgccaaggtgtattttttcttcaaagagaagcttactgacaataaccgctcgactaagcaaatacactccatgattgcccgaatctgcccgaacgatacaggcggtctccgcagcctagtgaacaaatggacaacttttctgaaggcacgtcttgtgtgctccgtgacagacgaagacggcccagagactcatttcgatgaattagaagacgtcttcctccttgaaaccgacaaccctcgcacaaccctcgtgtacggcatattcacgacatctagctccgtgtttaagggatcagccgtgtgtgtctaccacctctcagacatccagactgtgtttaacggacctttcgctcacaaagaaggccctaaccatcaacttattagctaccagggacgcattccttaccccagacctggcacttgcccgggtggggcttttactcctaatatgcgtaccacgaaagagttcccagatgatgttgtgacctttattcgcaatcaccccttgatgtataattctatttacccaatccataaaaggccactcattgtgcggataggcacagattacaaatatactaagatcgccgtggatagggtgaatgctgcagacggtcgttatcacgtgctattcctggggacagatcggggtacagtccagaaggtagtagtgttgcctaccaataactccgtctcaggggagctcatcctggaagaattggaagtcttcaaaaaccatgctcctatcacaacaatgaagatatcatctaagaagcagcaactttacgtcagtagcaatgaaggggtctcacaagtgtcattacatcgttgtcatatctacggcacggcgtgcgctgactgttgtctggccagggatccttactgtgcttgggacggacacagctgttcacgcttctacccaaccgggaagcggagaagcaggagacaggatgttcggcacggaaacccactgacacagtgtcgcggattcaacctgaaagcgtataggaacgccgctgaaatagtccagtacggcgtgaagaataataccactttcttagagtgtgccccaaagtcaccacaggcctctattaaatggctgctgcagaaggacaaggaccgacgcaaagaggtcaagctgaatgagcgaattatagcgacatcccaaggcctgctgatccgatccgtccaggggtctgaccagggactgtaccattgcattgccaccgagaacagcttcaaacagaccattgcaaaaataaacttcaaggtgctagactccgagatggtggcagtggtgaccgacaagtggtctccgtggacgtgggcttcaagcgttagagcccttcccttccaccccaaggacatcatgggggctttctctcacagtgaaatgcaaatgattaaccaatactgcaaggatactagacagcaacaccagcagggcgatgagtcccagaagatgcgcggtgactatggcaagctaaaggccctcattaattcaaggaagtctcgcaatcgaagaaaccagctgcccgagtcctag

SEQ ID NO: 164424 - DNA, 2415 bp, Artificial Sequence
  derived and/or modified sequence
acagttcaggaaacttaaaaggatggcatatggaagttgagtgaaggagaaagagagggaagtagaaaagaggagaaaaatgttaagcaaaaaaggtattttcccttggatattaacttgcatatctgaagaaatggcattccggacaatttgcgtgttggttggagtatttatttgttctatctgtgtgaaaggatcttcccagccccaagcaagagtttatttaacatttgatgaacttcgagaaaccaagacctctgaatacttcagcctttcccaccatcctttagactacaggattttattaatggatgaagatcaggaccggatatatgtgggaagcaaagatcacattctttccctgaatattaacaatataagtcaagaagctttgagtgttttctggccagcatctacaatcaaagttgaagaatgcaaaatggctggcaaagatcccacacacggctgtgggaactttgtccgtgtaattcagactttcaatcgcacacatttgtatgtctgtgggagtggcgctttcagtcctgtctgtacttacttgaacagagggaggagatcagaggaccaagttttcatgattgactccaagtgtgaatctggaaaaggacgctgctctttcaaccccaacgtgaacacggtgtctgttatgatcaatgaggagcttttctctggaatgtatatagatttcatggggacagatgctgctatttttcgaagtttaaccaagaggaatgcggtcagaactgatcaacataattccaaatggctaagtgaacctatgtttgtagatgcacatgtcatcccagatggtactgatccaaatgatgctaaggtgtacttcttcttcaaagaaaaactgactgacaataacaggagcacgaaacagattcattccatgattgctcgaatatgtcctaatgacactggtggactgcgtagccttgtcaacaagtggaccactttcttaaaggcgaggctggtgtgctcggtaacagatgaagacggcccagaaacacactttgatgaattagaggatgtgtttctgctggaaactgataacccgaggacaacactagtgtatggcatttttacaacatcaagctcagttttcaaaggatcagccgtgtgtgtgtatcatttatctgatatacagactgtgtttaatgggccttttgcccacaaagaagggcccaatcatcagctgatttcctatcagggcagaattccatatcctcgccctggaacttgtccaggaggagcatttacacccaatatgcgaaccaccaaggagttcccagatgatgttgtcacttttattcggaaccatcctctcatgtacaattccatctacccaatccacaaaaggcctttgattgttcgtattggcactgactacaagtatacaaagatagctgtggatcgagtgaacgctgctgatgggagataccatgtcctgtttctcggaacagatcggggtactgtgcaaaaagtggttgttcttcctactaacaactctgtcagtggcgagctcattctggaggagctggaagtctttaagaatcatgctcctataacaacaatgaaaatttcatctaaaaagcaacagttgtatgtgagttccaatgaaggggtttcccaggtatctctgcaccgctgccacatctatggtacagcctgtgctgactgctgcctggcgcgggacccttattgcgcctgggatggccattcctgttccagattctacccaactgggaaacggaggagccgaagacaagatgtgagacatggaaacccactgactcaatgcagaggatttaatctaaaagcatacagaaatgcagctgaaattgtccagtatggagtaaaaaataacaccacttttctggagtgtgcccccaagtctccgcaggcatctatcaagtggctgttacagaaagacaaagacaggaggaaagaggttaagctgaatgaacgaataatagccacttcacagggactcctgatccgctctgttcagggttctgaccaaggactttatcactgcattgctacagaaaatagtttcaagcagaccatagccaagatcaacttcaaagttttagattcagaaatggtggctgttgtgacggacaaatggtccccatggacctgggccagctctgtgagggctttacccttccacccgaaggacatcatgggggcattcagccactcagaaatgcagatgattaaccaatattgcaaagacactcggcagcaacatcagcagggagatgaatcacagaaaatgagaggggactatggcaagttaaaggccctcatcaatagtcggaaaagtagaaacaggaggaatcagttgccagagtcataatattttcttatgtgggtcttatgctt

SEQ ID NO: 164425 - DNA, 2256 bp, Artificial Sequence
  derived and/or modified sequence
atggctttccgaaccatctgcgtgctggtgggcgtgttcatttgttccatatgcgttaagggaagcagccagcctcaggcccgcgtttaccttacattcgacgagcttcgggaaacaaagacctcagagtacttctccttatcccaccaccctttggactaccggatattattaatggatgaagaccaggaccgcatctacgtgggatccaaagatcatatcttgtccctgaacatcaacaacatctctcaggaagccctgagtgtattctggcctgctagcactattaaagtcgaggaatgtaagatggccggaaaggatccgacacacgggtgcggaaacttcgtaagggtcattcaaacctttaaccggacccatttatacgtatgcggttcaggcgccttttctcccgtctgcacttatctcaatcgaggccgcaggtcagaggatcaggttttcatgatcgattccaagtgcgaatccggaaaaggcagatgtagctttaatccgaacgtaaatacagtctccgtgatgattaacgaagaacttttcagcggaatgtatattgattttatgggcacagatgccgctattttccgctccctgacaaagcgtaacgcagtgcgaaccgaccagcacaactcaaaatggctctccgagcctatgttcgtagacgcacatgtgatcccagacggaaccgaccccaacgacgccaaggtgtacttcttcttcaaggaaaaactgactgataataatcgcagcacaaagcagatccatagcatgatcgcgcgcatctgtcccaacgatactggtgggcttagatcactagtgaataaatggacaacctttctgaaagcaaggctagtgtgctccgtgactgatgaagatggcccagaaacacatttcgacgagctggaagacgtattcctgttagagaccgataatccaagaactaccctcgtgtatggcattttcactacgtcttcatctgtgtttaagggatcagccgtgtgcgtgtaccacctgagcgacatccagacagtgtttaatggcccttttgcccacaaggagggacccaatcaccagctgatttcctatcagggccgcattccatacccaagaccaggaacatgcccaggtggagctttcacgcccaatatgagaacgaccaaagagttccctgatgatgttgtaacgtttatccgtaaccatccccttatgtacaattcaatttatccgattcacaagcggcctctgatcgtcagaattggaaccgattataagtataccaagatagcggttgacagggtgaacgctgccgacggtaggtatcacgtcctgttcctggggactgatagagggaccgtccagaaagtggtagtcctccctacgaataattccgttagcggagaactcatactggaggagctggaggtattcaagaaccatgcaccaatcacgaccatgaagatctcgtctaagaaacagcagctgtacgtatcgagtaatgagggcgttagccaggtgtcactgcataggtgccatatctatggtacagcgtgtgcagactgctgtctggctagagacccctactgcgcgtgggatggccatagctgctcacgtttctacccaaccgggaaacgtaggtctaggaggcaggacgtgcgacatggaaaccccctaacccagtgtcgaggctttaacctgaaagcttataggaatgctgccgagatcgtccaatacggagtgaaaaataacactaccttcctggagtgtgcacctaaaagtccccaagcttccataaaatggctgctacagaaagacaaggatagacgaaaggaagtcaagctcaacgagagaatcatcgctactagccaaggtttgctcatcagatcagtgcagggctccgaccaggggctctaccactgcattgcaaccgaaaactccttcaaacaaacaattgccaaaattaattttaaagttctcgatagcgagatggttgccgttgttactgacaaatggtccccatggacttgggcttcctctgtccgcgccttaccattccatcctaaggatataatgggagcctttagccatagcgaaatgcaaatgatcaaccagtattgcaaagacacacggcagcagcaccagcagggagacgagtctcagaagatgcgcggagactacggaaagctgaaggcactaataaactcgaggaagtctcggaaccggaggaatcaattgccagagagctag

SEQ ID NO: 164426 - DNA, 2256 bp, Artificial Sequence
  derived and/or modified sequence
atggcatttaggaccatctgtgtgctcgtgggcgtgtttatctgttccatttgtgtgaaaggttccagccagcctcaggccagggtgtacctcaccttcgatgagttaagagagactaaaacttccgaatacttttcactgtcacatcacccactggattatagaattctgctcatggatgaggaccaagacagaatttacgtcggaagcaaggatcatatcttgtccctcaatataaacaacatatcacaagaggctctgagcgtattttggcctgcatcgacaatcaaagtggaagaatgtaagatggcagggaaagatccaactcatggttgtggtaattttgtaagagtaattcaaacatttaacagaactcacctatacgtctgcggttccggtgcattcagcccagtttgcacgtatctgaacagagggcggcgcagcgaggatcaagtttttatgatcgactctaagtgtgagtccggaaaaggaaggtgttcatttaaccccaacgttaacaccgtgagtgtaatgatcaacgaggaactctttagcggcatgtacattgactttatgggtactgatgcagctatatttcggtcactgaccaagcgcaacgccgtgaggacagatcaacataacagcaaatggttgagtgaacctatgtttgtggacgcacacgttatccccgacggaacagaccctaacgatgctaaggtctactttttctttaaggaaaaacttaccgataacaaccggtctacgaagcagatccattccatgattgcccgcatctgccctaatgatactggcggcttgcggtcgctcgtgaataaatggaccacttttctgaaagctagattggtctgcagcgtcaccgacgaggatggaccggagacccacttcgatgaactcgaggatgtgtttcttcttgaaacagacaatcccagaactacgttagtgtatggaattttcacaactagctccagcgtgtttaaaggcagcgccgtatgtgtgtaccacctgagcgatatccaaacagttttcaatggacccttcgcccataaggagggcccaaaccatcagttgatttcatatcaggggaggattccttacccaagaccaggcacctgccctggcggagccttcacccccaacatgaggaccaccaaggagttcccagatgacgtagtgacctttatcagaaaccacccccttatgtacaactccatatatcccattcacaaaaggcctctgatcgtgcgaatagggaccgattataaatataccaagattgctgtcgaccgggttaatgcagccgacggccgttaccatgtactcttcttaggaacggataggggaaccgtacagaaggtcgtcgtcctgccaacgaataattcagtaagtggagagctgatcctagaggagctggaggtttttaagaatcacgcaccaattaccaccatgaagatttcctctaagaagcagcagctgtacgtgagtagtaatgaaggcgtcagtcaagtctcattgcacagatgccatatttacggcacagcctgtgcagactgttgcctggcgagagacccatactgtgcatgggatggacacagctgctcacgattctatcctaccggtaagcgaagatcccgcaggcaggacgtccgccacggcaacccattgacccaatgccgtggctttaatctgaaggcttaccgcaatgccgccgagatcgtccagtacggcgttaagaacaacactacttttctggagtgcgctccgaagtccccgcaggctagcattaagtggctactccagaaggataaggatcggcggaaagaggtgaagcttaacgagagaattattgccacctctcaggggcttctgattcgcagcgtgcagggttcagatcaggggctataccactgcattgctaccgaaaattcttttaaacaaactattgccaagatcaactttaaggttttggatagcgaaatggtcgccgtggtaaccgacaagtggtcaccctggacctgggcctctagtgtcagagcccttcctttccaccccaaagacataatgggcgctttcagccattccgaaatgcagatgattaatcagtactgtaaggacactcgacaacaacaccaacagggtgatgagagccagaagatgaggggggattacggcaagttaaaagctctcatcaatagtcgtaagagtcggaatcgaagaaatcaactgcctgaaagctag

SEQ ID NO: 164427 - DNA, 2310 bp, Artificial Sequence
  derived and/or modified sequence
atgttgagtaaaaagggaattttcccgtggattctgacttgtatcagtgaagaaatggcctttcggactatctgtgttctggtgggtgtgtttatctgctccatatgtgtgaaaggctcaagtcaacctcaggcccgagtctacctgacatttgatgaactgcgcgaaactaagacctctgagtatttttcattgtctcatcaccctctggactatcggatcctcctaatggacgaggatcaggaccgaatctatgtggggtccaaggatcacattttgtcgctcaacataaataacatctcacaggaagccctttccgttttttggcctgcaagcacaatcaaagtggaggaatgcaagatggccggcaaggacccaactcacggctgcggaaatttcgtgcgagttattcagacctttaataggacccacctgtacgtctgtggatccggcgccttcagtccagtgtgtacctatctgaatcgaggccgtcgtagtgaggatcaggtgttcatgatagactctaagtgtgagtcgggtaaaggcaggtgtagtttcaaccccaacgtgaacacggttagtgttatgattaacgaagaactcttcagcggaatgtatattgattttatgggtaccgatgcagctatctttcgttcactgacaaagcgtaacgcagtgcgcacagaccagcataattctaaatggctgagtgagccgatgttcgtggatgcccatgtgattcccgatggcacagaccccaacgatgccaaagtttacttcttttttaaggaaaaattgacggacaacaaccgcagtacaaaacaaattcatagcatgatcgcccgcatctgccctaacgacaccggtggacttcgctcccttgtaaacaaatggaccacctttctgaaggctagattggtgtgttctgtaacagatgaagacggccccgagactcacttcgatgaactagaagacgtgttcctgctcgaaaccgataaccctcggaccacccttgtgtacggcatattcaccacttcttcttcagtttttaagggctccgctgtttgcgtgtaccacctctcggatatccaaaccgtctttaatggtccattcgcccataaagaaggtccaaaccatcaactcattagttaccaaggacgaattccatatccacgtcccggcacctgcccaggaggagccttcacccccaacatgcgaacaactaaggaatttcctgacgacgtagtcacgttcataaggaaccaccccctaatgtacaacagcatctatccaatccacaagaggcccctaatcgtcaggatcggcacagactacaagtatacaaagattgcagttgaccgggtcaatgcggccgacggcaggtatcacgtgctctttctgggcacagaccgcggcactgtccagaaagtggttgtcttacccacaaacaactcagtcagcggagaactgatcctggaagaactggaggtctttaaaaatcacgcacccattaccaccatgaagatttcttcaaaaaaacagcagctctacgtatcctcaaatgaaggcgtgtcccaagtctccctccatcgctgccacatttacgggactgcctgtgccgattgttgcctggccagagacccgtactgtgcctgggatggacacagctgctctagattttaccctacaggcaagcgcaggtcaagaagacaagacgttagacatggcaatccccttactcagtgtagaggattcaatctgaaggcctaccggaacgcagctgaaattgtgcaatacggcgtaaaaaataacaccacattcctggagtgtgcaccgaagtctccccaagcatccattaaatggctcctgcagaaggataaggataggcgcaaggaggtcaagctcaacgaacgaattatcgctacctcacaggggcttctgattcgcagcgttcagggctctgatcagggcctgtatcactgcattgctaccgagaacagtttcaaacagaccattgcaaagattaattttaaagtgctggactccgagatggttgcagtggtgactgataaatggtctccatggacttgggcctcttcagtccgggctctacctttccacccgaaggatataatgggagccttctcccattccgagatgcagatgataaatcagtactgcaaggataccaggcagcaacaccagcagggtgacgaaagtcagaagatgcgaggcgactacggaaagcttaaagctctcatcaattcccgaaagtcccgcaatcgacgcaaccaactccctgagtcttag

SEQ ID NO: 164428 - DNA, 2256 bp, Artificial Sequence
  derived and/or modified sequence
atggcatttcgcacgatttgcgtattggtgggcgtgtttatatgctcaatctgtgtgaaaggcagttcacaaccacaggcaagggtgtatctgaccttcgatgagctaagggaaacgaaaacctcagaatactttagcctctcccaccacccgctcgattaccggatccttctcatggatgaagaccaggaccgtatatatgtcggatccaaagaccatatcctgtctctcaacattaataacattagccaagaggcattatccgtcttttggcctgcttcgacaatcaaagtagaagaatgcaagatggctggaaaagaccctacacatggatgtggcaatttcgtacgggtgattcaaacgtttaaccgcactcacttatacgtctgtgggtccggcgcattttccccggtttgtacatatctcaaccgcggaagaagatctgaggatcaagtgttcatgatcgactcgaaatgtgaatccgggaagggacgctgctcgttcaatcctaacgtcaacacagtctcagtaatgatcaacgaagagctattctccggcatgtatatcgatttcatgggaacagacgccgcaatctttagatctctaactaaaagaaatgctgttcgaactgaccaacataattctaaatggctctctgagccaatgtttgttgatgcccatgtgatacccgacggaactgacccaaacgacgccaaagtttacttcttttttaaagagaaactgactgataacaatagatcaaccaagcaaatacattctatgatcgcccgcatctgccccaacgacactgggggtttacgaagtcttgtgaacaagtggacaactttcctaaaagccaggctggtgtgctctgttactgacgaggacgggcctgagacgcatttcgacgagctggaagacgtattcctgttagagaccgataatccaagaactaccctcgtgtatggcattttcactacgtcttcatctgtgtttaagggatcagccgtgtgcgtgtaccacctgagcgacatccagacagtgtttaatggcccttttgcccacaaggagggacccaatcaccagctgatttcctatcagggccgcattccatacccaagaccaggaacatgcccaggtggagctttcacgcccaatatgagaacgaccaaagagttccctgatgatgttgtaacgtttatcagaaatcatccactgatgtacaacagcatttaccctatccacaagcgcccactcatcgtacgtataggtaccgactacaaatatacaaagatagcggttgacagggtcaacgcagccgacggcagataccatgtgctgtttctggggaccgaccgcggtaccgttcagaaagttgtagtgctaccaaccaacaacagcgtaagcggggaattaatcctggaggagctggaagtgtttaaaaatcatgccccaatcaccacaatgaaaatctcttctaaaaaacagcagctctacgtctctagtaacgaaggtgtgtcacaagtgtccctgcacagatgccatatttacggtaccgcctgcgcagattgctgtctggcccgcgacccctactgcgcatgggatgggcacagctgttcaagattctaccccactggaaagcgaaggagcagaagacaagacgttaggcacggaaacccattaacgcagtgtcgcggtttcaacctgaaggcctaccggaacgctgctgagatagtgcaatacggcgtgaaaaacaataccacgttcctcgaatgcgccccaaaatctcctcaggcttcaatcaagtggctgctacagaaagacaaggatcgccgcaaagaggtgaaattaaatgagcgcatcatagccacatcacagggtttgctgatccggtcagtgcaggggtccgatcaggggctttatcattgtattgccaccgaaaactcatttaagcaaactattgccaagatcaatttcaaggttttagacagcgagatggtagccgtggtaacagacaaatggtctccctggacatgggcatcgagtgtgcgggcccttccttttcatcctaaagacatcatgggagcattttctcactcggaaatgcagatgataaaccagtattgcaaagacactcgccagcagcatcaacagggcgatgaatcacagaagatgcgcggagattacggaaaactgaaagccctgataaacagtaggaagagcagaaacagaaggaatcagcttccagagagctag

SEQ ID NO: 164429 - DNA, 2256 bp, Artificial Sequence
  derived and/or modified sequence
atggccttcagaaccatctgcgtcctcgtgggtgtattcatttgcagcatctgcgtgaaaggaagttctcagccccaagccagagtctacctcacattcgatgaattgagagaaactaaaacttcggaatatttctccctgtcccatcatccgctggattacaggatattgctcatggacgaagaccaggacagaatatacgttggaagcaaggatcatattctgagtttaaacattaataatattagtcaagaagccttgtcagttttttggcccgcatccaccatcaaggtagaggaatgtaagatggcagggaaagatccaactcatggttgtggtaattttgtaagagtaattcaaacatttaacagaactcacctatacgtctgcggttccggtgcattcagcccagtttgcacgtatctgaacagagggcggcgcagcgaggatcaagtttttatgatcgactctaagtgtgagtccggaaaaggaaggtgttcatttaaccccaacgttaacaccgtgagtgtaatgatcaacgaggaactctttagcggcatgtacattgactttatgggtactgatgcagctatatttcggagtttaactaaacgcaacgccgtgagaaccgatcaacataacagcaaatggttatccgaaccgatgttcgtcgatgcccatgttatcccagatggcaccgacccgaatgatgcaaaggtatactttttttttaaggagaagttaacagacaacaaccggtccaccaaacagatccacagtatgatagcccgaatctgcccaaatgatacagggggcctgcgctctttggtgaacaaatggacaacattcctgaaggcccggctcgtctgcagcgtaacggacgaagacggacctgaaacgcattttgatgaactcgaagacgtgttcctgttagaaaccgacaatcccagaactactctcgtttatggcatattcaccacatcgtcttctgtctttaagggatcagccgtctgtgtttaccaccttagcgatatccagacagtctttaacgggccttttgcccataaagaaggtcctaaccatcaacttatttcttatcaggggcgcattccatacccacgtcctgggacttgtccaggcggagcgtttactcccaatatgaggacaacaaaagagttccccgacgatgttgtaacattcatcaggaatcaccctctcatgtacaattcaatatatccaatacacaaaaggccactgatcgttagaattggaactgattacaagtacactaagattgctgtcgaccgagtgaatgctgccgatggcagataccacgtcctcttcctcggtacagatcgaggaaccgtgcaaaaagttgtcgtgttgccaaccaataatagcgtttccggcgaattaatactggaagagctcgaggtattcaaaaaccatgccccaatcaccacaatgaagataagctcgaagaagcagcagctatacgtcagtagcaatgaaggagtgtcccaggtgagtctgcaccggtgccatatttacggaaccgcctgcgccgattgttgtttggctagagacccttactgtgcctgggacggtcacagctgcagtagattttacccaactggtaagcggagatccaggcgccaggacgtgcggcatggcaaccccctcacccagtgtcgtggctttaatttgaaggcttacagaaatgcagcagaaatcgttcagtatggcgtgaagaacaatacaacctttctcgagtgcgcacccaaatcacctcaggcaagcattaaatggctgcttcagaaagataaggatcggcgtaaggaggttaaattaaacgagaggattatcgccacatcccaggggttacttatacgttctgtacaagggagcgatcaaggactttaccattgtatcgccacggagaacagcttcaagcaaacaatcgcgaaaattaacttcaaagtcctagactcggagatggtggccgtcgtaacagacaagtggtccccctggacatgggcttcctctgttcgtgctctgccgtttcatccaaaagatataatgggcgccttttctcactcagagatgcagatgatcaaccagtattgtaaagatactagacaacagcaccaacagggggatgaaagtcaaaagatgagaggagattacggaaagctgaaagcactgataaatagccggaaaagtcgaaacaggaggaaccagctgccggagagctag

SEQ ID NO: 164430 - DNA, 2310 bp, Artificial Sequence
  derived and/or modified sequence
atgctcagcaagaaagggatcttcccctggatactaacctgtatatccgaggaaatggcattcagaactatctgtgttctggttggagttttcatttgtagcatctgcgtaaagggatcctctcagccccaagcgcgcgtctacctcactttcgatgaactacgtgagacgaaaacttccgaatacttcagtctatctcaccacccacttgactatcgaattctgcttatggacgaggatcaggatagaatatacgtaggaagcaaggaccatattctgagtttaaacattaataatatctcccaggaggccctcagcgtattttggcctgcttcaaccatcaaagtcgaggaatgcaagatggctggaaaggaccctacccatggctgtgggaactttgtgagagtgattcagaccttcaataggacacacctctatgtatgcggctccggcgctttttcccccgtgtgtacctacctgaatcgtggacgacggtctgaagatcaagtattcatgattgactccaagtgtgaaagtggcaagggacggtgttctttcaatcccaatgtgaatacagtttcagttatgattaatgaggagctgttcagcggaatgtatatagactttatgggtactgacgccgcaattttcagaagtcttacaaagagaaacgccgtcaggaccgaccaacacaactctaagtggctgtctgaacctatgttcgtggatgcacacgtaatacccgatggaaccgaccctaatgacgcgaaggtgtattttttctttaaggagaagctaactgataataataggagcacaaaacaaatccactctatgattgcaagaatctgccccaatgacactggagggctgcgttctctggtaaataaatggaccacatttctgaaggctagattggtgtgttctgtaacagatgaagacggccccgagactcacttcgatgaactagaagacgtgttcctgctcgaaaccgataaccctcggaccacccttgtgtacggcatattcaccacttcttcttcagtttttaagggctccgctgtttgcgtgtaccacctctcggatatccaaaccgtctttaatggtccattcgcccataaagaaggtccaaaccatcaactcattagttaccaaggacgaattccatatccacgtcccggcacctgcccaggaggagccttcacccctaacatgagaaccactaaggagtttccagacgatgtggtcacattcattcgcaaccaccccctgatgtataatagcatataccctattcacaaaagacctctgatcgttagaattgggacagattacaaatacacaaagatcgccgtagatcgggttaatgccgcagatggaaggtatcatgtgctgtttctgggcaccgacaggggcactgtgcagaaagtagtggtgttgccaaccaataatagcgtgtccggcgagcttatcctggaggaactggaagtattcaagaatcacgctccgattactactatgaagataagctcaaaaaaacagcagctgtatgtctcgtctaatgagggtgtctctcaagtgagcctccatcgctgccacatatacgggactgcctgcgctgattgctgccttgcccgggacccctactgcgcctgggatggccactcctgttcgcgcttctaccctacaggaaaaagacggtcacgtcgccaggatgtgagacacggcaaccccctgacacagtgtagagggttcaatctaaaagcctataggaacgccgctgaaattgttcaatacggggtgaaaaataacaccactttcttggaatgtgcccccaagtctccacaagcctccataaaatggcttcttcaaaaggataaagacaggcgtaaagaagtgaaattaaatgagagaatcatagcaacttcccaaggactgctgataaggtccgtccaaggctcagaccaagggctgtaccactgcattgcaactgagaactcttttaagcagactatcgcaaagatcaatttcaaggtactcgactccgaaatggtggccgtggtgacggataaatggagcccatggacctgggcctcttctgtcagagctctccccttccatccaaaagatattatgggcgccttttcccacagtgaaatgcaaatgataaatcaatattgtaaagacacccgccagcagcaccaacaaggagacgaatcccagaaaatgaggggagactacggaaagcttaaggccttgatcaactctcgtaaatcgcggaatagaaggaaccagctgcctgaaagttag

SEQ ID NO: 164431 - DNA, 5174 bp, Artificial Sequence
  derived and/or modified sequence
ggactgcgaaaggagcagggttgcggagctagggctccagcctgcggccgcgcattcttgcgtctggccagccgcgagctctaagggtcggccccgcccggtccgcccccgcggctccctgccaggctctcgcgggcgcgctcggggtggggcctcgcggctggcggagatgcggccggggctgcgcggtggtgatgcgagcctgcagggcggcgcgccggggcagccggagccgcgcgccgcggcgctgtaatcggacaccaagagcgctcgcccccggcctccggccactttccattcactccgaggtgcttgattgagcgacgcggagaagagctccgggtgccgcggcactgcagcgctgagattcctttacaaagaaactcagaggaccgggaagaaagaatttcacctttgcgacgtgctagaaaataaggtcgtctgggaaaaggactggagacacaagcgcatccaaccccggtagcaaactgatgacttttccgtgctgatttctttcaacctcggtattttcccttggatattaacttgcatatctgaagaaatggcattccggacaatttgcgtgttggttggagtatttatttgttctatctgtgtgaaaggatcttcccagccccaagcaagagtttatttaacatttgatgaacttcgagaaaccaagacctctgaatacttcagcctttcccaccatcctttagactacaggattttattaatggatgaagatcaggaccggatatatgtgggaagcaaagatcacattctttccctgaatattaacaatataagtcaagaagctttgagtgttttctggccagcatctacaatcaaagttgaagaatgcaaaatggctggcaaagatcccacacacggctgtgggaactttgtccgtgtaattcagactttcaatcgcacacatttgtatgtctgtgggagtggcgctttcagtcctgtctgtacttacttgaacagagggaggagatcagaggaccaagttttcatgattgactccaagtgtgaatctggaaaaggacgctgctctttcaaccccaacgtgaacacggtgtctgttatgatcaatgaggagcttttctctggaatgtatatagatttcatggggacagatgctgctatttttcgaagtttaaccaagaggaatgcggtcagaactgatcaacataattccaaatggctaagtgaacctatgtttgtagatgcacatgtcatcccagatggtactgatccaaatgatgctaaggtgtacttcttcttcaaagaaaaactgactgacaataacaggagcacgaaacagattcattccatgattgctcgaatatgtcctaatgacactggtggactgcgtagccttgtcaacaagtggaccactttcttaaaggcgaggctggtgtgctcggtaacagatgaagacggcccagaaacacactttgatgaattagaggatgtgtttctgctggaaactgataacccgaggacaacactagtgtatggcatttttacaacatcaagctcagttttcaaaggatcagccgtgtgtgtgtatcatttatctgatatacagactgtgtttaatgggccttttgcccacaaagaagggcccaatcatcagctgatttcctatcagggcagaattccatatcctcgccctggaacttgtccaggaggagcatttacacccaatatgcgaaccaccaaggagttcccagatgatgttgtcacttttattcggaaccatcctctcatgtacaattccatctacccaatccacaaaaggcctttgattgttcgtattggcactgactacaagtatacaaagatagctgtggatcgagtgaacgctgctgatgggagataccatgtcctgtttctcggaacagatcggggtactgtgcaaaaagtggttgttcttcctactaacaactctgtcagtggcgagctcattctggaggagctggaagtctttaagaatcatgctcctataacaacaatgaaaatttcatctaaaaagcaacagttgtatgtgagttccaatgaaggggtttcccaggtatctctgcaccgctgccacatctatggtacagcctgtgctgactgctgcctggcgcgggacccttattgcgcctgggatggccattcctgttccagattctacccaactgggaaacggaggagccgaagacaagatgtgagacatggaaacccactgactcaatgcagaggatttaatctaaaagcatacagaaatgcagctgaaattgtccagtatggagtaaaaaataacaccacttttctggagtgtgcccccaagtctccgcaggcatctatcaagtggctgttacagaaagacaaagacaggaggaaagaggttaagctgaatgaacgaataatagccacttcacagggactcctgatccgctctgttcagggttctgaccaaggactttatcactgcattgctacagaaaatagtttcaagcagaccatagccaagatcaacttcaaagttttagattcagaaatggtggctgttgtgacggacaaatggtccccatggacctgggccagctctgtgagggctttacccttccacccgaaggacatcatgggggcattcagccactcagaaatgcagatgattaaccaatattgcaaagacactcggcagcaacatcagcagggagatgaatcacagaaaatgagaggggactatggcaagttaaaggccctcatcaatagtcggaaaagtagaaacaggaggaatcagttgccagagtcataatattttcttatgtgggtcttatgcttccattaacaaatgctctgtcttcaatgatcaaattttgagcaaagaaacttgtgctttaccaaggggaattactgaaaaaggtgattactcctgaagtgagttttacacgaactgaaatgagcatgcattttcttgtatgatagtgactagcactagacatgtcatggtcctcatggtgcatataaatatatttaacttaacccagattttatttatatctttattcaccttttcttcaaaatcgatatggtggctgcaaaactagaattgttgcatccctcaattgaatgagggccatatccctgtggtattcctttcctgctttggggctttagaattctaattgtcagtgattttgtatatgaaaacaagttccaaatccacagcttttacgtagtaaaagtcataaatgcatatgacagaatggctatcaaaagaaatagaaaaggaagacagcatttaaagttgtataaaaacatgagttattcataaagagaaaatgatgagtttttatggttccaatgaaatatgttggggtttttttaagattgtaaaaataatcagttactggtatctgtcactgacctttgtttccttattcaggaagataaaaatcagtaacctaccccatgaagatatttggtgggagttatatcagtgaagcagtttggtttatattcttatgttatcaccttccaaacaaaagcacttactttttttggaagttatttattttagactcaaagaatataatctggcactactcagttattactgtttgttctcttattccctagtctgtgtggcaaattaaacaatataagaaggaaaaatttgaagtattagacttctaaataaggtgtgaaatcatcaaaaagaaaaatcaaagtagaaactactaattttttaagaggaatttataacaaatatggctagttttcaacttcagtactcaaattcaatgattcttccttttattaaaaccagtctcagatatcatactgatttttaagtcaacactatatattttatgatcttttcagtgtgatggcaaggtgcttgttatgtctagaaagtaagaaaacaatatgaggagacattctgtctttcaaaaggtaatggtacatacgttcactggtctctaagtgtaaaagtagtaaattttgtgatgaataaaataattatctcctaattgtatgttagaataattttattagaataatttcatactgaaattattttctccaaataaaaattagatggaaaaatgtgaaaaaaattattcatgctctcatatatattttaaaaacactacttttgcttttttatttaccttttaagacattttcatgcttccaggtaaaaacagatattgtaccatgtacctaatccaaatatcatataaacattttatttatagttaataatctatgatgaaggtaattaaagtagattatggcctttttaagtattgcagtctaaaacttcaaaaactaaaatcattgtcaaaattaatatgattattaatcagaatatcagaatatgattcactatttaaactatgataaattatgataatatatgaggaggcctcgctatagcaaaaatagttaaaatgctgacataacaccaaacttcattttttaaaaaatctgttgttccaaatgtgtataattttaaagtaatttctaaagcagtttattataatggtttgcctgcttaaaaggtataattaaacttcttttctcttctacattgacacacagaaatgtgtcaatgtaaagccaaaaccatcttctgtgtttatggccaatctattctcaaagttaaaagtaaaattgtttcagagtcacagttccctttatttcacataagcccaaactgatagacagtaacggtgtttagttttatactatatttgtgctatttaattctttctattttcacaattattaaattgtgtacactttcattacttttaaaaatgtagaaattcttcatgaacataactctgctgaatgtaaaagaaaattttttttcaaaaatgctgttaatgtatactactggtggttgattggttttattttatgtagcttgacaattcagtgacttaatatctattccatttgtattgtacataaaattttctagaaatacacttttttccaaagtgtaagtttgtgaatagattttagcatgatgaaactgtcataatggtgaatgttcaatctgtgtaagaaaacaaactaaatgtagttgtcacactaaaatttaattggatattgatgaaatcattggcctggcaaaataaaacatgttgaattcccca

SEQ ID NO: 164432 - DNA, 2256 bp, Artificial Sequence
  derived and/or modified sequence
atggccttcagaaccatctgcgtgctggtgggcgtgttcatctgcagcatctgcgtgaagggcagcagccagccccaggccagagtgtacctgaccttcgacgagctgagagagaccaagaccagcgagtacttcagcctgagccaccaccccctggactacagaatcctgctgatggacgaggaccaggacagaatctacgtgggcagcaaggaccacatcctgagcctgaacatcaacaacatcagccaggaggccctgagcgtgttctggcccgccagcaccatcaaggtggaggagtgcaagatggccggcaaggaccccacccacggctgcggcaacttcgtgagagtgatccagaccttcaacagaacccacctgtacgtgtgcggcagcggcgccttcagccccgtgtgcacctacctgaacagaggcagaagaagcgaggaccaggtgttcatgatcgacagcaagtgcgagagcggcaagggcagatgcagcttcaaccccaacgtgaacaccgtgagcgtgatgatcaacgaggagctgttcagcggcatgtacatcgacttcatgggcaccgacgccgccatcttcagaagcctgaccaagagaaacgccgtgagaaccgaccagcacaacagcaagtggctgagcgagcccatgttcgtggacgcccacgtgatccccgacggcaccgaccccaacgacgccaaggtgtacttcttcttcaaggagaagctgaccgacaacaacagaagcaccaagcagatccacagcatgatcgccagaatctgccccaacgacaccggcggcctgagaagcctggtgaacaagtggaccaccttcctgaaggccagactggtgtgcagcgtgaccgacgaggacggccccgagacccacttcgacgagctggaggacgtgttcctgctggagaccgacaaccccagaaccaccctggtgtacggcatcttcaccaccagcagcagcgtgttcaagggcagcgccgtgtgcgtgtaccacctgagcgacatccagaccgtgttcaacggccccttcgcccacaaggagggccccaaccaccagctgatcagctaccagggcagaatcccctaccccagacccggcacctgccccggcggcgccttcacccccaacatgagaaccaccaaggagttccccgacgacgtggtgaccttcatcagaaaccaccccctgatgtacaacagcatctaccccatccacaagagacccctgatcgtgagaatcggcaccgactacaagtacaccaagatcgccgtggacagagtgaacgccgccgacggcagataccacgtgctgttcctgggcaccgacagaggcaccgtgcagaaggtggtggtgctgcccaccaacaacagcgtgagcggcgagctgatcctggaggagctggaggtgttcaagaaccacgcccccatcaccaccatgaagatcagcagcaagaagcagcagctgtacgtgagcagcaacgagggcgtgagccaggtgagcctgcacagatgccacatctacggcaccgcctgcgccgactgctgcctggccagagacccctactgcgcctgggacggccacagctgcagcagattctaccccaccggcaagagaagaagcagaagacaggacgtgagacacggcaaccccctgacccagtgcagaggcttcaacctgaaggcctacagaaacgccgccgagatcgtgcagtacggcgtgaagaacaacaccaccttcctggagtgcgcccccaagagcccccaggccagcatcaagtggctgctgcagaaggacaaggacagaagaaaggaggtgaagctgaacgagagaatcatcgccaccagccagggcctgctgatcagaagcgtgcagggcagcgaccagggcctgtaccactgcatcgccaccgagaacagcttcaagcagaccatcgccaagatcaacttcaaggtgctggacagcgagatggtggccgtggtgaccgacaagtggagcccctggacctgggccagcagcgtgagagccctgcccttccaccccaaggacatcatgggcgccttcagccacagcgagatgcagatgatcaaccagtactgcaaggacaccagacagcagcaccagcagggcgacgagagccagaagatgagaggcgactacggcaagctgaaggccctgatcaacagcagaaagagcagaaacagaagaaaccagctgcccgagagctag

SEQ ID NO: 164433 - DNA, 2310 bp, Artificial Sequence
  derived and/or modified sequence
atgctgagcaagaagggcatcttcccctggatcctgacctgcatcagcgaggagatggccttcagaaccatctgcgtgctggtgggcgtgttcatctgcagcatctgcgtgaagggcagcagccagccccaggccagagtgtacctgaccttcgacgagctgagagagaccaagaccagcgagtacttcagcctgagccaccaccccctggactacagaatcctgctgatggacgaggaccaggacagaatctacgtgggcagcaaggaccacatcctgagcctgaacatcaacaacatcagccaggaggccctgagcgtgttctggcccgccagcaccatcaaggtggaggagtgcaagatggccggcaaggaccccacccacggctgcggcaacttcgtgagagtgatccagaccttcaacagaacccacctgtacgtgtgcggcagcggcgccttcagccccgtgtgcacctacctgaacagaggcagaagaagcgaggaccaggtgttcatgatcgacagcaagtgcgagagcggcaagggcagatgcagcttcaaccccaacgtgaacaccgtgagcgtgatgatcaacgaggagctgttcagcggcatgtacatcgacttcatgggcaccgacgccgccatcttcagaagcctgaccaagagaaacgccgtgagaaccgaccagcacaacagcaagtggctgagcgagcccatgttcgtggacgcccacgtgatccccgacggcaccgaccccaacgacgccaaggtgtacttcttcttcaaggagaagctgaccgacaacaacagaagcaccaagcagatccacagcatgatcgccagaatctgccccaacgacaccggcggcctgagaagcctggtgaacaagtggaccaccttcctgaaggccagactggtgtgcagcgtgaccgacgaggacggccccgagacccacttcgacgagctggaggacgtgttcctgctggagaccgacaaccccagaaccaccctggtgtacggcatcttcaccaccagcagcagcgtgttcaagggcagcgccgtgtgcgtgtaccacctgagcgacatccagaccgtgttcaacggccccttcgcccacaaggagggccccaaccaccagctgatcagctaccagggcagaatcccctaccccagacccggcacctgccccggcggcgccttcacccccaacatgagaaccaccaaggagttccccgacgacgtggtgaccttcatcagaaaccaccccctgatgtacaacagcatctaccccatccacaagagacccctgatcgtgagaatcggcaccgactacaagtacaccaagatcgccgtggacagagtgaacgccgccgacggcagataccacgtgctgttcctgggcaccgacagaggcaccgtgcagaaggtggtggtgctgcccaccaacaacagcgtgagcggcgagctgatcctggaggagctggaggtgttcaagaaccacgcccccatcaccaccatgaagatcagcagcaagaagcagcagctgtacgtgagcagcaacgagggcgtgagccaggtgagcctgcacagatgccacatctacggcaccgcctgcgccgactgctgcctggccagagacccctactgcgcctgggacggccacagctgcagcagattctaccccaccggcaagagaagaagcagaagacaggacgtgagacacggcaaccccctgacccagtgcagaggcttcaacctgaaggcctacagaaacgccgccgagatcgtgcagtacggcgtgaagaacaacaccaccttcctggagtgcgcccccaagagcccccaggccagcatcaagtggctgctgcagaaggacaaggacagaagaaaggaggtgaagctgaacgagagaatcatcgccaccagccagggcctgctgatcagaagcgtgcagggcagcgaccagggcctgtaccactgcatcgccaccgagaacagcttcaagcagaccatcgccaagatcaacttcaaggtgctggacagcgagatggtggccgtggtgaccgacaagtggagcccctggacctgggccagcagcgtgagagccctgcccttccaccccaaggacatcatgggcgccttcagccacagcgagatgcagatgatcaaccagtactgcaaggacaccagacagcagcaccagcagggcgacgagagccagaagatgagaggcgactacggcaagctgaaggccctgatcaacagcagaaagagcagaaacagaagaaaccagctgcccgagagctag

SEQ ID NO: 164434 - DNA, 2256 bp, Artificial Sequence
  derived and/or modified sequence
atggcctttcgtaccatctgcgtcctggtcggcgtgttcatttgctctatttgtgttaaaggctctagccagccccaggcccgggtctacttaactttcgacgaactgcgggagacgaaaacttctgagtattttagtctgtcccatcacccactggattaccggatcctgttgatggacgaagaccaggatagaatttatgttggctctaaagaccacatactgtcattgaatatcaataatattagccaggaggccctttcagtattttggccagcttcaaccatcaaagtggaggagtgtaagatggccggcaaggacccaactcacggctgtggcaatttcgtcagggtcatacagacctttaaccggactcacctctatgtgtgcggttctggtgctttcagccccgtctgtacatatctgaatcgcggtagaagatctgaagatcaggtctttatgatcgacagtaagtgtgagagcggcaaaggcagatgtagtttcaacccaaacgtgaataccgtaagcgtgatgattaacgaggaactattttctgggatgtatatcgatttcatgggcaccgatgccgccatctttcgttcacttacaaagagaaacgcagtgcgcactgaccagcacaactccaaatggctaagcgagccaatgtttgttgacgcccacgtcataccggatggtaccgatcccaatgacgcaaaggtgtattttttctttaaagaaaaactaaccgacaacaaccgcagcaccaagcagatccacagcatgattgcacgtatctgtcccaacgatacaggtggcctccggtcactggttaataaatggacgaccttcctgaaggcccggttggtgtgtagtgtcaccgacgaggatggaccagaaactcacttcgatgagctggaagatgtgttcctgctagaaaccgataacccacgaacaacattggtatacgggatctttaccacttcgtccagcgtgttcaaaggaagtgcggtatgcgtgtaccacctgtccgacatccagaccgtattcaatggaccatttgcacacaaggagggtcctaaccaccagctgatctcttaccagggacggatcccttacccccgacctgggacgtgccctggcggggcgtttactcccaatatgcgaacgacaaaagaatttcccgatgatgtggtgacgtttatccgtaatcatccactgatgtacaacagcatctatccaattcacaagagacctttgattgtaagaattgggacggattacaaatatacaaagatcgccgtggaccgcgtgaacgcggcagacggccgatatcacgtgctgttcttaggaaccgatcgtgggaccgtgcagaaggtcgtggttctccccacaaacaattccgtgagtggtgagcttatactggaagagctggaggtgtttaagaaccatgctccgatcacaaccatgaaaataagttccaaaaaacaacagctctatgtgtctagcaacgagggcgtctcacaggtttccttgcacaggtgtcatatctacggaaccgcctgtgcagattgttgcttagcccgcgacccctactgtgcttgggacgggcattcatgttcaaggttctaccctacaggcaagcggcgctcaaggcggcaggatgtgaggcatggtaatcctctaacacagtgtcgcggttttaatttgaaagcatatcggaatgcagccgagatcgtacagtacggcgtaaagaacaataccactttcctcgaatgcgcccccaagtccccgcaggctagcataaagtggctgttgcaaaaggacaaagatagaaggaaggaagttaagcttaacgagcggataatcgccacaagccaaggcctgcttatcagaagcgttcaagggtccgatcaaggactgtaccactgtatagctaccgagaacagttttaagcagaccatcgcgaagattaactttaaagtgcttgactctgagatggtcgctgtcgtcaccgacaaatggagcccttggacctgggctagcagtgtgagagctctgccttttcaccccaaggacatcatgggggcattctctcactccgaaatgcagatgatcaatcagtattgcaaggatacaagacagcagcaccagcagggcgacgagtcacagaaaatgaggggggattacggtaagcttaaagcgttgataaatagcagaaaatcacgaaataggcggaaccagttgcccgagtcgtag

SEQ ID NO: 164435 - DNA, 2256 bp, Artificial Sequence
  derived and/or modified sequence
atggcgtttcgcacaatttgcgtgctggtgggggtttttatctgttcaatatgtgttaaaggcagtagtcagccccaggcccgagtgtatctgacatttgacgaacttcgagagaccaaaacgtctgaatatttttcccttagccatcatccgcttgattacagaatcttgttgatggatgaagatcaagatcgtatctacgtcggctctaaggaccacatcctgtcactgaatattaacaacatcagccaagaggcactgtcagtcttctggccagcatccaccattaaagtagaagaatgcaagatggcagggaaggatcctacccacggatgcggaaactttgtccgcgtaatccagacgtttaacagaacacacctgtatgtgtgtggctcaggcgctttttccccagtgtgtacctacttgaaccgcggtagaaggagtgaggaccaggtcttcatgattgattctaagtgcgaatccggaaaaggcaggtgctccttcaaccccaacgtgaacacagtctccgttatgatcaacgaggaactgttcagcgggatgtatatcgactttatggggaccgatgcagcgatcttccgtagcctgaccaaaagaaatgctgttagaacagaccagcacaacagcaagtggcttagcgaaccgatgtttgtcgatgcccacgtgattcccgatgggactgaccccaatgacgccaaggtgtacttcttttttaaggagaagctgactgataacaatcggtcaacaaagcagatccatagcatgatcgcgcgtatttgccccaacgacacggggggacttaggtccctcgtgaataaatggacaacattcttaaaggctagactggtgtgttctgtcacagatgaggatggccctgagacccatttcgacgagctggaggatgtgttccttttggaaactgacaatccacgaaccaccttagtttacggcattttcacaacctcctcgagcgtgttcaaggggtctgctgtgtgcgtgtaccatctttcggacattcaaacagttttcaacggcccgtttgcacataaggagggcccgaaccatcagttgatctcttatcagggccgtataccctatcctcgacccggaacatgcccaggaggagccttcacccctaacatgagaacaactaaggaatttccggatgatgtggtcacattcattaggaaccatcctcttatgtataattctatttacccgattcacaaacggccattgattgtccggattggaaccgactataagtacactaaaattgccgtggatagagttaatgccgctgatggcaggtatcacgtcttgttcctgggaacggacagagggaccgtacagaaagtagtagtactgcccacaaacaattcagtttccggggaattaatcctcgaagaattggaggtattcaagaaccatgcccctattactaccatgaaaatctctagcaaaaagcagcagctctacgtatcttcaaacgagggggtgagccaggtctcactacataggtgccacatctacggaaccgcctgtgcagattgctgtctagcacgggatccttactgcgcatgggacggacatagttgctctcggttttaccctaccggcaagcggcgtagtagacgacaagatgtgaggcacggtaacccactcactcagtgccggggctttaacctgaaggcctatagaaatgccgctgagattgttcagtacggcgtgaaaaataatacaacatttctcgagtgcgctcccaagagtccgcaagctagtatcaaatggcttcttcaaaaagataaggacagacggaaggaagttaagctgaatgaaaggatcattgccacctcgcaaggtctcctgatcagatccgtccaaggatcagatcagggtctctaccattgtatagccacggagaatagtttcaagcagacaatcgcaaagatcaatttcaaggtgctggatagtgagatggtggcagtggtgactgacaaatggagcccatggacttgggctagctccgttagggccttgccttttcaccccaaagacatcatgggcgctttctctcactcagagatgcaaatgataaaccagtactgcaaggacacccgacagcagcatcagcagggtgacgaatcccagaagatgcggggagactatggaaaacttaaggccctgatcaactcacgtaagagccgcaacaggcggaaccagctgcctgagtcatag

SEQ ID NO: 164436 - DNA, 2310 bp, Artificial Sequence
  derived and/or modified sequence
atgttaagcaaaaagggtatctttccttggatattgacctgcatttccgaggaaatggcctttcggacaatttgtgtgttggtgggggtgtttatttgttccatctgtgtcaaagggagctctcagccccaggcccgagtgtacttaacctttgatgagcttcgagaaacaaagacctctgagtacttttccctctcccaccacccacttgattaccgaatcttacttatggatgaggaccaggacaggatttatgtgggatcaaaggatcatatcctatcactgaatattaataacatttcccaagaagccttgagtgtgttttggccagcctcgaccataaaagttgaggagtgcaagatggccggaaaagaccctacccatggctgcggaaactttgttagagttattcagacattcaatagaacccatctgtatgtgtgcggatccggtgcgttctctccagtttgtacatatctgaaccggggacgccgtagcgaggatcaggtcttcatgatcgattccaagtgtgagtctggaaaaggccggtgcagctttaatcccaatgttaacactgttagcgtgatgattaatgaggagctcttcagcggtatgtatatcgactttatgggcacggacgcagccatttttaggagcctgactaaacgcaatgccgtccggactgatcaacacaatagtaagtggctaagcgaaccaatgttcgtcgacgcacacgtcattccagatggcaccgatcctaacgacgccaaagtctactttttctttaaggagaaacttactgataacaatcgcagcacaaaacagattcacagcatgattgccagaatctgccccaacgacacaggcgggctaagatctttggtgaataaatggacaacgttcctgaaagctcggctggtgtgctccgtgactgacgaagatggcccagaaactcacttcgacgagctagaggacgtattcctgctggagactgataaccctagaaccactctggtttacggaatcttcaccacatcttctagtgtcttcaaaggctcggccgtttgcgtgtaccatctctctgatattcagacagtgtttaatggcccattcgctcacaaagagggacccaaccaccaacttatttcttaccagggccgtatcccataccctcgccctggtacttgccccggtggcgcttttacaccaaacatgcggacaaccaaagaatttcccgatgatgtcgtgacgtttattcgaaaccaccccctgatgtacaacagcatataccccatccataaacgcccgctcatcgtcagaatcggcacagactacaagtatactaagatcgctgtagatcgcgtaaatgccgccgatggtagataccacgtgctttttttgggcacagataggggcaccgtgcaaaaggtggttgttctgcccacaaataattccgtcagtggtgagttgattctcgaagagctagaggtcttcaaaaatcacgctcccatcaccaccatgaaaataagttcaaaaaaacagcagttgtacgtttcctcgaatgaaggggttagtcaagtttccctgcaccgctgtcatatttacggaacagcatgtgcagattgttgtctggctcgagacccatattgcgcctgggacggtcactcatgctcacggttctacccaacgggcaagcggaggtctcggcggcaagacgtgagacacggcaaccccctcacacagtgtcggggtttcaacttgaaagcttacaggaatgcagcggagatagtgcaatacggagtgaagaacaacaccacattcctggagtgcgccccaaagtcgccacaagcatccataaagtggttgctgcagaaagacaaagatcgacgcaaagaggtcaagttgaacgagcgcatcatcgctacatctcagggcttacttattaggtccgtgcaaggcagcgaccagggactctaccactgtatcgcaaccgagaatagcttcaaacagaccattgcaaaaatcaattttaaagtgctggactcagaaatggtggccgtggtgaccgataagtggagtccttggacctgggcatctagtgttagagcgctccctttccaccctaaagacatcatgggcgccttcagccattccgaaatgcagatgattaatcaatattgcaaagacaccagacagcaacatcagcaaggagacgagtctcagaagatgcgaggggactacggtaagctgaaagccctgattaactctagaaagtcgagaaaccgcagaaatcaactgcctgaatcatag

SEQ ID NO: 164437 - DNA, 2256 bp, Artificial Sequence
  derived and/or modified sequence
atggccttccgcaccatctgtgtgctggtgggcgtcttcatctgcagcatctgtgtgaagggcagcagccagccccaggcccgggtgtacctgacctttgatgagctgcgggagaccaagaccagcgagtacttcagcctgagccaccaccccctggactaccgcatcctgctgatggatgaggaccaggaccgcatctacgtgggcagcaaggaccacatcctgagcctgaacatcaacaacatcagccaggaggccctgagcgtcttctggccagccagcaccatcaaggtggaggagtgcaagatggccggcaaggaccccacccacggctgcggcaactttgtgcgggtcatccagaccttcaacagaacccacctgtatgtgtgtggcagcggggccttcagccctgtgtgcacctacctgaacagaggccgccgctctgaggaccaggtgttcatgattgacagcaaatgtgagagcggcaagggccgctgcagcttcaaccccaacgtgaacacagtgtctgtgatgatcaatgaggagctgttcagcggcatgtacatcgacttcatgggcacagatgctgccatcttccgcagcctgaccaagagaaatgctgtgaggacagaccagcacaacagcaagtggctgtctgagcccatgtttgtggatgcccacgtgatcccagatggaacagaccccaatgatgccaaggtgtacttcttcttcaaggagaagctgacagacaacaacagaagcaccaagcagatccacagcatgattgcccgcatctgccccaatgacaccggcggcctgcggagcctggtgaacaagtggaccaccttcctgaaggcccggctggtgtgcagcgtgacagatgaagatggccctgagacccactttgatgagctggaggatgtgttcctgctggagacagacaaccccaggaccaccctggtgtatggcatcttcaccaccagcagcagcgtcttcaagggcagcgctgtgtgtgtgtaccacctgagtgacatccagacagtgttcaacggcccctttgcccacaaggagggccccaaccaccagctgatctcctaccagggccgcatcccctaccccaggcctggcacctgccctggaggagccttcacccccaacatgaggaccaccaaggagttcccagatgatgtggtgaccttcatccggaaccaccccctgatgtacaacagcatctaccccatccacaagaggcccctcatcgtgagaattggaacagactacaagtacaccaagattgctgtggacagagtgaatgctgctgatggccgctaccacgtgctcttcctgggcacagaccggggcaccgtgcagaaggtggtggtgctgcccaccaacaacagcgtgtctggagagctgatcctggaggagctggaggtgttcaagaaccacgcccccatcaccaccatgaagatcagcagcaagaagcagcagctgtatgtgagcagcaatgaaggagtgtcccaggtgtccctgcaccgctgccacatctatggaacagcctgtgccgactgctgcctggcccgggacccctactgtgcctgggatggccacagctgcagccgcttctaccccaccgggaagaggaggagccggcggcaggatgtgagacatggcaaccccctgacccagtgccggggcttcaacctgaaggcctacagaaatgctgctgagatcgtgcagtatggagtgaagaacaacaccaccttcctggagtgtgcccccaagagcccccaggccagcatcaagtggctgctgcagaaggacaaggacaggaggaaggaggtgaagctgaatgaaagaatcatcgccaccagccagggcctgctgatccgctctgtgcagggcagtgaccagggcctgtaccactgcatcgccacagaaaattccttcaagcagaccatcgccaagatcaacttcaaggtgctggacagcgagatggtggccgtggtgacagacaagtggagcccctggacctgggccagctctgtgcgggccctgcccttccaccccaaggacatcatgggcgccttcagccacagcgagatgcagatgatcaaccagtactgcaaggacacccggcagcagcaccagcagggagatgagagccagaagatgagaggagactatggcaagctgaaggccctgatcaacagcaggaagagcaggaacagaagaaaccagctgcctgagagctag

SEQ ID NO: 164438 - DNA, 2310 bp, Artificial Sequence
  derived and/or modified sequence
atgctgagcaagaagggcatcttcccctggatcctgacctgcatcagcgaggagatggccttccgcaccatctgtgtgctggtgggcgtcttcatctgcagcatctgtgtgaagggcagcagccagccccaggcccgggtgtacctgacctttgatgagctgcgggagaccaagaccagcgagtacttcagcctgagccaccaccccctggactaccgcatcctgctgatggatgaggaccaggaccgcatctacgtgggcagcaaggaccacatcctgagcctgaacatcaacaacatcagccaggaggccctgagcgtcttctggccagccagcaccatcaaggtggaggagtgcaagatggccggcaaggaccccacccacggctgcggcaactttgtgcgggtcatccagaccttcaacagaacccacctgtatgtgtgtggcagcggggccttcagccctgtgtgcacctacctgaacagaggccgccgctctgaggaccaggtgttcatgattgacagcaaatgtgagagcggcaagggccgctgcagcttcaaccccaacgtgaacacagtgtctgtgatgatcaatgaggagctgttcagcggcatgtacatcgacttcatgggcacagatgctgccatcttccgcagcctgaccaagagaaatgctgtgaggacagaccagcacaacagcaagtggctgtctgagcccatgtttgtggatgcccacgtgatcccagatggaacagaccccaatgatgccaaggtgtacttcttcttcaaggagaagctgacagacaacaacagaagcaccaagcagatccacagcatgattgcccgcatctgccccaatgacaccggcggcctgcggagcctggtgaacaagtggaccaccttcctgaaggcccggctggtgtgcagcgtgacagatgaagatggccctgagacccactttgatgagctggaggatgtgttcctgctggagacagacaaccccaggaccaccctggtgtatggcatcttcaccaccagcagcagcgtcttcaagggcagcgctgtgtgtgtgtaccacctgagtgacatccagacagtgttcaacggcccctttgcccacaaggagggccccaaccaccagctgatctcctaccagggccgcatcccctaccccaggcctggcacctgccctggaggagccttcacccccaacatgaggaccaccaaggagttcccagatgatgtggtgaccttcatccggaaccaccccctgatgtacaacagcatctaccccatccacaagaggcccctcatcgtgagaattggaacagactacaagtacaccaagattgctgtggacagagtgaatgctgctgatggccgctaccacgtgctcttcctgggcacagaccggggcaccgtgcagaaggtggtggtgctgcccaccaacaacagcgtgtctggagagctgatcctggaggagctggaggtgttcaagaaccacgcccccatcaccaccatgaagatcagcagcaagaagcagcagctgtatgtgagcagcaatgaaggagtgtcccaggtgtccctgcaccgctgccacatctatggaacagcctgtgccgactgctgcctggcccgggacccctactgtgcctgggatggccacagctgcagccgcttctaccccaccgggaagaggaggagccggcggcaggatgtgagacatggcaaccccctgacccagtgccggggcttcaacctgaaggcctacagaaatgctgctgagatcgtgcagtatggagtgaagaacaacaccaccttcctggagtgtgcccccaagagcccccaggccagcatcaagtggctgctgcagaaggacaaggacaggaggaaggaggtgaagctgaatgaaagaatcatcgccaccagccagggcctgctgatccgctctgtgcagggcagtgaccagggcctgtaccactgcatcgccacagaaaattccttcaagcagaccatcgccaagatcaacttcaaggtgctggacagcgagatggtggccgtggtgacagacaagtggagcccctggacctgggccagctctgtgcgggccctgcccttccaccccaaggacatcatgggcgccttcagccacagcgagatgcagatgatcaaccagtactgcaaggacacccggcagcagcaccagcagggagatgagagccagaagatgagaggagactatggcaagctgaaggccctgatcaacagcaggaagagcaggaacagaagaaaccagctgcctgagagctag

SEQ ID NO: 164439 - DNA, 2256 bp, Artificial Sequence
  derived and/or modified sequence
atggccttccggaccatctgcgtgctggtgggcgtgttcatctgctccatttgtgttaagggatcaagccaaccacaggcacgcgtatatctgacctttgacgaattacgtgagactaaaacatcggaatacttctcattatctcatcaccccctagattaccgcatccttctgatggacgaggatcaggaccgtatttacgttgggtcaaaggaccacatcctgtccctgaacatcaacaacatctcacaggaagccctgagtgtcttttggcccgcctcgaccattaaggtggaggagtgcaagatggcagggaaagaccccacccacgggtgtgggaacttcgtgagggtaatacagacattcaatagaacccatctctatgtctgcggtagtggtgctttctcacccgtgtgcacgtacctgaacagaggtcgccgaagcgaggaccaggtgttcatgatcgactcgaagtgcgagtctggcaaggggcgttgttcattcaaccccaatgtcaacaccgttagcgtcatgatcaacgaggaactgttttccggaatgtacatagacttcatggggacagatgctgccatctttcggtccctcactaaacgcaacgcggtccgaacagatcagcataactccaagtggttgagcgagcccatgtttgtggatgcccacgtaatcccggacggtacagatccaaacgatgccaaagtttatttctttttcaaagaaaaactgacagacaataaccggtccaccaagcaaatccacagcatgattgccagaatctgccctaacgatacaggtggcttacgctccctcgttaataaatggacgacgtttctgaaggccaggctcgtatgtagcgtcaccgacgaagacggccccgagacccatttcgacgagcttgaagatgtgttcttgctagagacagataacccaagaaccaccctagtgtacggaatctttaccacctcctcttctgtgttcaaagggtccgccgtgtgtgtgtatcatttgtcagacattcaaaccgtgtttaatggccctttcgcccacaaggaaggaccgaaccatcagctcatttcttaccaaggacgaattccttacccacgtccggggacatgtcctggcggggcattcacccccaatatgcgcacaacaaaagagttccctgatgatgtggtgacctttattcggaaccaccccctgatgtataattcaatatacccaattcataagagacctctaattgtgagaatcggaacggattacaaatacacaaagattgccgtagacagagttaatgcagcagacggacgctatcatgttttattcctgggcacagatcggggtacggtacaaaaggttgtcgttctgcccactaataactctgtgtctggcgagctgatcttggaggagctagaggtctttaaaaatcacgctcccattactaccatgaagatttcgtccaagaagcagcagctgtatgtatcttctaacgaaggcgtcagccaagtctcgttgcatcggtgtcatatttacggaacagcgtgtgcagattgctgcttagccagagacccctattgcgcctgggatgggcactcttgttcacgattctacccaacaggaaagcggcgatcccgtcgccaggacgtgcggcatgggaaccctctcacgcagtgcagaggcttcaacttgaaggcctaccgtaacgctgctgagatcgtacagtacggggtgaagaacaataccacctttctggagtgcgcgcctaagagtccccaggcgagcataaagtggctgctccagaaagataaggatcgccggaaggaggttaaactgaatgaacgcattatcgccacatcccaggggctcctgatacgaagcgtgcagggatctgaccagggcctgtaccattgcatcgcgacagaaaatagtttcaaacagactattgctaaaattaatttcaaagtcctggacagcgaaatggtcgctgtagtcactgacaaatggtccccctggacttgggcatctagtgtgcgcgctctgccctttcatccaaaggatatcatgggggcgttttcacattcggaaatgcagatgattaaccagtactgtaaggatacccggcagcagcatcagcaaggggatgagagtcagaaaatgcggggggattatggaaaactcaaagctctgatcaactcccggaaaagccgtaatcggaggaaccagcttccagagtcttag

SEQ ID NO: 164440 - DNA, 2256 bp, Artificial Sequence
  derived and/or modified sequence
atggccttccggaccatctgcgtgctggtgggcgtgttcatctgctccatttgcgtgaaaggctccagccaaccacaggcaagagtctacctgactttcgatgagctccgggagactaagacttccgagtattttagcttaagccaccacccgctggactacagaattctactgatggatgaggatcaagacagaatctacgtgggcagcaaagaccatattctgagcctgaatattaataacatctctcaagaggcattgtccgtgttttggcctgcatccaccataaaggtagaggagtgtaaaatggccggcaaggacccaactcacggctgcggcaacttcgtgcgtgttatccagacatttaacagaactcacttatatgtctgcggatccggggcattctcgcccgtgtgcacttacttgaaccgtggccgaaggagcgaggatcaagtgtttatgatcgacagcaagtgcgagtccggcaagggccggtgtagctttaatcccaatgttaataccgtttctgtgatgatcaacgaggaactgttttccggaatgtacattgattttatgggaacggatgccgcgatttttcgttctctgaccaagcgcaatgcggtccggacagatcagcacaattcaaagtggttgtcagaaccgatgtttgtcgacgctcacgtgattcctgacggcaccgatcctaatgatgccaaggtatacttttttttcaaggaaaaactgacggataataatcggtccacaaagcaaatccattcgatgatcgcacgaatttgccccaacgacaccggtggtcttaggtccctcgtgaacaagtggactacgtttctgaaggcccggcttgtgtgtagtgtgaccgatgaggatggaccggagacccatttcgacgagcttgaggacgtattcctgcttgagaccgacaacccaagaactaccctcgtctacggtatcttcaccacatccagttctgttttcaagggatctgccgtgtgcgtgtaccatctgtctgatattcaaaccgtgtttaacggtccgttcgcccacaaggaaggccccaaccaccagctgattagttaccagggacgaattccgtatccccggcccggcacatgcccaggaggcgcctttactcctaatatgaggaccaccaaagagtttccagacgacgtagtgacattcatccgaaaccacccccttatgtacaactcaatctacccaatccacaaacgcccccttatcgttaggatcggcactgattacaagtataccaaaattgccgtcgaccgtgtgaacgccgctgacggccgctaccacgtgctctttctgggtactgataggggaaccgtgcagaaggtggtagtactccctacaaataacagtgtttccggggaactgatactggaggagctggaagtcttcaaaaaccatgcaccgatcacaacaatgaaaatcagctcaaaaaagcagcagctgtatgttagctccaacgaaggggtgtcacaggtgtccctccatcgctgccacatttacggcaccgcctgcgcggactgttgtctggcccgagacccttattgtgcctgggacggacatagttgttctagattctaccccactggcaaacgaaggtcgcggagacaggacgttcggcacgggaatcccctaactcagtgcaggggcttcaatttgaaggcttataggaatgccgcggagatcgttcagtacggcgtcaagaataacactacttttcttgagtgtgcacccaagagtcctcaggcatctatcaaatggttgcttcagaaagacaaagaccgaaggaaagaagttaagctgaacgagagaatcattgcaacgtctcaagggcttctgattcggagtgtgcagggatcggaccagggtctctatcactgcatcgccacagaaaatagctttaaacagaccattgctaagatcaattttaaagtgctggacagcgagatggtggctgtagtcacagacaagtggtctccgtggacgtgggcatccagtgtcagggctctgcctttccacccaaaggacatcatgggagcctttagccactcagagatgcaaatgattaaccaatactgcaaagacactagacagcagcaccaacagggcgatgagagccagaaaatgcgcggggattatggaaaactcaaggcgctcattaacagtcgcaaaagtcgaaatcgccgtaatcagttgcctgaatcttag

SEQ ID NO: 164441 - RNA, 2256 nt, Artificial Sequence
  derived and/or modified sequence
auggcuuuccgaaccaucugcgugcuggugggcguguucauuuguuccauaugcguuaagggaagcagccagccucaggcccgcguuuaccuuacauucgacgagcuucgggaaacaaagaccucagaguacuucuccuuaucccaccacccuuuggacuaccggauauuauuaauggaugaagaccaggaccgcaucuacgugggauccaaagaucauaucuugucccugaacaucaacaacaucucucaggaagcccugaguguauucuggccugcuagcacuauuaaagucgaggaauguaagauggccggaaaggauccgacacacgggugcggaaacuucguaagggucauucaaaccuuuaaccggacccauuuauacguaugcgguucaggcgccuuuucucccgucugcacuuaucucaaucgaggccgcaggucagaggaucagguuuucaugaucgauuccaagugcgaauccggaaaaggcagauguagcuuuaauccgaacguaaauacagucuccgugaugauuaacgaagaacuuuucagcggaauguauauugauuuuaugggcacagaugccgcuauuuuccgcucccugacaaagcguaacgcagugcgaaccgaccagcacaacucaaaauggcucuccgagccuauguucguagacgcacaugugaucccagacggaaccgaccccaacgacgccaagguguacuucuucuucaaggaaaaacugacugauaauaaucgcagcacaaagcagauccauagcaugaucgcgcgcaucugucccaacgauacuggugggcuuagaucacuagugaauaaauggacaaccuuucugaaagcaaggcuagugugcuccgugacugaugaagauggcccagaaacacauuucgacgagcuggaagacguauuccuguuagagaccgauaauccaagaacuacccucguguauggcauuuucacuacgucuucaucuguguuuaagggaucagccgugugcguguaccaccugagcgacauccagacaguguuuaauggcccuuuugcccacaaggagggacccaaucaccagcugauuuccuaucagggccgcauuccauacccaagaccaggaacaugcccagguggagcuuucacgcccaauaugagaacgaccaaagaguucccugaugauguuguaacguuuauccguaaccauccccuuauguacaauucaauuuauccgauucacaagcggccucugaucgucagaauuggaaccgauuauaaguauaccaagauagcgguugacagggugaacgcugccgacgguagguaucacguccuguuccuggggacugauagagggaccguccagaaagugguaguccucccuacgaauaauuccguuagcggagaacucauacuggaggagcuggagguauucaagaaccaugcaccaaucacgaccaugaagaucucgucuaagaaacagcagcuguacguaucgaguaaugagggcguuagccaggugucacugcauaggugccauaucuaugguacagcgugugcagacugcugucuggcuagagaccccuacugcgcgugggauggccauagcugcucacguuucuacccaaccgggaaacguaggucuaggaggcaggacgugcgacauggaaacccccuaacccagugucgaggcuuuaaccugaaagcuuauaggaaugcugccgagaucguccaauacggagugaaaaauaacacuaccuuccuggagugugcaccuaaaaguccccaagcuuccauaaaauggcugcuacagaaagacaaggauagacgaaaggaagucaagcucaacgagagaaucaucgcuacuagccaagguuugcucaucagaucagugcagggcuccgaccaggggcucuaccacugcauugcaaccgaaaacuccuucaaacaaacaauugccaaaauuaauuuuaaaguucucgauagcgagaugguugccguuguuacugacaaaugguccccauggacuugggcuuccucuguccgcgccuuaccauuccauccuaaggauauaaugggagccuuuagccauagcgaaaugcaaaugaucaaccaguauugcaaagacacacggcagcagcaccagcagggagacgagucucagaagaugcgcggagacuacggaaagcugaaggcacuaauaaacucgaggaagucucggaaccggaggaaucaauugccagagagcuag

SEQ ID NO: 164442 - RNA, 2256 nt, Artificial Sequence
  derived and/or modified sequence
auggcauuuaggaccaucugugugcucgugggcguguuuaucuguuccauuugugugaaagguuccagccagccucaggccaggguguaccucaccuucgaugaguuaagagagacuaaaacuuccgaauacuuuucacugucacaucacccacuggauuauagaauucugcucauggaugaggaccaagacagaauuuacgucggaagcaaggaucauaucuugucccucaauauaaacaacauaucacaagaggcucugagcguauuuuggccugcaucgacaaucaaaguggaagaauguaagauggcagggaaagauccaacucaugguugugguaauuuuguaagaguaauucaaacauuuaacagaacucaccuauacgucugcgguuccggugcauucagcccaguuugcacguaucugaacagagggcggcgcagcgaggaucaaguuuuuaugaucgacucuaagugugaguccggaaaaggaagguguucauuuaaccccaacguuaacaccgugaguguaaugaucaacgaggaacucuuuagcggcauguacauugacuuuauggguacugaugcagcuauauuucggucacugaccaagcgcaacgccgugaggacagaucaacauaacagcaaaugguugagugaaccuauguuuguggacgcacacguuauccccgacggaacagacccuaacgaugcuaaggucuacuuuuucuuuaaggaaaaacuuaccgauaacaaccggucuacgaagcagauccauuccaugauugcccgcaucugcccuaaugauacuggcggcuugcggucgcucgugaauaaauggaccacuuuucugaaagcuagauuggucugcagcgucaccgacgaggauggaccggagacccacuucgaugaacucgaggauguguuucuucuugaaacagacaaucccagaacuacguuaguguauggaauuuucacaacuagcuccagcguguuuaaaggcagcgccguauguguguaccaccugagcgauauccaaacaguuuucaauggacccuucgcccauaaggagggcccaaaccaucaguugauuucauaucaggggaggauuccuuacccaagaccaggcaccugcccuggcggagccuucacccccaacaugaggaccaccaaggaguucccagaugacguagugaccuuuaucagaaaccacccccuuauguacaacuccauauaucccauucacaaaaggccucugaucgugcgaauagggaccgauuauaaauauaccaagauugcugucgaccggguuaaugcagccgacggccguuaccauguacucuucuuaggaacggauaggggaaccguacagaaggucgucguccugccaacgaauaauucaguaaguggagagcugauccuagaggagcuggagguuuuuaagaaucacgcaccaauuaccaccaugaagauuuccucuaagaagcagcagcuguacgugaguaguaaugaaggcgucagucaagucucauugcacagaugccauauuuacggcacagccugugcagacuguugccuggcgagagacccauacugugcaugggauggacacagcugcucacgauucuauccuaccgguaagcgaagaucccgcaggcaggacguccgccacggcaacccauugacccaaugccguggcuuuaaucugaaggcuuaccgcaaugccgccgagaucguccaguacggcguuaagaacaacacuacuuuucuggagugcgcuccgaaguccccgcaggcuagcauuaaguggcuacuccagaaggauaaggaucggcggaaagaggugaagcuuaacgagagaauuauugccaccucucaggggcuucugauucgcagcgugcaggguucagaucaggggcuauaccacugcauugcuaccgaaaauucuuuuaaacaaacuauugccaagaucaacuuuaagguuuuggauagcgaaauggucgccgugguaaccgacaaguggucacccuggaccugggccucuagugucagagcccuuccuuuccaccccaaagacauaaugggcgcuuucagccauuccgaaaugcagaugauuaaucaguacuguaaggacacucgacaacaacaccaacagggugaugagagccagaagaugaggggggauuacggcaaguuaaaagcucucaucaauagucguaagagucggaaucgaagaaaucaacugccugaaagcuag

SEQ ID NO: 164443 - RNA, 2310 nt, Artificial Sequence
  derived and/or modified sequence
auguugaguaaaaagggaauuuucccguggauucugacuuguaucagugaagaaauggccuuucggacuaucuguguucugguggguguguuuaucugcuccauaugugugaaaggcucaagucaaccucaggcccgagucuaccugacauuugaugaacugcgcgaaacuaagaccucugaguauuuuucauugucucaucacccucuggacuaucggauccuccuaauggacgaggaucaggaccgaaucuaugugggguccaaggaucacauuuugucgcucaacauaaauaacaucucacaggaagcccuuuccguuuuuuggccugcaagcacaaucaaaguggaggaaugcaagauggccggcaaggacccaacucacggcugcggaaauuucgugcgaguuauucagaccuuuaauaggacccaccuguacgucuguggauccggcgccuucaguccaguguguaccuaucugaaucgaggccgucguagugaggaucagguguucaugauagacucuaagugugagucggguaaaggcagguguaguuucaaccccaacgugaacacgguuaguguuaugauuaacgaagaacucuucagcggaauguauauugauuuuauggguaccgaugcagcuaucuuucguucacugacaaagcguaacgcagugcgcacagaccagcauaauucuaaauggcugagugagccgauguucguggaugcccaugugauucccgauggcacagaccccaacgaugccaaaguuuacuucuuuuuuaaggaaaaauugacggacaacaaccgcaguacaaaacaaauucauagcaugaucgcccgcaucugcccuaacgacaccgguggacuucgcucccuuguaaacaaauggaccaccuuucugaaggcuagauugguguguucuguaacagaugaagacggccccgagacucacuucgaugaacuagaagacguguuccugcucgaaaccgauaacccucggaccacccuuguguacggcauauucaccacuucuucuucaguuuuuaagggcuccgcuguuugcguguaccaccucucggauauccaaaccgucuuuaaugguccauucgcccauaaagaagguccaaaccaucaacucauuaguuaccaaggacgaauuccauauccacgucccggcaccugcccaggaggagccuucacccccaacaugcgaacaacuaaggaauuuccugacgacguagucacguucauaaggaaccacccccuaauguacaacagcaucuauccaauccacaagaggccccuaaucgucaggaucggcacagacuacaaguauacaaagauugcaguugaccgggucaaugcggccgacggcagguaucacgugcucuuucugggcacagaccgcggcacuguccagaaagugguugucuuacccacaaacaacucagucagcggagaacugauccuggaagaacuggaggucuuuaaaaaucacgcacccauuaccaccaugaagauuucuucaaaaaaacagcagcucuacguauccucaaaugaaggcgugucccaagucucccuccaucgcugccacauuuacgggacugccugugccgauuguugccuggccagagacccguacugugccugggauggacacagcugcucuagauuuuacccuacaggcaagcgcaggucaagaagacaagacguuagacauggcaauccccuuacucaguguagaggauucaaucugaaggccuaccggaacgcagcugaaauugugcaauacggcguaaaaaauaacaccacauuccuggagugugcaccgaagucuccccaagcauccauuaaauggcuccugcagaaggauaaggauaggcgcaaggaggucaagcucaacgaacgaauuaucgcuaccucacaggggcuucugauucgcagcguucagggcucugaucagggccuguaucacugcauugcuaccgagaacaguuucaaacagaccauugcaaagauuaauuuuaaagugcuggacuccgagaugguugcaguggugacugauaaauggucuccauggacuugggccucuucaguccgggcucuaccuuuccacccgaaggauauaaugggagccuucucccauuccgagaugcagaugauaaaucaguacugcaaggauaccaggcagcaacaccagcagggugacgaaagucagaagaugcgaggcgacuacggaaagcuuaaagcucucaucaauucccgaaagucccgcaaucgacgcaaccaacucccugagucuuag

SEQ ID NO: 164444 - RNA, 2256 nt, Artificial Sequence
  derived and/or modified sequence
auggcauuucgcacgauuugcguauuggugggcguguuuauaugcucaaucugugugaaaggcaguucacaaccacaggcaaggguguaucugaccuucgaugagcuaagggaaacgaaaaccucagaauacuuuagccucucccaccacccgcucgauuaccggauccuucucauggaugaagaccaggaccguauauaugucggauccaaagaccauauccugucucucaacauuaauaacauuagccaagaggcauuauccgucuuuuggccugcuucgacaaucaaaguagaagaaugcaagauggcuggaaaagacccuacacauggauguggcaauuucguacgggugauucaaacguuuaaccgcacucacuuauacgucuguggguccggcgcauuuuccccgguuuguacauaucucaaccgcggaagaagaucugaggaucaaguguucaugaucgacucgaaaugugaauccgggaagggacgcugcucguucaauccuaacgucaacacagucucaguaaugaucaacgaagagcuauucuccggcauguauaucgauuucaugggaacagacgccgcaaucuuuagaucucuaacuaaaagaaaugcuguucgaacugaccaacauaauucuaaauggcucucugagccaauguuuguugaugcccaugugauacccgacggaacugacccaaacgacgccaaaguuuacuucuuuuuuaaagagaaacugacugauaacaauagaucaaccaagcaaauacauucuaugaucgcccgcaucugccccaacgacacuggggguuuacgaagucuugugaacaaguggacaacuuuccuaaaagccaggcuggugugcucuguuacugacgaggacgggccugagacgcauuucgacgagcuggaagacguauuccuguuagagaccgauaauccaagaacuacccucguguauggcauuuucacuacgucuucaucuguguuuaagggaucagccgugugcguguaccaccugagcgacauccagacaguguuuaauggcccuuuugcccacaaggagggacccaaucaccagcugauuuccuaucagggccgcauuccauacccaagaccaggaacaugcccagguggagcuuucacgcccaauaugagaacgaccaaagaguucccugaugauguuguaacguuuaucagaaaucauccacugauguacaacagcauuuacccuauccacaagcgcccacucaucguacguauagguaccgacuacaaauauacaaagauagcgguugacagggucaacgcagccgacggcagauaccaugugcuguuucuggggaccgaccgcgguaccguucagaaaguuguagugcuaccaaccaacaacagcguaagcggggaauuaauccuggaggagcuggaaguguuuaaaaaucaugccccaaucaccacaaugaaaaucucuucuaaaaaacagcagcucuacgucucuaguaacgaaggugugucacaagugucccugcacagaugccauauuuacgguaccgccugcgcagauugcugucuggcccgcgaccccuacugcgcaugggaugggcacagcuguucaagauucuaccccacuggaaagcgaaggagcagaagacaagacguuaggcacggaaacccauuaacgcagugucgcgguuucaaccugaaggccuaccggaacgcugcugagauagugcaauacggcgugaaaaacaauaccacguuccucgaaugcgccccaaaaucuccucaggcuucaaucaaguggcugcuacagaaagacaaggaucgccgcaaagaggugaaauuaaaugagcgcaucauagccacaucacaggguuugcugauccggucagugcagggguccgaucaggggcuuuaucauuguauugccaccgaaaacucauuuaagcaaacuauugccaagaucaauuucaagguuuuagacagcgagaugguagccgugguaacagacaaauggucucccuggacaugggcaucgagugugcgggcccuuccuuuucauccuaaagacaucaugggagcauuuucucacucggaaaugcagaugauaaaccaguauugcaaagacacucgccagcagcaucaacagggcgaugaaucacagaagaugcgcggagauuacggaaaacugaaagcccugauaaacaguaggaagagcagaaacagaaggaaucagcuuccagagagcuag

SEQ ID NO: 164445 - RNA, 2256 nt, Artificial Sequence
  derived and/or modified sequence
auggccuucagaaccaucugcguccucguggguguauucauuugcagcaucugcgugaaaggaaguucucagccccaagccagagucuaccucacauucgaugaauugagagaaacuaaaacuucggaauauuucucccugucccaucauccgcuggauuacaggauauugcucauggacgaagaccaggacagaauauacguuggaagcaaggaucauauucugaguuuaaacauuaauaauauuagucaagaagccuugucaguuuuuuggcccgcauccaccaucaagguagaggaauguaagauggcagggaaagauccaacucaugguugugguaauuuuguaagaguaauucaaacauuuaacagaacucaccuauacgucugcgguuccggugcauucagcccaguuugcacguaucugaacagagggcggcgcagcgaggaucaaguuuuuaugaucgacucuaagugugaguccggaaaaggaagguguucauuuaaccccaacguuaacaccgugaguguaaugaucaacgaggaacucuuuagcggcauguacauugacuuuauggguacugaugcagcuauauuucggaguuuaacuaaacgcaacgccgugagaaccgaucaacauaacagcaaaugguuauccgaaccgauguucgucgaugcccauguuaucccagauggcaccgacccgaaugaugcaaagguauacuuuuuuuuuaaggagaaguuaacagacaacaaccgguccaccaaacagauccacaguaugauagcccgaaucugcccaaaugauacagggggccugcgcucuuuggugaacaaauggacaacauuccugaaggcccggcucgucugcagcguaacggacgaagacggaccugaaacgcauuuugaugaacucgaagacguguuccuguuagaaaccgacaaucccagaacuacucucguuuauggcauauucaccacaucgucuucugucuuuaagggaucagccgucuguguuuaccaccuuagcgauauccagacagucuuuaacgggccuuuugcccauaaagaagguccuaaccaucaacuuauuucuuaucaggggcgcauuccauacccacguccugggacuuguccaggcggagcguuuacucccaauaugaggacaacaaaagaguuccccgacgauguuguaacauucaucaggaaucacccucucauguacaauucaauauauccaauacacaaaaggccacugaucguuagaauuggaacugauuacaaguacacuaagauugcugucgaccgagugaaugcugccgauggcagauaccacguccucuuccucgguacagaucgaggaaccgugcaaaaaguugucguguugccaaccaauaauagcguuuccggcgaauuaauacuggaagagcucgagguauucaaaaaccaugccccaaucaccacaaugaagauaagcucgaagaagcagcagcuauacgucaguagcaaugaaggagugucccaggugagucugcaccggugccauauuuacggaaccgccugcgccgauuguuguuuggcuagagacccuuacugugccugggacggucacagcugcaguagauuuuacccaacugguaagcggagauccaggcgccaggacgugcggcauggcaacccccucacccagugucguggcuuuaauuugaaggcuuacagaaaugcagcagaaaucguucaguauggcgugaagaacaauacaaccuuucucgagugcgcacccaaaucaccucaggcaagcauuaaauggcugcuucagaaagauaaggaucggcguaaggagguuaaauuaaacgagaggauuaucgccacaucccagggguuacuuauacguucuguacaagggagcgaucaaggacuuuaccauuguaucgccacggagaacagcuucaagcaaacaaucgcgaaaauuaacuucaaaguccuagacucggagaugguggccgucguaacagacaaguggucccccuggacaugggcuuccucuguucgugcucugccguuucauccaaaagauauaaugggcgccuuuucucacucagagaugcagaugaucaaccaguauuguaaagauacuagacaacagcaccaacagggggaugaaagucaaaagaugagaggagauuacggaaagcugaaagcacugauaaauagccggaaaagucgaaacaggaggaaccagcugccggagagcuag

SEQ ID NO: 164446 - RNA, 2310 nt, Artificial Sequence
  derived and/or modified sequence
augcucagcaagaaagggaucuuccccuggauacuaaccuguauauccgaggaaauggcauucagaacuaucuguguucugguuggaguuuucauuuguagcaucugcguaaagggauccucucagccccaagcgcgcgucuaccucacuuucgaugaacuacgugagacgaaaacuuccgaauacuucagucuaucucaccacccacuugacuaucgaauucugcuuauggacgaggaucaggauagaauauacguaggaagcaaggaccauauucugaguuuaaacauuaauaauaucucccaggaggcccucagcguauuuuggccugcuucaaccaucaaagucgaggaaugcaagauggcuggaaaggacccuacccauggcugugggaacuuugugagagugauucagaccuucaauaggacacaccucuauguaugcggcuccggcgcuuuuucccccguguguaccuaccugaaucguggacgacggucugaagaucaaguauucaugauugacuccaagugugaaaguggcaagggacgguguucuuucaaucccaaugugaauacaguuucaguuaugauuaaugaggagcuguucagcggaauguauauagacuuuauggguacugacgccgcaauuuucagaagucuuacaaagagaaacgccgucaggaccgaccaacacaacucuaaguggcugucugaaccuauguucguggaugcacacguaauacccgauggaaccgacccuaaugacgcgaagguguauuuuuucuuuaaggagaagcuaacugauaauaauaggagcacaaaacaaauccacucuaugauugcaagaaucugccccaaugacacuggagggcugcguucucugguaaauaaauggaccacauuucugaaggcuagauugguguguucuguaacagaugaagacggccccgagacucacuucgaugaacuagaagacguguuccugcucgaaaccgauaacccucggaccacccuuguguacggcauauucaccacuucuucuucaguuuuuaagggcuccgcuguuugcguguaccaccucucggauauccaaaccgucuuuaaugguccauucgcccauaaagaagguccaaaccaucaacucauuaguuaccaaggacgaauuccauauccacgucccggcaccugcccaggaggagccuucaccccuaacaugagaaccacuaaggaguuuccagacgauguggucacauucauucgcaaccacccccugauguauaauagcauauacccuauucacaaaagaccucugaucguuagaauugggacagauuacaaauacacaaagaucgccguagaucggguuaaugccgcagauggaagguaucaugugcuguuucugggcaccgacaggggcacugugcagaaaguagugguguugccaaccaauaauagcguguccggcgagcuuauccuggaggaacuggaaguauucaagaaucacgcuccgauuacuacuaugaagauaagcucaaaaaaacagcagcuguaugucucgucuaaugagggugucucucaagugagccuccaucgcugccacauauacgggacugccugcgcugauugcugccuugcccgggaccccuacugcgccugggauggccacuccuguucgcgcuucuacccuacaggaaaaagacggucacgucgccaggaugugagacacggcaacccccugacacaguguagaggguucaaucuaaaagccuauaggaacgccgcugaaauuguucaauacggggugaaaaauaacaccacuuucuuggaaugugcccccaagucuccacaagccuccauaaaauggcuucuucaaaaggauaaagacaggcguaaagaagugaaauuaaaugagagaaucauagcaacuucccaaggacugcugauaagguccguccaaggcucagaccaagggcuguaccacugcauugcaacugagaacucuuuuaagcagacuaucgcaaagaucaauuucaagguacucgacuccgaaaugguggccguggugacggauaaauggagcccauggaccugggccucuucugucagagcucuccccuuccauccaaaagauauuaugggcgccuuuucccacagugaaaugcaaaugauaaaucaauauuguaaagacacccgccagcagcaccaacaaggagacgaaucccagaaaaugaggggagacuacggaaagcuuaaggccuugaucaacucucguaaaucgcggaauagaaggaaccagcugccugaaaguuag

SEQ ID NO: 164447 - protein, 585 aa, Artificial Sequence
  derived and/or modified sequence
MAAVELEWIPETLYNTAISAVVDNYIRSRRDIRSLPENIQFDVYYKLYQQGRLCQLGSEFCELEVFAKVLRALDKRHLLHHCFQALMDHGVKVASVLAYSFSRRCSYIAESDAAVKEKAIQVGFVLGGFLSDAGWYSDAEKVFLSCLQLCTLHDEMLHWFRAVECCVRLLHVRNGNCKYHLGEETFKLAQTYMDKLSKHGQQANKAALYGELCALLFAKSHYDEAYKWCIEAMKEITAGLPVKVVVDVLRQASKACVVKREFKKAEQLIKHAVYLARDHFGSKHPKYSDTLLDYGFYLLNVDNICQSVAIYQAALDIRQSVFGGKNIHVATAHEDLAYSSYVHQYSSGKFDNALFHAERAIGIITHILPEDHLLLASSKRVKALILEEIAIDCHNKETEQRLLQEAHDLHLSSLQLAKKAFGEFNVQTAKHYGNLGRLYQSMRKFKEAEEMHIKAIQIKEQLLGQEDYEVALSVGHLASLYNYDMNQYENAEKLYLRSIAIGKKLFGEGYSGLEYDYRGLIKLYNSIGNYEKVFEYHNVLSNWNRLRDRQYSVTDALEDVSTSPQSTEEVVQSFLISQNVEGPSC

SEQ ID NO: 164448 - DNA, 1758 bp, Artificial Sequence
  derived and/or modified sequence
atggccgctgttgaactcgagtggatccccgagacactgtacaataccgctattagtgccgtggttgacaattacatccgttccaggcgcgatatacgctctctgcctgagaacattcagttcgatgtctactacaagctctaccagcaaggcaggctctgtcagctcggctcggaattctgtgaactggaggtttttgccaaggtcctgcgcgccttggacaagcgacaccttctgcatcactgcttccaagctctaatggaccatggggtaaaagtagcgagtgtgctggcgtattcattttctagacggtgctcttatatagcagaaagcgacgccgcggtcaaagaaaaggctattcaagtgggctttgtgttgggcgggtttctgagcgatgcaggctggtacagcgatgctgaaaaagtattcctcagctgccttcaactctgtaccctgcacgacgagatgctgcactggttccgggctgtggagtgttgcgtaaggctgttgcacgtgagaaacggaaattgtaaatatcacctgggcgaagaaacgttcaaactcgcgcagacatacatggacaaactgagtaaacatggacagcaggctaataaggcagccctgtacggagaattgtgcgcgttacttttcgctaaaagccattatgatgaggcttacaaatggtgcatcgaagcaatgaaagagattacagctgggcttcccgtcaaggtcgttgtggacgtactgcggcaagcatcaaaggcttgcgttgtgaaacgcgagttcaagaaagcagagcaactcatcaaacacgccgtctacctggcacgggatcattttggatctaagcatccgaagtactccgatactctgctggattacggtttttacttgctaaacgtggataatatttgccaaagcgtggctatttatcaggctgccttagacattagacagtccgtgttcggcggaaaaaatatacatgtggccactgcgcacgaggatctggcatactccagttacgttcatcagtattcctccgggaagttcgacaacgccttattccatgccgaacgggctataggtattataacgcacatactccctgaggaccatctgctgctggcaagcagtaaacgcgtgaaggccctcatactggaggagatcgctatcgattgccataacaaagagactgaacagaggctcctgcaggaggcccacgatctacatctgtcatcactgcagctagctaaaaaggcatttggcgaatttaacgtccagacagcaaagcattatggtaacctggggcggctatatcagtcaatgagaaaattcaaagaagccgaggaaatgcatattaaagccatacaaattaaggaacagctcctcggacaagaggactatgaggtggcattgagcgtgggacacctagcttctctttacaactacgatatgaatcaatacgagaatgcagagaagctatacctgaggtctatcgcaattggaaaaaaactgttcggcgagggttacagcgggttggagtatgattacaggggactgatcaaactgtataatagcataggcaattatgaaaaagtgtttgagtatcacaatgtactaagcaattggaatagattacgcgaccgccagtattcagtgacagatgccttggaggacgtctcaacttctcctcagtccactgaagaggtagttcaatcattcctcatttcccagaacgtggaaggaccttcgtgttag

SEQ ID NO: 164449 - DNA, 1758 bp, Artificial Sequence
  derived and/or modified sequence
atggctgctgtggagctggagtggatccctgagaccctgtacaacacagccatctctgctgtggtggacaactacatccgcagcagaagagacatccgcagcctgcctgagaacatccagtttgatgtgtactacaagctgtaccagcagggccgcctgtgccagctgggcagcgagttctgtgagctggaggtgtttgccaaggtgctgcgggccctggacaagaggcacctgctgcaccactgcttccaggccctgatggaccatggagtgaaggtggcctctgtgctggcctacagcttcagccgccgctgcagctacatcgccgagagtgatgctgctgtgaaggagaaggccatccaggtgggctttgtgctgggcggcttcctgagtgatgctggctggtacagtgatgctgagaaggtgttcctgagctgcctgcagctgtgcaccctgcatgatgagatgctgcactggttccgggctgtggagtgctgcgtgcggctgctgcacgtgagaaatggaaactgcaagtaccacctgggggaggagaccttcaagctggcccagacctacatggacaagctgagcaagcacggccagcaggccaacaaggccgccctgtatggagagctgtgtgccctgctgtttgccaagagccactatgatgaggcctacaagtggtgcatcgaggccatgaaggagatcacagctggcctgcctgtgaaggtggtggtggatgtgctgcggcaggccagcaaggcctgtgtggtgaagcgggagttcaagaaggccgagcagctgatcaagcatgctgtgtacctggcccgggaccacttcggcagcaagcaccccaagtacagcgacaccctgctggactatggcttctacctgctgaatgtggacaacatctgccagagcgtggccatctaccaggccgccctggacatccggcagagcgtgtttggaggcaagaacatccacgtggccacagcccacgaggacctggcctacagcagctatgtgcaccagtacagcagcggcaagtttgacaatgccctcttccacgccgagcgggccatcggcatcatcacccacatcctgcctgaggaccacctgctgctggccagcagcaagagggtgaaggccctgatcctggaggagatcgccatcgactgccacaacaaggagacagagcagaggctgctgcaggaggcccatgacctgcacctgagcagcctgcagctggccaagaaggcctttggagagttcaacgtgcagacagccaagcactacggcaacctgggccgcctgtaccagagcatgaggaagttcaaggaggccgaggagatgcacatcaaggccatccagatcaaggagcagctgctgggccaggaggactatgaggtggccctgtctgtgggccacctggccagcctgtacaactatgacatgaaccagtatgaaaatgctgagaagctgtacctgcggagcatcgccatcggcaagaagctgtttggagagggctacagcggcctggagtatgactaccggggcctcatcaagctgtacaacagcatcggcaactatgagaaggtgtttgagtaccacaacgtgctgagcaactggaaccggctgcgggaccggcagtacagcgtgacagatgccctggaggatgtgtccaccagcccccagagcacagaggaggtggtgcagagcttcctgatcagccagaatgtggagggccccagctgctag

SEQ ID NO: 164450 - DNA, 1758 bp, Artificial Sequence
  derived and/or modified sequence
atggccgccgtggagctggagtggatccccgagaccctgtacaacacagccatctccgcagtggtggataattatattcgctccagaagagacatcagaagtctgcctgaaaacattcagtttgacgtgtactataagttgtaccagcagggtcgcctgtgccaattggggagtgaattttgcgagctggaggtgtttgccaaagtcctaagggccttagataagcgccatctactgcaccattgtttccaagccctgatggatcacggtgtgaaggtggctagtgtgcttgcgtattcgttcagtcgccgctgttcatacatcgccgaaagcgatgctgctgttaaagaaaaggctatccaagttggttttgtcctcggaggatttctcagcgacgcaggatggtacagtgacgccgagaaggtattcttgtcttgcctccagctttgcactttgcatgatgaaatgttgcactggttcagggccgtagaatgctgtgtgcgactcttgcatgttcgcaatggaaactgtaaatatcacttaggcgaagagacattcaaactagctcagacttatatggataagctgagtaagcacggccagcaggctaacaaagctgccctgtacggggagctatgcgctctattgtttgcgaagagccactacgatgaggcctacaagtggtgcattgaggcaatgaaggagattacggcaggcctccccgtgaaggtggtggtcgatgttttaagacaggccagcaaagcctgcgtggttaaaagagagttcaagaaagcagaacagttgatcaagcacgccgtgtatctcgcacgggaccactttgggagcaagcatcccaagtactcggacaccctactggactacggcttttacctgctgaacgtggataatatttgccaatctgtcgccatctaccaggctgctctggacattagacagtcagtgtttggcggcaagaacatccacgtggctactgcccacgaagacctcgcatactcctcctatgtgcaccaatactctagcggaaagtttgacaacgcactattccacgccgagagagcaattggcattattacacatattctgccggaagaccacctgctactagcctcttccaaaagggtcaaggcgttgattttagaggaaattgctattgattgtcacaacaaagaaaccgaacaaagactgctgcaagaggcgcatgatctgcacctgagctcacttcagttagcgaagaaagccttcggggagtttaacgttcagacagctaagcattacggcaacctgggtcgtttgtaccagtcaatgcgtaaattcaaagaggccgaagaaatgcacattaaagcgattcagatcaaggagcagctcttgggccaggaggactacgaggttgcgttgagcgtgggacacctggctagcctgtataactatgatatgaaccagtacgaaaacgccgaaaagttatatctgaggagcatagctattggcaaaaaacttttcggggagggctatagcggtctggagtatgattatcggggactgattaaattgtacaattctatcgggaattacgagaaggtctttgaataccataacgtattaagcaactggaaccgactgagagaccgtcaatacagcgtgaccgacgcgttggaggacgtcagtacaagtccacagagcactgaggaggtagtgcagagtttcctcatttcccagaatgtggaagggccaagttgttag

SEQ ID NO: 164451 - DNA, 6468 bp, Artificial Sequence
  derived and/or modified sequence
gagatcagcgctgggacggaacccgggttcctctcgaaccgggattgtgacgcttttggcctggctggccgctgttttctgtcccactttttactcgggcctgcgtccgctgccgccgtccctcagtttgcccccggaggaggcagggcggccgtgccttctgccgtgcgcccgcgtggctgccaccgcccctccgaatcctccggggccgcagaggggttcgctacggagggaggtgggggccttcgggaggaggaggcggaggaggcggaggaggagggaaggaagatggcggccgtggaactagagtggatcccagagactctctataacaccgccatctccgctgtcgtggacaactacatccgctcccgccgagacatccgctccttgcccgagaacatccagtttgatgtttactacaagctttaccaacagggacgcttatgtcaactgggcagtgaattttgtgaattggaagtttttgctaaagtactgagagctttggataaaagacatttgcttcatcattgttttcaggctttgatggatcatggtgttaaagttgcttcagtcttggcctactcattcagtaggcggtgctcttatatagcagaatcagatgctgcagtaaaggaaaaagccattcaggttggctttgttttaggtggctttctttcagatgcaggctggtacagtgatgctgagaaagtttttctgtcctgccttcagttgtgtactctacacgatgagatgcttcattggtttcgtgcagtagaatgttgtgtgaggttgcttcatgtgcgaaatggaaactgcaaatatcatttgggtgaagaaacatttaaattagctcagacatatatggataaactatcaaaacatggccagcaagcaaataaagctgcactctatggagaactgtgtgcactcctatttgcaaaaagtcactatgatgaggcatacaaatggtgcatcgaggcaatgaaagaaattacagcaggcttaccagtgaaagttgtggtggatgtcttaagacaagcttctaaggcttgtgtagtaaaacgtgaatttaagaaggcagaacagttaattaaacatgcagtgtatttggcacgggatcattttggatccaaacacccaaaatattctgatacactgctagattatgggttctacttactcaatgtagataatatctgtcagtctgttgcaatttatcaggcagcccttgacattagacagtcagtgtttggtggcaaaaatatccacgtagcaacagctcatgaagatttggcctactcttcttatgtccaccagtatagctctgggaaatttgacaatgcactatttcatgcagaaagagctattggtatcattacccacatcctacctgaagatcatcttcttttggcttcttcaaagagggtgaaagcacttattttagaggagattgcaattgattgtcataataaggaaactgaacagaggctgcttcaagaagctcatgatttgcacctgtcttcactccaactagctaaaaaagcttttggggaatttaatgtacagactgcaaaacactatggaaaccttggaagactttatcagtcaatgagaaaatttaaggaagctgaagaaatgcacatcaaagcaattcagattaaagaacaacttcttggtcaagaagattatgaagtagccctttcagtgggacatctggcttctttatataattatgacatgaatcagtatgaaaatgctgagaaactttatttgcgatctatagcaattgggaagaaactttttggtgagggctacagtggactagaatatgattatcgaggtctcattaaactttacaactccattggaaattacgagaaagtgtttgaatatcacaatgttctgtctaactggaaccggttgcgagatcggcaatattcagtgacagatgctcttgaagatgtcagcaccagcccccagtccactgaagaagtggtgcagtccttcctgatttctcagaatgtcgagggaccgagctgctgagggaggacctcagttaaccaattaccttttcccggattccagggaattcatactgtgaaatcaaaaccatgttgttttggggggctggaatttgcattgaaacactggtccagtccattgaagaccctattttgggtgatccctatcttgcagaatgtctgtaggaataagcatatattcagttatattcagcatgtaccgcatgtgtaagtagtctggcccacattttcaacctagtagaacaaacaacaggaaatcttttttttgttgtttttaaaaaattcattttgcagaaagcctgaaagaaaaaaaatacccctaaataaaactatttaagagtttaaaagagttgcattcttattatgtaaggatgattttaacaactttttaatatgtaattcttccatgtggaggtattcaatactgtagtgtaaagaaattttatgcggaaaatctttatatgcagtatagaaaagttaacacaagtactaataaaagagggacatcccgacttacgtttttctaccttgcccagataagtggatacaaccactctatattacaaggaaaggactgtcagattcatctgaactggaccagtgttgatctgtaatgtaatagaaaatctgatagaccagcacttctgacttttttttttttggtacaacaatgcaagatgctctgatagcatttgctaacaggaccaggaggatctaaaaaggaccagcctaatgtagaaggtggttacttggaccagaggctttagattattattttagatcctacatatacttttatcagtagaatgatttcatttagatgtataatgaaaaaggataatgcaaaaattatgtaatagataccaaattagggaagtttggcaatttcaatggcatatttttagtcaaggtacacagatggcagtgccataagcaagtctataaatatcggctgcagccatccccctcattttaaatgttgccctaataatcaatgcagttaacaagtatattggctgtgtgtcatgaaatagttcatgttcagatggaaatgttaggttactgtatggtttatggagattaatgaaaatgaatgcccaaaaataagtcttagaaaatcctccatttttatggtaaatagtaatacaactaggtcatttcatttgaaatctaggagtcaaatggaaagatcccctaataatacacctatttcactaacttgtctttctgtttattgggttttgatttgattttttgtaagccagtcaggttatttaatgatgaggtaataatcaaatttaagaatttgtgacatgtagcaattcaagaaacaaaaaggtattttgctgttacctcaattcttactgtagtagcccatctgatgcttctatagttaagaatctgggttccccccctattttcaggggttcatgacttggctgttaaagatgttgctcctagctaatgcttggagtagtctgtgggtgaatggatgtgtgttgaattttagttttcttttaacatgcatgttgggtgagaggggaaaaaaatctaagctgtctgccacattgagtacagaaaagttgtagatttcaaattttattaatattttaagcacttttttgaacttcccaaccttgtttgaagctgttatttgcagtcctattagttttgagccattgcatttaagttccctaggagggggttggttgggggatgtactgaaagagatgaagcaaacccacaccctaagatggtaactgtgtgatttagaaacctgagtttactcctcaaatcgaattattttctttttaaattttggaaagagtaaattgacgtacttgcagtttatgaagctgccccccacccctcagttaattgcagtctaatgtcaagaggcacttctttattaattaccaaatagtctttgtgaccaaggactaacatttttaagttactcagctctatcctcatgggcctatatatttaatacctccaaagatattttcaggataggctttgtatacttttattggttatttagaatccagtggtatgtttgtggtataggaatgtcatggtaaattgtttttcaataaatattttgaaacatgtttccatatgaagtttttttttcaatctgtattttttggttttgtgcacatacagcatttcctaggataaaaataaacaaatgacttacagcctcatcctccctaactccatttgaactcaacttagctcacactcagtgataaaacaacatggtatgtagaagcctaggatcacagggtgataatgtcaattggcagccagttgtgtttttttgaaacatcattattggcagtttctccttatcaccactgctttaatgtagtttttttgtaaatccatatactttaatgcatacactctagcttaagaaaacattgccattttggttagggatatgacttaatgtgctattatttctggttctaatgaagaataataccctatgactttaagtgtaagattcatcctttaagtagggatgtttaggataagttagatgtgtgccactatgatttattgggtttcttaaaaatcttgaagaaaataataaaatttatctcacaataagttaacttgcgcaaactttttacatatggtgaggtgcgtaaggaagccctggccaacttaaagatttttctggaggttcagcaaagttatgttaaattaggggcctttggtctcatccttctctgactcttctacccagtcttttcctaaagttcggtgctactccagttgggtgcatcagggagctccgtcagcactcgcatgtgtcgctcaggtggccactcatgcctgcattccatttaatagagtcaattggaatttttagagcataatctttatggatcctcaaagctgactttgccaaagggattgagacccttactaccatcaaatctctgtctctgcttggttaaaaattggctcactattgctttgtagtaacccctgcccaggtattttttcacttgtgaaaataatttgagaaagacctttgttcctagcctgttgggaaaagtttataattttatgaaaattaagtacagaggctgcgatcttagaaataatgaaggtgccatttggctgctccttaatagtgcagacagaaaactgcagtgaacacatgccaaaacatgattgaagcctttggctgaaactttatacatagaaataatgatttgctcataacaggtatcattaactgccactttttatgttttccctagaatttgtagccttgctgcttgcttttcttctgggtggcaaagttactactggaaaaacactataagtacaaagtttttggggttttatctttgctttagaagtggatgtgtacttcacctcttggctgtggaggaacttagttgccaggaaattttttttttttttttcagacggagtttcgctcttgttgcccaggctgggagggcaatggcaccgtcttggctcactgcaacctccgcctcccgggttccagcgattctcctgcctcagccttccgagtagctgggattacaggctcctgccaccacgcctggctaggaaattttttgttgttaatatgacatttggattaatctccagcttcaacagtacttcttttgtccataaatctcaggaatgttttaggcagaaaactggttttaccctgttgataatcagaaggagtgtgctttaggatttattgcataatactattctttaattgcaatcctaggtatctatagcatgagtggccttagtgagtttgttgaagtgcacatgtttttcaagagtaaaatttaagattaaaaatatatcctatatatagatatctagaaaacttggtttgtggtgcacagttaagtgttggatcactaaataaccattgcaggtaccgtttgtgtaacattactcatttctgtatattccttttatgggaagatattttgccatggtaactaaaacttttcagttctacttttatgatgtgaatgaatgctacgttttattaaatattaccaggtcagtactatttttatactttattaagcaacaggggattttagtttaataggctcaaaataaaaagttcttaatggaacagttaaaaacaaaacactaacaatctttacgtgaaaatccccactaatagtgccacaataatttctatagaaatatctaaggtcattaaatagatttttgaagacggttcttcattgtgtcaggatgacctttcatatcattctcaccaacttgtagtgcccaccgttatttgtaactattaaaccatactaagtatgtttgtaaccagcattgtgatatattctgtacttgtattgctaaaaatgaattattgacctaataaatatagtgttcctgc

SEQ ID NO: 164452 - DNA, 1758 bp, Artificial Sequence
  derived and/or modified sequence
atggcagccgtggagctcgaatggattcccgagaccctgtacaacacagccataagcgcagtagtggacaactatattcgttcaagacgcgacatccggagccttcccgagaacatacagttcgacgtgtattataagttataccagcagggaagactgtgccaattaggatcagagttttgtgagctggaggtattcgccaaggtactcagggcactggataaacgccacttattgcatcattgttttcaggccctcatggaccacggagtcaaagtcgcgtcagtgctagcttatagcttttcccgccgatgctcatatatcgctgagagcgacgcagccgtcaaagaaaaggccatccaagttgggtttgtgctgggtgggttcctgagcgacgccggatggtactcagacgcagagaaggtttttctgtcttgcttacaactttgtacacttcacgacgagatgctgcactggttccgggcagttgagtgttgcgtgaggcttcttcatgtacgaaacggaaattgcaaatatcatctcggggaggagacctttaagctagctcagacatatatggacaaacttagtaagcacggtcagcaagccaataaggctgctttgtatggggagctctgcgccctcttgtttgccaaatcacactacgatgaggcgtataagtggtgtattgaagctatgaaggaaataaccgctggactgcctgttaaggttgtcgtagacgtgttaaggcaagcctccaaagcctgcgtggtcaagcgcgagttcaagaaggccgaacaactcattaagcacgctgtgtacctcgcacgggaccactttgggtccaaacaccctaagtacagtgacacgttgctcgactacggattctacttgctaaacgtggacaacatctgtcagagtgtggcgatataccaggctgctttggatattagacagtctgtctttggcggtaaaaacattcacgtggcaaccgctcatgaagacctggcatactctagctacgtgcaccagtattccagtgggaagttcgataacgctttgtttcacgcggagcgagccattggaatcatcacacacatccttcccgaagatcatctgctcttggcaagttcaaaaagagtcaaggccctgatactcgaagagatcgccatcgattgccacaacaaagagacagaacaacggctcctgcaagaagctcacgacctgcatcttagcagtttacagctcgccaaaaaagcattcggagagttcaatgtccagactgctaaacattatggtaatctgggcaggctataccagtctatgcgcaaatttaaggaggcagaggagatgcatataaaggctatacaaatcaaagagcaactgctcggccaggaagactatgaggttgctctctccgtggggcatctagccagcttatacaattatgacatgaaccaatacgagaatgctgaaaagctctatctgcgatccatcgctatcggaaaaaaactatttggagagggctatagtggtcttgaatacgactatcgtgggctcataaaactatacaactccattgggaattacgagaaggtcttcgaatatcataacgtcctttctaattggaaccgcctccgtgatagacagtacagcgtgactgacgccttggaggatgtgtccactagccctcagtcaaccgaagaagttgtccagtctttccttatctcccagaacgtggaaggtccctcatgttag

SEQ ID NO: 164453 - DNA, 1758 bp, Artificial Sequence
  derived and/or modified sequence
atggccgccgtggaactcgagtggatccctgaaactctttataacactgccattagtgcggtcgtcgacaattatataagaagcaggcgcgatatcaggagtcttccagaaaatatccagttcgacgtttattataaactttaccagcaaggaaggttatgtcagctaggaagtgaattctgtgagctggaggtcttcgctaaagtactgagagccttggataagaggcatctgcttcaccattgtttccaggccttgatggaccacggagtgaaagttgcgtcagtgctggcctattctttctcacgtaggtgttcttacattgccgaaagtgacgccgccgtaaaagaaaaagctattcaggttggattcgtgctgggcgggttccttagcgacgccggatggtattccgacgccgaaaaagtttttctgtcttgcctgcagctttgtacactgcatgatgagatgttacactggttcagagctgtggaatgttgcgtgagactcttacacgttcgaaatggaaattgtaaatatcaccttggcgaagagacgttcaaacttgcccaaacttacatggataagctgtcaaagcacggacagcaagccaataaggctgcattgtacggagaactatgcgcactgctatttgctaaaagccactacgacgaggcttataaatggtgcatcgaggctatgaaagagatcaccgctggcctgccagtgaaagtagtcgtcgatgtcctcagacaagcctctaaggcctgcgtcgtcaagcgggagttcaagaaagcagagcagctaatcaaacacgctgtatatctcgcacgtgaccacttcggatccaagcaccccaagtactctgataccttgctcgactacggattttatctgctcaacgtggacaacatctgccagtctgtggcaatctatcaggccgcactcgatatcagacagagtgtatttggcggtaagaacattcacgtcgccacggctcatgaggatctggcctattcctcttacgtgcaccagtactctagcgggaagtttgacaacgccttgttccacgctgagagggctattggcatcataacccacattctgcctgaggatcatctgcttcttgccagtagtaaacgcgtaaaggccctcatactggaggagattgctattgactgccataacaaggagaccgaacaaagactgctgcaagaagcacacgatctgcacctgtcttctcttcaactggcaaaaaaggctttcggcgaattcaacgtacagactgcaaagcactacgggaacttgggcagactttatcagagcatgaggaaatttaaggaggccgaggaaatgcacattaaggccatccagattaaggaacagctcctaggccaggaggattatgaggtcgctctgagtgtgggccatttggcctcactatataattacgacatgaatcaatacgaaaatgccgagaaactgtatctccggtctatagccatcgggaagaagctgttcggcgagggttattccggtcttgagtacgattacaggggtctgataaagctctacaactctattggtaactatgagaaagtctttgagtatcataacgttctctccaactggaatagattacgagataggcagtattccgttaccgacgctttggaggacgtgagcacatctccacagtcaacggaggaagtcgttcaaagtttcctcatttcccaaaacgtggagggtccttcctgttag

SEQ ID NO: 164454 - DNA, 1758 bp, Artificial Sequence
  derived and/or modified sequence
atggccgccgtggaactcgagtggatccctgaaactctttataacactgccattagtgcggtcgtcgacaattatataagaagcaggcgcgatatcaggagtcttccagaaaatatccagttcgacgtttattataaactttaccagcaaggaaggttatgtcagctaggaagtgaattctgtgagctggaggtcttcgctaaagtactgagagccttggataagaggcatctgcttcaccattgtttccaggccttgatggaccacggagtgaaagttgcgtcagtgctggcctattctttctcacgtaggtgttcttacattgccgaaagtgacgccgccgtaaaagaaaaagctattcaggttggattcgtgctgggcgggttccttagcgacgccggatggtattccgacgccgaaaaagtttttctgtcttgcctgcagctttgtacactgcatgatgagatgttacactggttcagagctgtggaatgttgcgtgagactcttacacgttcgaaatggaaattgtaaatatcaccttggcgaagagacgttcaaacttgcccaaacttacatggataagctgtcaaagcacggacaacaagccaacaaggcagcactgtacggggaactttgcgcactgctgtttgctaaatcccactacgatgaagcctacaaatggtgcattgaagctatgaaagaaataacagcaggactacccgtgaaagtggtggtggacgtgttgcgccaggcaagcaaagcttgtgtcgtgaagagggagttcaaaaaggccgagcagctcattaaacatgccgtgtacctcgcgagggatcatttcggatcaaaacatccaaaatactcagatactctactcgattacggcttctatcttcttaatgttgacaacatttgccagtccgttgctatttaccaagctgctctcgatattcggcaatctgtgttcggaggcaagaatatccatgtagctaccgctcatgaggacctggcctattcttcctatgtccaccagtacagcagtggcaagttcgacaatgctctgtttcatgcggaaagagctatcggcatcataacccacatactccctgaagatcatctcttgcttgcttcctcaaaacgagtgaaggcccttattttggaagagatcgctattgattgtcacaacaaagagacagaacagcgactcctgcaagaggcccatgacctacacctgtcttccctgcagctggctaaaaaagccttcggagaattcaacgtccaaacggccaaacactacggtaacttaggacgcttatatcagtcaatgagaaagtttaaagaagcggaagaaatgcacattaaagcaatccaaatcaaagaacagctcctgggacaagaggattacgaggtggctctgagcgtcggccacctagccagcctgtacaactatgacatgaaccagtatgaaaacgccgagaaactgtacctacgatcaattgccattggcaaaaagctgtttggcgagggctactcagggcttgaatatgattatagaggcttaattaagctgtataatagtattggcaactatgagaaggtgttcgagtatcataatgtgttatctaattggaaccgactgagggatagacaatactccgttacagatgcccttgaagacgtctctacaagtccccagtctaccgaagaagttgtacagtcctttctgatttcccaaaatgtggaggggcctagttgttag

SEQ ID NO: 164455 - DNA, 1758 bp, Artificial Sequence
  derived and/or modified sequence
atggccgccgtggagctggagtggatccccgagaccctgtacaacaccgccatcagcgccgtggtggacaactacatcagaagcagaagagacatcagaagcctgcccgagaacatccagttcgacgtgtactacaagctgtaccagcagggcagactgtgccagctgggcagcgagttctgcgagctggaggtgttcgccaaggtgctgagagccctggacaagagacacctgctgcaccactgcttccaggccctgatggaccacggcgtgaaggtggccagcgtgctggcctacagcttcagcagaagatgcagctacatcgccgagagcgacgccgccgtgaaggagaaggccatccaggtgggcttcgtgctgggcggcttcctgagcgacgccggctggtacagcgacgccgagaaggtgttcctgagctgcctgcagctgtgcaccctgcacgacgagatgctgcactggttcagagccgtggagtgctgcgtgagactgctgcacgtgagaaacggcaactgcaagtaccacctgggcgaggagaccttcaagctggcccagacctacatggacaagctgagcaagcacggccagcaggccaacaaggccgccctgtacggcgagctgtgcgccctgctgttcgccaagagccactacgacgaggcctacaagtggtgcatcgaggccatgaaggagatcaccgccggcctgcccgtgaaggtggtggtggacgtgctgagacaggccagcaaggcctgcgtggtgaagagagagttcaagaaggccgagcagctgatcaagcacgccgtgtacctggccagagaccacttcggcagcaagcaccccaagtacagcgacaccctgctggactacggcttctacctgctgaacgtggacaacatctgccagagcgtggccatctaccaggccgccctggacatcagacagagcgtgttcggcggcaagaacatccacgtggccaccgcccacgaggacctggcctacagcagctacgtgcaccagtacagcagcggcaagttcgacaacgccctgttccacgccgagagagccatcggcatcatcacccacatcctgcccgaggaccacctgctgctggccagcagcaagagagtgaaggccctgatcctggaggagatcgccatcgactgccacaacaaggagaccgagcagagactgctgcaggaggcccacgacctgcacctgagcagcctgcagctggccaagaaggccttcggcgagttcaacgtgcagaccgccaagcactacggcaacctgggcagactgtaccagagcatgagaaagttcaaggaggccgaggagatgcacatcaaggccatccagatcaaggagcagctgctgggccaggaggactacgaggtggccctgagcgtgggccacctggccagcctgtacaactacgacatgaaccagtacgagaacgccgagaagctgtacctgagaagcatcgccatcggcaagaagctgttcggcgagggctacagcggcctggagtacgactacagaggcctgatcaagctgtacaacagcatcggcaactacgagaaggtgttcgagtaccacaacgtgctgagcaactggaacagactgagagacagacagtacagcgtgaccgacgccctggaggacgtgagcaccagcccccagagcaccgaggaggtggtgcagagcttcctgatcagccagaacgtggagggccccagctgctag

SEQ ID NO: 164456 - protein, 187 aa, Artificial Sequence
  derived and/or modified sequence
MGNKQTIFTEEQLDNYQDCTFFNKKDILKLHSRFYELAPNLVPMDYRKSPIVHVPMSLIIQMPELRENPFKERIVAAFSEDGEGNLTFNDFVDMFSVLCESAPRELKANYAFKIYDFNTDNFICKEDLELTLARLTKSELDEEEVVLVCDKVIEEADLDGDGKLGFADFEDMIAKAPDFLSTFHIRI

SEQ ID NO: 164457 - DNA, 564 bp, Artificial Sequence
  derived and/or modified sequence
atgggcaacaagcagaccatcttcaccgaggagcagctggacaactaccaggactgcaccttcttcaacaagaaggacatcctgaagctgcacagcagattctacgagctggcccccaacctggtgcccatggactacagaaagagccccatcgtgcacgtgcccatgagcctgatcatccagatgcccgagctgagagagaaccccttcaaggagagaatcgtggccgccttcagcgaggacggcgagggcaacctgaccttcaacgacttcgtggacatgttcagcgtgctgtgcgagagcgcccccagagagctgaaggccaactacgccttcaagatctacgacttcaacaccgacaacttcatctgcaaggaggacctggagctgaccctggccagactgaccaagagcgagctggacgaggaggaggtggtgctggtgtgcgacaaggtgatcgaggaggccgacctggacggcgacggcaagctgggcttcgccgacttcgaggacatgatcgccaaggcccccgacttcctgagcaccttccacatcagaatctag

SEQ ID NO: 164458 - DNA, 564 bp, Artificial Sequence
  derived and/or modified sequence
atgggaaataagcaaacaatttttacagaagaacaactcgacaactaccaggattgcacattcttcaataaaaaggacatcctgaaacttcactctcggttttacgagctggcaccaaatttggtgccaatggattacaggaaaagccctatcgtgcacgtgccaatgtccctcattatccagatgcccgagctaagagagaatcctttcaaggagcgcatagtagctgcatttagcgaggacggggaggggaaccttacattcaatgatttcgtggacatgttctcagttctgtgtgagtcggccccacgcgagctcaaggccaactatgcttttaagatctatgactttaataccgacaactttatctgcaaagaagacctggaacttacccttgcacgcctgactaagagcgagctggacgaagaggaggtggttctcgtctgcgacaaagttatcgaagaggcagacctggacggagacggtaagctgggttttgcagactttgaggatatgatcgccaaagcccctgattttctgtccacgttccatatacggatttag

SEQ ID NO: 164459 - DNA, 564 bp, Artificial Sequence
  derived and/or modified sequence
atgggcaacaagcagaccatcttcacagaggagcagctggacaactaccaggactgcaccttcttcaacaagaaggacatcctgaagctgcacagccgcttctatgagctggcccccaacctggtgcccatggactacaggaagagccccatcgtgcacgtgcccatgagcctcatcatccagatgcctgagctgcgggagaaccccttcaaggagcgcatcgtggccgccttctctgaagatggagagggcaacctgaccttcaatgactttgtggacatgttttctgtgctgtgtgagagcgccccccgggagctgaaggccaactatgccttcaagatctatgacttcaacacagacaacttcatctgcaaggaggacctggagctgaccctggcccggctgaccaagtctgagctggatgaggaggaggtggtgctggtgtgtgacaaggtgattgaggaggccgacctggatggagatggcaagctgggctttgctgactttgaggacatgattgccaaggccccagacttcctgagcaccttccacatccgcatctag

SEQ ID NO: 164460 - DNA, 564 bp, Artificial Sequence
  derived and/or modified sequence
atgggcaacaagcagaccatcttcaccgaggagcagctggacaactaccaggactgtaccttttttaataaaaaagatatcctgaagctccactcacggttctacgagctggctcccaacctggtgccaatggactacagaaaatccccaattgtgcacgttcctatgtcgcttattatacaaatgcccgaattgagggagaatccatttaaagagaggatcgtggctgccttctctgaggacggcgaggggaatttaaccttcaacgacttcgtggacatgttttcagtcctgtgcgagtcggcacccagagagctcaaggcaaattatgcttttaagatttatgatttcaataccgataactttatttgtaaggaggatttggagctcactttagcccggctgactaagtcggaactcgacgaagaagaagtggtcttggtctgcgataaggtgattgaggaagcggacctggacggagacggcaagttaggcttcgccgacttcgaagacatgatcgcaaaggcccctgactttttaagtaccttccacatcaggatctag

SEQ ID NO: 164461 - DNA, 564 bp, Artificial Sequence
  derived and/or modified sequence
atgggaaataagcagactatctttacggaagagcagctggacaattaccaggactgtacgtttttcaataagaaagatatcttaaaactccattctagattctacgagcttgccccaaacctggtgcctatggattatagaaagagccctatcgtgcatgtcccgatgtctttgataatccaaatgccggaacttcgtgagaacccattcaaggaaagaattgttgccgctttctccgaagacggagaagggaacttaacgttcaacgacttcgttgatatgttttcagtgttgtgcgaatcagctccacgagagctgaaggcaaactatgcctttaagatttatgacttcaacacagacaactttatatgtaaggaggacctggagctcactctggctaggctgactaaatctgagctcgacgaggaggaagtggttttggtttgtgacaaagtgatcgaggaggccgatttagatggagatggaaagctgggattcgcggacttcgaagacatgatcgcaaaagcgcctgactttctgagcacattccacatccgaatctag

SEQ ID NO: 164462 - DNA, 1598 bp, Artificial Sequence
  derived and/or modified sequence
gcgggagccaagggttcgtgccgggcagcgtctcccggggccaggtcgcctcctgccgggacccgggcgcgctgcagccgcggagccgggtgccccgccctcttcccgccggcggcggagtcgctgccgctccgggttcccgtccccgcctccgagacccccgcgcgcctcctccaggcgagctgcggggcgggaagggtccggccaccgtgggccgctgccagccgcggggctgccgagggccgcgggcacggggcgctggctccgggtctggcggccgctgatgggagtcggagcccgggcgggcgagcggcggcgcggcggccaccatggggaacaagcagaccatcttcaccgaagagcagctagacaactaccaggactgcaccttcttcaataagaaggacatcctcaagctgcattcgcgattctatgagctggcccccaacctcgtcccaatggactacaggaagagccccatcgtccacgtgcccatgagcctcatcatccagatgccagagctccgggagaatcccttcaaagaaaggatcgtggcggcgttttccgaggatggtgaggggaacctcactttcaacgactttgtggacatgttttccgtgctctgcgagtcggctccccgagagctcaaggcaaactatgccttcaagatctatgacttcaacactgacaacttcatctgcaaggaggacctggagctgacgctggcccggctcactaagtcagagctggatgaggaggaggtggtgcttgtgtgcgacaaggtcattgaggaggctgacttggacggtgacggcaagctgggctttgctgacttcgaggacatgattgccaaggcccctgacttcctcagcactttccacatccggatctgaggacactgccgaggctgtaggggcctagaagtccaccatcctgccctgcagtcacatgggtgtggcctccaagctccccaggaaagcagtggcagcctctggggtttacaccacaaatatatcctgtggccctttcagcaaaaaaaaaaccttaaccaggaagggggcctgtgaaggttaggacccttcccacagccccgctgtggtccagccccgggacccatggcctctctccaggccctccgcaccccgccccatgccccagtcctttcctactccagaaatgctccccacccccccaaagagggaaaagcagataacccaacaggaggtggtggggtctgacgtgtccaagtgctggcagacaccctggtcacccaggacagagcggaaaaaaaaaaaagaggtcagggttttaacgagctatgcaatctttttccaaaacccaaggttgggctgcttcccacccctgcctgttccccttctcccggcctccttcacaatgtgaagctgtgggtgcagtgggcccaagggctcttgctcctgtctctgcctctgggtcatgagtaccaccctgcctgcctccccaacaccgtggaatcctcactggtgtgctgtccacagatttgtgaactcctggtagtaaaacacttttgcatccctttgctctccatgtatgctaatgttaggaaatgtttgagggta

SEQ ID NO: 164463 - protein, 191 aa, Artificial Sequence
  derived and/or modified sequence
MGGSGSRLSKELLAEYQDLTFLTKQEILLAHRRFCELLPQEQRSVESSLRAQVPFEQILSLPELKANPFKERICRVFSTSPAKDSLSFEDFLDLLSVFSDTATPDIKSHYAFRIFDFDDDGTLNREDLSRLVNCLTGEGEDTRLSASEMKQLIDNILEESDIDRDGTINLSEFQHVISRSPDFASSFKIVL

SEQ ID NO: 164464 - DNA, 576 bp, Artificial Sequence
  derived and/or modified sequence
atgggcggatcagggtctcggctcagtaaagaattgcttgctgaatatcaggatctgacctttctaacaaaacaagaaattctgcttgcacacagacggttctgtgagctgctgccccaagagcagagatcagttgagagctctctgcgcgcccaagttccattcgagcaaattctctcactccctgagctcaaggccaacccattcaaagaacgcatttgccgggtttttagtacttcacccgcgaaggactccctgagtttcgaggactttttggatttgctgtcagtcttctccgatactgctacccccgatataaagtctcactacgcattccgcattttcgactttgatgatgacggaaccctgaacagggaagatcttagtaggttagtgaattgcctgactggcgagggagaggatacacgactgtccgcatctgaaatgaagcaattgattgacaacatcctcgaggagagcgatatcgacagagacgggaccattaatctttcggaatttcagcacgtgattagtagaagcccagactttgcctcatctttcaaaattgtgctgtag

SEQ ID NO: 164465 - DNA, 576 bp, Artificial Sequence
  derived and/or modified sequence
atgggcggcagcggcagccggctgagcaaggagctgctggccgagtaccaggacctgaccttcctgaccaagcaggagatcctgctggcccaccggcgcttctgtgagctgctgccccaggagcagaggtctgtggagagcagcctgcgggcccaggtgccctttgagcagatcctgagcctgcctgagctgaaggccaaccccttcaaggagcgcatctgcagggtcttcagcaccagccctgccaaggacagcctgagctttgaggacttcctggacctgctgagcgtcttcagtgacacagccaccccagacatcaagagccactacgccttccgcatctttgattttgatgatgatggcaccctgaaccgggaggacctgagccggctggtgaactgcctgaccggggagggggaggacacccggctgagcgccagcgagatgaagcagctgattgacaacatcctggaggagagtgacatcgacagagatggcaccatcaacctgtctgagttccagcacgtgatcagccgcagcccagactttgccagcagcttcaagatcgtgctgtag

SEQ ID NO: 164466 - DNA, 576 bp, Artificial Sequence
  derived and/or modified sequence
atgggcggcagcggcagccggctgagcaaggagctgctggccgagtaccaggacctcactttcttaaccaaacaggaaattctgttagcgcaccgcaggttttgtgagctgttgccacaggaacagcggagcgtcgagagttcactgcgcgcccaggtcccctttgagcagatcctgtctttaccagagttaaaggccaacccatttaaagagcgtatctgcagagtctttagcacatcaccagcaaaagactcgctcagcttcgaagattttctcgacctccttagtgtttttagcgacactgccacccccgatattaagtcccactatgccttccggattttcgattttgacgacgatggtaccctcaatcgggaggatctgtcacgcctggtgaattgcttgacaggtgagggagaggacaccaggctgagtgcctccgagatgaagcagctcatagataatatactagaagaatctgacatcgaccgcgacggaacaatcaacctatccgaattccagcacgtaatttctcgcagtcccgatttcgcctcctccttcaagatagtgttgtag

SEQ ID NO: 164467 - DNA, 576 bp, Artificial Sequence
  derived and/or modified sequence
atgggtggaagcggaagccgactcagcaaggagctcctcgcagagtaccaggatctgacctttttaacaaagcaggaaatattactcgctcatagaaggttctgtgaactccttcctcaggagcagcgctcagttgaatcaagcttgcgcgcacaggtgcccttcgaacagatcctatctctgcctgagctgaaggcgaatccatttaaagagagaatctgcagggtcttttccactagccccgctaaggattcactgtccttcgaggactttcttgacctgctctcggttttttctgacacggcgacacccgacatcaagtctcactatgctttccggatttttgattttgatgacgacggtacgctgaaccgagaggatctgagccggctcgttaattgcttgactggagaaggcgaggacacacgtttatctgcatccgagatgaagcagctaattgacaacatcctcgaagagagcgatatcgacagagacgggaccattaacctttccgaatttcagcacgtgattagccgcagcccagacttcgcatccagctttaaaatcgttttgtag

SEQ ID NO: 164468 - DNA, 1247 bp, Artificial Sequence
  derived and/or modified sequence
ggctgggaacgcctggcagcttttaggagggggcgggcccgggggtggtggccccaggagcggttgccgcggggaccgggcagtgacgcggcccaagggcggaagtgagaaagttgtctgcgtctcgaggcgagttggcggagctgtgcgcgcggcggggcgatggggggctcgggcagtcgcctgtccaaggagctgctggccgagtaccaggacttgacgttcctgacgaagcaggagatcctcctagcccacaggcggttttgtgagctgcttccccaggagcagcggagcgtggagtcgtcacttcgggcacaagtgcccttcgagcagattctcagccttccagagctcaaggccaaccccttcaaggagcgaatctgcagggtcttctccacatccccagccaaagacagccttagctttgaggacttcctggatctcctcagtgtgttcagtgacacagccacgccagacatcaagtcccattatgccttccgcatctttgactttgatgatgacggaaccttgaacagagaagacctgagccggctggtgaactgcctcacgggagagggcgaggacacacggcttagtgcgtctgagatgaagcagctcatcgacaacatcctggaggagtctgacattgacagggatggaaccatcaacctctctgagttccagcacgtcatctcccgttctccagactttgccagctcctttaagattgtcctgtgacagcagccccagcgtgtgtcctggcaccctgtccaagaacctttctactgctgagctgtggccaaggtcaagcctgtgttgccagtgcgggccaagctggcccagcctggagctggcgctgtgcagcctcaccccgggcaggggcggccctcgttgtcagggcctctcctcactgctgttgtcattgctccgtttgtgtttgtactaatcagtaataaaggtttagaagtttgaccctatgtgtgacatgagatacactggtatgaggaaggactggacttctcttctaagagccttcaatcatcctaggaataagcagcatatcgagcagaggccagcgggaagtcaagccgcacccacgctggctgtccccgtgggagggtgtgaggatgaaggggcagcaggaggtgtgggactcgcctgtatcctgattggggtggtggttagatgagtctctgcatgcatcaaaatgtaaagaaccgtacatcagtaaagtctattttactgca

SEQ ID NO: 164469 - DNA, 576 bp, Artificial Sequence
  derived and/or modified sequence
atgggcggcagcggcagcagactgagcaaggagctgctggccgagtaccaggacctgaccttcctgaccaagcaggagatcctgctggcccacagaagattctgcgagctgctgccccaggagcagagaagcgtggagagcagcctgagagcccaggtgcccttcgagcagatcctgagcctgcccgagctgaaggccaaccccttcaaggagagaatctgcagagtgttcagcaccagccccgccaaggacagcctgagcttcgaggacttcctggacctgctgagcgtgttcagcgacaccgccacccccgacatcaagagccactacgccttcagaatcttcgacttcgacgacgacggcaccctgaacagagaggacctgagcagactggtgaactgcctgaccggcgagggcgaggacaccagactgagcgccagcgagatgaagcagctgatcgacaacatcctggaggagagcgacatcgacagagacggcaccatcaacctgagcgagttccagcacgtgatcagcagaagccccgacttcgccagcagcttcaagatcgtgctgtag

SEQ ID NO: 164470 - protein, 652 aa, Artificial Sequence
  derived and/or modified sequence
MRGGGFGDRDRDRDRGGFGARGGGGLPPKKFGNPGERLRKKKWDLSELPKFEKNFYVEHPEVARLTPYEVDELRRKKEITVRGGDVCPKPVFAFHHANFPQYVMDVLMDQHFTEPTPIQCQGFPLALSGRDMVGIAQTGSGKTLAYLLPAIVHINHQPYLERGDGPICLVLAPTRELAQQVQQVADDYGKCSRLKSTCIYGGAPKGPQIRDLERGVEICIATPGRLIDFLESGKTNLRRCTYLVLDEADRMLDMGFEPQIRKIVDQIRPDRQTLMWSATWPKEVRQLAEDFLRDYTQINVGNLELSANHNILQIVDVCMESEKDHKLIQLMEEIMAEKENKTIIFVETKRRCDDLTRRMRRDGWPAMCIHGDKSQPERDWVLNEFRSGKAPILIATDVASRGLGFDVEDVKFVINYDYPNSSEDYVHRIGRTARSTNKGTAYTFFTPGNLKQARELIKVLEEANQAINPKLMQLVDHRGGGGGGGGRSRYRTTSSANNPNLMYQDECDRRLRGVKDGGRRDSASYRDRSETDRAGYANGSGYGSPNSAFGAQAGQYTYGQGTYGAAAYGTSSYTAQEYGAGTYGASSTTSTGRSSQSSSQQFSGIGRSGQQPQPLMSQQFAQPPGATNMIGYMGQTAYQYPPPPPPPPPSRK

SEQ ID NO: 164471 - protein, 729 aa, Artificial Sequence
  derived and/or modified sequence
LPTGFVAPILCVLLPSPTREAATVASATGDSASERESAAPAAAPTAEAPPPSVVTRPEPQALPSPAIRAPLPDLYPFGTMRGGGFGDRDRDRDRGGFGARGGGGLPPKKFGNPGERLRKKKWDLSELPKFEKNFYVEHPEVARLTPYEVDELRRKKEITVRGGDVCPKPVFAFHHANFPQYVMDVLMDQHFTEPTPIQCQGFPLALSGRDMVGIAQTGSGKTLAYLLPAIVHINHQPYLERGDGPICLVLAPTRELAQQVQQVADDYGKCSRLKSTCIYGGAPKGPQIRDLERGVEICIATPGRLIDFLESGKTNLRRCTYLVLDEADRMLDMGFEPQIRKIVDQIRPDRQTLMWSATWPKEVRQLAEDFLRDYTQINVGNLELSANHNILQIVDVCMESEKDHKLIQLMEEIMAEKENKTIIFVETKRRCDDLTRRMRRDGWPAMCIHGDKSQPERDWVLNEFRSGKAPILIATDVASRGLDVEDVKFVINYDYPNSSEDYVHRIGRTARSTNKGTAYTFFTPGNLKQARELIKVLEEANQAINPKLMQLVDHRGGGGGGGGRSRYRTTSSANNPNLMYQDECDRRLRGVKDGGRRDSASYRDRSETDRAGYANGSGYGSPNSAFGAQAGQYTYGQGTYGAAAYGTSSYTAQEYGAGTYGASSTTSTGRSSQSSSQQFSGIGRSGQQPQPLMSQQFAQPPGATNMIGYMGQTAYQYPPPPPPPPPSRK

SEQ ID NO: 164472 - protein, 181 aa, Artificial Sequence
  derived and/or modified sequence
MQLVDHRGGGGGGGGRSRYRTTSSANNPNLMYQDECDRRLRGVKDGGRRDSASYRDRSETDRAGYANGSGYGSPNSAFGAQAGQYTYGQGTYGAAAYGTSSYTAQEYGAGTYGASSTTSTGRSSQSSSQQFSGIGRSGQQPQPLMSQQFAQPPGATNMIGYMGQTAYQYPPPPPPPPPSRK

SEQ ID NO: 164473 - DNA, 1959 bp, Artificial Sequence
  derived and/or modified sequence
atgagggggggcgggtttggcgaccgagatagggacagggaccgggggggcttcggcgcccgagggggcggtggcctccctccaaaaaagttcggaaatcctggagaacggctccgtaagaaaaagtgggatcttagtgaactccccaagtttgagaagaatttttatgttgaacacccagaagttgcacgattgacaccatatgaggtggacgaactaagaagaaaaaaagagatcactgttcggggtggggacgtctgtccaaagccagtctttgcatttcaccacgcaaactttcctcagtatgtcatggatgtgcttatggatcagcatttcaccgagccaacccctatccagtgccaggggttcccactggccctgtccggtcgggatatggtgggaatcgctcagacagggtcgggtaagacgctagcctacctcctccctgctattgtgcatattaaccaccaaccatatctcgaaagaggagatggtccaatctgtctggtattggcacctactcgggagctcgcacaacaggtgcaacaggttgcagacgactacggtaaatgttcacgtttgaaaagcacatgcatttatggcggggctcccaagggacctcagatacgggatctggagcggggggtggagatatgcattgccacgccaggacgcctgatagatttcctcgaaagcggcaagactaacctgaggcgttgcacataccttgtcctggatgaagcagacaggatgttggacatggggttcgaaccgcagatccggaagatcgtggaccagatcagacctgataggcagacactcatgtggagcgcaacatggccaaaagaagttaggcagctcgccgaagacttcttgagagattatacacagatcaacgtgggtaatctggaactcagtgcaaaccacaacatcttgcagattgtagacgtttgcatggaatcggagaaagaccacaagctgattcagctgatggaggaaattatggctgagaaagaaaataagactattatttttgtcgaaacgaagagacgctgcgatgacctgacgcgccgaatgcgccgcgacggttggccggccatgtgcatccacggcgataagagccagcccgagcgagactgggttctgaatgagtttcgcagcggcaaagcaccgatcttaatcgccacagacgtcgcaagtcgcggcctgggctttgacgtggaggacgtcaagttcgtaattaattacgattatcctaacagctccgaggactatgtgcacaggatcgggaggacagccaggtccacaaacaagggcaccgcttacacctttttcactccagggaacctgaagcaggctcgcgaactaattaaggtcttggaagaagcaaaccaggccattaatcctaagctgatgcaactagtcgatcataggggtggtggcggcggcgggggaggcaggtcccgttatcgcaccacgtcctctgcgaataacccgaatctgatgtatcaggatgagtgcgataggcgactgcggggcgtgaaggacggaggaaggagggactccgcgagttacagggaccggtccgaaactgatcgcgccggatacgccaatgggagtggctatggatcgccaaactcagcgttcggtgcccaggcgggtcagtacacgtacggccagggaacttatggagccgcggcctatggtacatcttcatatacggctcaggaatacggcgccggaacttatggcgcctccagcaccacttccactgggcggtcctctcagtcctcttctcagcaatttagcggcatcggtcgatcgggtcagcagcctcaacctctgatgtcccaacagtttgcccagccacccggcgccacaaacatgataggttacatgggccagactgcttaccaataccccccacctccccctccgcccccgccctcccgtaaatag

SEQ ID NO: 164474 - DNA, 2190 bp, Artificial Sequence
  derived and/or modified sequence
ctgccaacggggttcgtggcaccaatattgtgcgtgctcctgccctcgcctacaagagaagccgccactgtggcctctgccactggcgattctgcgtccgagagggagagcgcggcccctgcggctgcccccaccgcggaagcaccacccccaagcgtggtaactcgtcccgaaccacaggcactgccttcccccgcaattcgtgcccccctaccagatttataccccttcggcacaatgcgagggggaggattcggagatcgagaccgcgaccgggaccgtggaggattcggtgcccggggaggtggtgggttaccgccaaaaaagtttgggaatccaggagaaaggttgaggaagaaaaaatgggatctgtcagaactgcctaagtttgagaaaaatttctacgtggaacatccggaggtggcaaggttaactccatatgaggtcgacgagctccgtagaaagaaggaaataaccgtcagaggcggcgacgtgtgtcccaagccagtgttcgcatttcaccatgcaaactttccacagtacgtaatggatgtgctgatggatcagcacttcaccgaaccaactcctatccagtgccaaggattcccactcgctctcagtggaagggatatggtggggattgcccaaacaggaagcggcaagaccctggcttacctcttgccggccatcgtccatatcaatcatcagccataccttgaacgcggggatggtcctatctgtttggtacttgcgcctacccgagaattagcgcagcaggtgcaacaggtcgcagacgactacggtaagtgttccagactgaaatccacctgtatttacggaggtgctcccaaaggcccacagatacgcgatttagaaagaggagtcgagatctgcatcgcaactcccggaagattgatcgattttctcgaatccgggaagacaaacttgagacgctgcacctacttggtccttgatgaggcggaccggatgctcgacatgggcttcgagccacaaatccgcaaaattgtggaccaaattcgtcctgatcgacagaccctcatgtggtcagcgacttggcctaaagaggttcgccagttggcggaagactttcttagggactatactcagatcaatgtgggtaacttggaactaagtgccaaccacaatatcctccagatcgttgacgtttgtatggagtcagaaaaggatcataagctcatccaattaatggaggagattatggccgagaaggaaaataaaactataatcttcgtcgagacgaaaagaagatgtgatgatctgacacgtcgaatgcgacgggatggatggcctgccatgtgcatccacggggacaagagtcagccagagcgcgactgggtgctgaacgaatttcggtctggtaaggcacccatccttatcgccactgacgttgccagtcgcgggctggacgttgaagatgtgaaattcgtgatcaattacgattacccaaactcatctgaggattatgtgcatcggatagggcggaccgcaagatccaccaacaaaggcacagcctacactttttttacacctggtaacctcaaacaggcgagagagctgataaaagtgctcgaggaggcaaatcaagcaataaatccaaagctgatgcaactggtggatcataggggtggaggcggaggcggggggggcagaagtagatataggactacatcatctgctaacaatccgaatctcatgtatcaggatgagtgcgatcgcaggctcaggggcgtcaaggacgggggtagaagagatagcgcctcttatcgcgaccgctctgagacagatagggcgggatacgctaatggttcaggctacggaagcccaaatagcgccttcggcgctcaagccggacaatacacatatggtcagggtacctatggcgccgccgcatacggcacctcttcctacacagctcaggaatatggcgcaggcacatacggtgcctctagtacaacctcgacgggaagatcatcgcagtcctcctcacagcagttttccggaattgggcggtctggacaacagccccaacctctgatgtcacagcagttcgctcagccccctggtgcaaccaacatgatcggctatatgggtcagacagcctaccaatacccacctcctcctcccccccccccaccttcacggaagtag

SEQ ID NO: 164475 - DNA, 546 bp, Artificial Sequence
  derived and/or modified sequence
atgcagctggtggatcataggggggggggaggcggcgggggcggacgaagccggtataggactactagcagcgctaataacccgaacttaatgtatcaggacgaatgcgatcgaagactcagaggagttaaggatggggggagaagagattccgcttcttacagagatcggagcgaaacagatcgagccggatatgcgaatggcagtgggtacggcagcccaaacagtgcatttggagcccaggcaggccagtacacatacgggcagggcacgtatggagccgccgcatatggaacgagctcctacacagctcaggagtatggagcgggtacctatggcgctagtagcaccacctcaactgggagatcatcccagagtagtagccagcaattctccggcatcggccgctctggacaacagccacaaccccttatgagccagcaatttgcacaaccacctggcgctacaaatatgatcggctatatgggccagacggcataccagtatcctccaccccccccgcctcctccaccaagccggaaatag

SEQ ID NO: 164476 - DNA, 1959 bp, Artificial Sequence
  derived and/or modified sequence
atgagaggaggcggctttggagaccgggaccgggaccgggaccggggcggctttggagcccggggcggcggcggcctgccccccaagaagtttggaaatcctggagagcggctgaggaagaagaagtgggacctgtctgagctgcccaagtttgagaagaacttctacgtggagcaccctgaggtggcccggctgaccccctatgaggtggatgagctgcggaggaagaaggagatcaccgtgagaggaggagatgtgtgccccaagcctgtgtttgccttccaccacgccaacttcccccagtatgtgatggatgtgctgatggaccagcacttcacagagcccacccccatccagtgccagggcttccccctggccctgagcggccgggacatggtgggcatcgcccagacaggcagcggcaagaccctggcctacctgctgcctgccatcgtgcacatcaaccaccagccctacctggagagaggagatggccccatctgcctggtgctggcccccacccgggagctggcccagcaggtgcagcaggtggctgatgattatggcaagtgcagccggctgaagagcacctgcatctacggcggggcccccaagggcccccagatccgggacctggagcggggcgtggagatctgcatcgccaccccaggccgcctgattgacttcctggagagcggcaagaccaacctgcggcgctgcacctacctggtgctggatgaggccgacaggatgctggacatgggctttgagccccagatcaggaagatcgtggaccagatccggccagaccggcagaccctgatgtggagcgccacctggcccaaggaggtgcggcagctggccgaggacttcctgcgggactacacccagatcaacgtgggcaacctggagctgagcgccaaccacaacatcctgcagatcgtggatgtgtgcatggagagcgagaaggaccacaagctgatccagctgatggaggagatcatggccgagaaggagaacaagaccatcatctttgtggagaccaagaggcgctgtgatgacctgaccaggaggatgagaagagatggctggccagccatgtgcatccacggggacaagagccagcctgagcgggactgggtgctgaatgagttccgcagcggcaaggcccccatcctgattgccacagatgtggccagccggggcctgggctttgatgtggaggatgtgaagtttgtgatcaactatgactaccccaacagcagtgaagattatgtgcacagaattggaagaacagcccggagcaccaacaagggcacagcctacaccttcttcaccccaggcaacctgaagcaggcccgggagctgatcaaggtgctggaggaggccaaccaggccatcaaccccaagctgatgcagctggtggaccacagaggaggcggcggcggcggcggcggccgcagccgctaccgcaccaccagcagcgccaacaaccccaacctgatgtaccaggatgaatgtgaccggcggctgcggggcgtgaaggatggcggcagaagagacagcgccagctacagagacagaagtgaaacagaccgggccggctacgccaacggcagcggctacggcagccccaacagcgcctttggagcccaggccggccagtacacctacggccagggcacctatggagctgctgcctacggcaccagcagctacacagcccaggagtatggagctggcacctatggagccagcagcaccaccagcacaggccgcagcagccagagcagcagccagcagttctctggaattggccgcagcggccagcagccccagcccctgatgagccagcagtttgcccagcccccaggggccaccaacatgattggctacatgggccagacagcctaccagtacccacctcctcctcctcctcctccacccagcaggaagtag

SEQ ID NO: 164477 - DNA, 2190 bp, Artificial Sequence
  derived and/or modified sequence
ctgcccactggatttgtggcccccatcctgtgtgtgctgctgcccagccccacccgggaggccgccaccgtggccagcgccaccggggacagcgccagcgagcgggagagcgctgccccagctgctgcccccacagctgaggcccccccacccagcgtggtgaccaggcctgagccccaggccctgcccagccctgccatccgggcccccctgcctgacctgtaccccttcggcaccatgaggggcggcggctttggagaccgggaccgggaccgggacagaggaggctttggagcccggggcggcggcggcctgccccccaagaagtttggaaatcctggagagcggctgaggaagaagaagtgggacctgtctgagctgcccaagtttgagaagaacttctacgtggagcaccctgaggtggcccggctgaccccctatgaggtggatgagctgcggaggaagaaggagatcaccgtgagaggaggagatgtgtgccccaagcctgtgtttgccttccaccacgccaacttcccccagtatgtgatggatgtgctgatggaccagcacttcacagagcccacccccatccagtgccagggcttccccctggccctgagcggccgggacatggtgggcatcgcccagacaggcagcggcaagaccctggcctacctgctgcctgccatcgtgcacatcaaccaccagccctacctggagagaggagatggccccatctgcctggtgctggcccccacccgggagctggcccagcaggtgcagcaggtggctgatgattatggcaagtgcagccggctgaagagcacctgcatctatggaggagcccccaagggcccccagatccgggacctggagcggggcgtggagatctgcatcgccaccccaggccgcctgattgacttcctggagagcggcaagaccaacctgcggcgctgcacctacctggtgctggatgaagctgacaggatgctggacatgggctttgagccccagatcaggaagatcgtggaccagatccggccagaccggcagaccctgatgtggagcgccacctggcccaaggaggtgcggcagctggccgaggacttcctgcgggactacacccagatcaacgtgggcaacctggagctgagcgccaaccacaacatcctgcagatcgtggatgtgtgcatggagagcgagaaggaccacaagctgatccagctgatggaggagatcatggccgagaaggagaacaagaccatcatctttgtggagaccaagagaagatgtgatgacctgaccaggaggatgagaagagatggctggccagccatgtgcatccatggagacaagagccagcctgagcgggactgggtgctgaatgagttccgcagcggcaaggcccccatcctgattgccacagatgtggccagccggggcctggatgtggaggatgtgaagtttgtgatcaactatgactaccccaacagcagcgaggactatgtgcaccgcatcggccgcacagcccggagcaccaacaagggcacagcctacaccttcttcaccccaggcaacctgaagcaggcccgggagctgatcaaggtgctggaggaggccaaccaggccatcaaccccaagctgatgcagctggtggaccaccggggcggcggcggcggcggcggcggccgcagccgctaccgcaccaccagcagcgccaacaaccccaacctgatgtaccaggatgaatgtgaccggcggctgcggggcgtgaaggatggcggccggcgggacagcgccagctacagagacagaagtgaaacagacagagctggctacgccaatggaagtggctacggcagccccaacagcgccttcggggcccaggccggccagtacacctacggccagggcacctacggggctgctgcctacggcaccagcagctacacagcccaggagtatggagctggcacctacggggccagcagcaccaccagcacaggccgcagcagccagagcagcagccagcagttcagcggcatcggccgcagcggccagcagccccagcccctgatgagccagcagtttgcccagcccccaggggccaccaacatgattggctacatgggccagacagcctaccagtacccacctcctcctcctcctcctccacccagcaggaagtag

SEQ ID NO: 164478 - DNA, 546 bp, Artificial Sequence
  derived and/or modified sequence
atgcagctggtggaccaccggggcggcggcggcggcggcggcggccgcagccgctaccgcaccaccagcagcgccaacaaccccaacctgatgtaccaggatgaatgtgaccggcggctgcggggcgtgaaggatggcggccggcgggacagcgccagctacagagacagaagtgaaacagacagagctggctacgccaatggaagtggctacggcagccccaacagcgccttcggggcccaggccggccagtacacctacggccagggcacctacggggctgctgcctacggcaccagcagctacacagcccaggagtatggagctggcacctacggggccagcagcaccaccagcacaggccgcagcagccagagcagcagccagcagttcagcggcatcggccgcagcggccagcagccccagcccctgatgagccagcagtttgcccagcccccaggggccaccaacatgattggctacatgggccagacagcctaccagtacccacctcctcctcctcctcctccacccagcaggaagtag

SEQ ID NO: 164479 - DNA, 1959 bp, Artificial Sequence
  derived and/or modified sequence
atgcggggcggcggcttcggcgaccgggaccgggaccgggaccggggcggcttcggcgcccgcgggggcggaggccttcccccgaagaaattcgggaatccaggagagcggctgcgtaaaaaaaagtgggacctgagcgaactccccaagtttgagaagaatttttacgtagagcaccccgaggtggcacgtttgactccttacgaagtcgatgagctgaggagaaagaaggagattacagtcagaggaggtgatgtgtgccccaaacctgttttcgcttttcatcacgctaacttcccgcagtatgtaatggacgttctgatggaccagcattttactgagccaaccccgattcagtgccaggggttcccgctagccctcagtggaagggatatggtggggatcgcgcaaactggttcagggaaaacactcgcctatctgctgcctgccattgttcatatcaaccatcagccatatctggagaggggagacggccccatttgtcttgttttggccccgacgcgggaactggcacagcaagtgcagcaggtggccgatgactatgggaaatgcagccgccttaagagtacgtgtatttatggaggggccccgaagggcccccaaatccgcgatctcgaaagaggtgtagagatctgtatcgccacacccggccggctaatcgactttctagaaagtggaaagaccaatctgagaagatgtacgtatctagtcctggatgaggcagatagaatgttagacatgggctttgagcctcagatccggaaaatcgtagatcagattagacctgaccgacagaccctcatgtggagcgcgacttggcccaaggaggtgcgacagctcgctgaggactttctcagagactatacccagattaatgttggaaacctggaactgtcagccaatcacaatatcctgcagatcgtagacgtttgcatggaaagcgagaaagaccataaactgattcagttgatggaagaaattatggccgaaaaggaaaacaagaccatcatattcgtcgaaactaagaggcgatgcgatgacctgaccagacgcatgcgacgtgacggttggcctgcaatgtgtatccacggcgataaatcccagccagagcgggactgggtgctgaatgaattccgttcaggcaaggcaccgattcttatcgccaccgacgtggcctcaagaggtctggggttcgatgtagaggacgtcaagttcgtcataaattacgactaccctaacagcagtgaggactacgtccatcggattggacggacagcccgctccacaaataaaggaacggcctacactttttttacgcccggcaacctaaagcaagccagagagttgattaaggtgttagaggaggctaaccaagccataaacccaaaacttatgcaacttgttgaccatcgcggcggtggtggcggcggaggggggcgttctagatataggacgacatctagcgcaaacaaccccaatcttatgtatcaggacgagtgtgatcgcaggctgaggggggtgaaagatggcgggcgacgcgatagtgcctcttatcgggatcgttctgagactgacagggccggatatgctaacggcagcggatatggcagtccaaattctgctttcggcgcccaggccggccagtacacttacgggcaggggacttacggagccgcggcatatggcacgtcctcttataccgcccaagagtacggcgcaggaacttatggggcctcctctacaacttcaaccgggagaagttcacaatcatcgtcccagcaattcagtgggatcgggagaagtggacagcagccccaacccttaatgtcacagcagtttgcacagcctcccggggccaccaatatgatagggtatatgggacagaccgcctaccagtaccctccaccgccccccccacccccgccaagccggaaatag

SEQ ID NO: 164480 - DNA, 2190 bp, Artificial Sequence
  derived and/or modified sequence
ctgcccaccggcttcgtggcccccatcctgtgcgtgctgctgcccagtccgacccgggaagccgccaccgtggcttccgccaccggcgattctgcatcagaaagggaatcagcggccccggcagccgcccccaccgctgaggcaccccctccctcagtcgtgactcgccccgaaccgcaggcactcccatctcccgctatccgagcacctcttcctgacctatacccctttgggaccatgagggggggaggcttcggtgatcgggatcgcgatcgtgatagaggcggtttcggagccagaggcggtggaggacttccgcccaagaaatttggcaatccgggggagagactgcgaaaaaagaaatgggaccttagtgaactccccaagttcgaaaagaatttctatgtcgagcaccctgaagtggcccgtctcactccttacgaggtggatgaacttagaagaaaaaaagaaatcactgttcggggaggcgacgtctgtcccaaaccggtgtttgcatttcaccacgcaaattttccacagtacgtgatggacgtgctgatggaccagcatttcacagagccaacccccatccaatgccagggcttccccctagctctctctggccgcgatatggtgggcattgcgcagaccggcagcggtaagacactggcctacctccttcctgcaattgtccacattaaccaccagccttacttggagagaggcgatggtccaatctgccttgtactggcccctaccagagagttggctcagcaggtgcagcaggtggccgatgattatggcaagtgctctcgactgaaaagcacctgtatttacggtggggcccctaaagggccccagatcagggatctcgagagaggagtggagatttgtattgcaacccctggtcgcctcatagatttcctggagagtggcaagactaacctccgcagatgcacatacctggtgctcgacgaagccgatcgaatgcttgatatggggttcgagccgcagatcagaaagatcgtggatcagattcggcccgaccgtcaaactctgatgtggagcgcaacatggcctaaggaggtcaggcagttggctgaagatttcctcagggactatacacagatcaatgtgggtaacctggagttaagcgcaaatcataacatccttcagattgtggacgtatgcatggagtcagagaaagaccacaaactcatccagctcatggaggagattatggccgagaaagaaaacaagaccatcatctttgtggaaaccaaacggagatgcgatgatcttactcggcgtatgcgcagagacggctggcccgctatgtgtattcatggggacaaatcccaacctgagcgcgactgggtgcttaatgaattccgcagtggtaaggcccccatcctgatcgccaccgatgtcgctagtcggggtcttgacgtggaagacgtaaaatttgttattaactacgattatcctaatagcagcgaagactacgttcaccgcatcggtaggactgctagatccacaaacaagggcacagcttatacttttttcacacccgggaacctgaagcaggctcgcgagttaattaaggtcctggaagaagccaaccaggcaatcaacccaaaactgatgcagttggtcgatcaccggggtgggggaggaggtggaggagggcggtcccgctaccgaacaacaagctccgcaaacaaccctaaccttatgtaccaggatgagtgtgatcgaagactgcggggcgtaaaagacgggggccgcagagatagcgcaagctatcgcgacaggtctgagaccgacagagcaggctatgccaacggctctggctacgggtctccaaattctgcctttggggctcaagccggtcagtatacctacggccagggaacctatggcgccgccgcgtatggaacgagcagctataccgcccaagagtatggggctgggacatatggagcctcttcgaccacttctactgggagaagttcacagagcagttcccaacagttcagcggcatcggtcgttctggacagcagccgcagcctctcatgtcccagcaatttgcacagcctcccggagctaccaatatgatcgggtatatggggcaaactgcgtaccaatatccccctcctccgcccccacctccgccgtctagaaaatag

SEQ ID NO: 164481 - DNA, 546 bp, Artificial Sequence
  derived and/or modified sequence
atgcagctggtggaccaccggggcggcggcggcggcggcggcggccgaagcagatacagaacaaccagttccgcaaacaaccccaacctgatgtaccaagacgagtgtgatcggcgcctgcgaggcgtgaaagatgggggcagacgtgatagcgccagctatagggatagatctgaaactgatcgtgctggatatgctaatggatccggctacgggtcccctaatagcgccttcggggcgcaagccggccagtacacatatggacaaggtacttacggggctgccgcatacgggacgtcgtcttatacagcacaggaatacggtgcaggcacctatggagcctcctccaccacctctactggtcgctcatcgcagagcagttctcagcagttcagtgggataggaagatctggacagcagcctcagccactgatgtcccagcagttcgcccagccaccgggcgccaccaacatgatcggttatatgggacaaacggcttatcagtatccgcccccccccccccccccacctccaagtaggaagtag

SEQ ID NO: 164482 - DNA, 1959 bp, Artificial Sequence
  derived and/or modified sequence
atgagaggcggaggctttggagaccgagacagggatagagaccggggaggcttcggtgccagaggcggtggcggactcccccctaaaaaattcggcaaccctggagagcgcctccgtaagaagaagtgggacctgtctgagctgcccaagtttgaaaagaacttttatgtggagcacccagaggtggccaggttgaccccttacgaagtggatgaactgagacgaaagaaagagatcacggtaagaggaggagacgtttgccctaaaccagttttcgcattccaccacgctaattttccacagtatgttatggacgtactcatggaccagcattttacagagcctacacctatccagtgtcagggcttccccttagccctttccggacgagacatggtgggcattgctcagaccggctcaggcaagacgctcgcctaccttctgcccgctatcgtccacataaatcatcagccctacctggagcgcggagacggccctatctgtctggttctggccccaactagagagctggcccagcaggttcagcaggtggcggatgactacggaaagtgctctcgactcaaatctacttgcatttacgggggtgctcctaaaggccctcaaattagggatctggagcgcggtgtggagatttgcattgctacgccaggacggttgattgattttctcgagtctggcaagaccaatctgagacgatgcacatatctggtgctggacgaggcggatcgaatgctcgacatgggcttcgagccacaaattcgaaaaatcgtggaccagatcaggcccgacagacagactcttatgtggagcgccacttggccaaaagaagtccgacagctcgcagaggatttcttaagagactatacccaaatcaacgtgggcaacctggagttatccgccaatcataatatcctgcagatagtcgatgtgtgtatggaaagtgaaaaggaccataaactcatccagttgatggaggaaatcatggcagagaaggaaaataagacgatcattttcgtagaaacgaaacgcagatgcgatgatttgacaaggcggatgcgtagagacgggtggcctgccatgtgtatacatggcgacaagtcacagcccgagcgggactgggtgttaaatgagtttcgaagcggcaaagctcctattctgattgccacagatgtcgcttcacggggacttggcttcgatgtcgaggatgttaagttcgtaattaattacgattaccccaattcaagcgaggactacgtgcacaggatcggccgtacagcaagaagcacaaacaaagggactgcatacaccttcttcacccccggaaacctcaagcaggctcgcgagctgatcaaagtgctggaagaggcgaaccaggcaataaatcctaaattgatgcaactggtggaccatagaggaggaggtggtggtggtgggggaagatctagatataggacgacttcctcagcaaataatccaaatttaatgtaccaggacgaatgcgaccgacggttgagaggagtgaaggatggagggagaagggactccgcctcttacagagatagatcagagacagatcgggctggctacgccaacgggtcaggatatggatcacctaatagtgcatttggcgctcaggccggacagtacacgtatggccagggcacctacggggcagcagcgtatggtacctcttcttatacagcacaggaatacggtgcgggaacctacggtgcaagttcgacaacaagcacaggtcgttcgtcccagagctcttctcagcaatttagcggcatcggacggtctggccagcaaccgcagccactgatgtcccagcagttcgcccagcctcccggagcgacaaacatgattggctatatgggacagacggcctaccagtatcctccaccccctcctccccctcccccatccaggaagtag

SEQ ID NO: 164483 - DNA, 2190 bp, Artificial Sequence
  derived and/or modified sequence
ttgcctaccggttttgtggctcctattctctgcgtgcttttaccgagccccacgcgggaggcagcaacagtcgcatctgctaccggggatagtgcgtcggaacgagagtctgccgcacctgccgctgccccaacggccgaagctcctcctccctccgtggtgaccaggcctgagcctcaagcgttaccatcacccgctattagagccccactccccgacctctacccattcggaactatgaggggcggagggtttggagatagggaccgcgatcgagatcggggtggttttggtgcccgtggaggtgggggtctaccccctaaaaaatttggaaacccaggggaaagattgcgaaagaagaaatgggatctgtctgagctgccaaaattcgaaaaaaacttttacgtggagcacccagaggttgccaggctgactccttacgaagtcgacgagttgcgtcgaaaaaaagagatcacagttagaggaggcgacgtgtgccccaaaccggtatttgccttccaccatgctaacttcccgcaatacgtaatggacgtcctgatggatcagcacttcacagagcccaccccaatccagtgccaagggttcccgcttgccctgtctggaagggacatggtggggatcgcccagacagggagtggaaagacattagcctatctactgccggcaatcgtgcatatcaatcaccagccttacctagagcggggagacggcccaatttgtttggtgctcgcacccaccagggaactcgcccagcaggtccagcaggtggccgatgactacggaaaatgtagcagactgaaatcaacttgtatctacggcggtgccccaaaggggcctcagattcgggatttagagcggggagtagagatatgtatcgccaccccaggacgacttatagatttcctggagagcggaaaaactaatcttcgaaggtgtacgtacctggttctcgatgaggcagatcggatgctggacatgggattcgagccccagatcaggaagattgttgatcaaatcaggccagataggcagactctaatgtggagtgcaacgtggcctaaggaagtccggcagttagcagaggattttttgcgagattatacccagatcaacgttggcaatctggaactcagtgccaatcataatatcctgcagattgttgatgtttgtatggagtccgagaaagaccataagcttatccagctaatggaggaaatcatggccgagaaagaaaataaaactattatctttgtcgagactaaacgtagatgcgatgacctcactcgcagaatgaggagagacggctggcctgcgatgtgtattcacggcgacaaaagccaacccgagcgcgattgggtgttaaatgaattccgtagtggcaaggctccaattctcatcgccactgatgttgctagccggggactggatgttgaagacgtaaagtttgtgattaattacgattaccccaattcgagtgaggactatgtgcatcgcattggtcggacggcaagatctaccaataaggggacggcttacactttttttaccccagggaatttgaagcaggccagggagctgataaaggtcctagaagaagctaaccaggccatcaatcccaagctcatgcagctggtcgatcaccggggtggagggggagggggagggggacgatcacggtaccgaacaacttcttcggctaacaacccaaaccttatgtaccaggatgaatgtgatcggaggctccgaggagtcaaggacggcggtagaagagattccgctagctaccgggataggagtgaaaccgatcgcgctggttatgccaacggatcagggtacggtagtccaaactctgcctttggtgcgcaagccggtcagtacacctacggtcagggtacctacggcgcagccgcatacggaacatcctcctacaccgctcaggagtacggcgcaggcacttacggggcatcttctaccacctcaaccggacggtcaagtcaaagttctagccaacagttcagtgggatcggtagatcagggcagcagcctcaacctctcatgtcacagcaattcgcacaaccaccaggggcaacaaatatgattggctatatggggcagactgcctaccagtacccgcctcccccaccgcctccccctcctagcaggaaatag

SEQ ID NO: 164484 - DNA, 546 bp, Artificial Sequence
  derived and/or modified sequence
atgcaactggtcgaccaccgcggtgggggaggcggagggggaggcaggtcccggtaccgaacaacaagctctgcaaacaaccctaatttgatgtatcaggatgagtgcgacagacgcctgcgcggagtgaaagatggcggtcggcgagattcagcctcataccgcgatagatcggagaccgatcgcgcaggatatgctaacggctcaggctatggttcccccaactctgccttcggggctcaggctggtcagtacacatacgggcagggaacttacggcgctgccgcatacggcacaagctcgtatacggctcaggagtatggggcaggcacttatggcgcatccagcacgacttccacgggccgaagttctcagtcttctagtcaacagttttctggtatcggtcggtctggacaacagccacagcccctcatgtctcaacaattcgcacagcctcccggtgccactaacatgatcgggtacatggggcagacagcttatcagtatccaccaccccctccgcctccgcctccctcccggaaatag

SEQ ID NO: 164485 - DNA, 4770 bp, Artificial Sequence
  derived and/or modified sequence
gttaagttggagccgactcagcggcggccgccattttgtgcagtcgctgggaaggaaggagacgcctaaaccgcggcactgcccggtttgagcgtagccaaacctgcccaccggctttgtagccccgattctctgtgttttgctcccgtctccgacgagagaggcggcgacggtggcgtctgcgacgggagacagcgcgtcggagcgagagagcgctgcgcctgccgccgccccaacagcggaggcgccgccgccatcggtcgtcaccagaccggagccgcaggccctcccgagcccggccatccgtgccccgctcccagatctctatccttttgggaccatgcgcggaggaggctttggggaccgggaccgggatcgtgaccgtggaggatttggagcaagaggtggtggtggccttcccccgaagaaatttggtaatcctggggagcgtttgcgtaaaaaaaagtgggatttgagtgagctccccaagtttgagaaaaatttttatgtggaacatccggaagtagcaaggctgacaccatatgaggttgatgagctacgccgaaagaaggagattacagtgagggggggagatgtttgtcctaaacccgtgtttgccttccatcatgctaacttcccacaatatgtaatggatgtgttgatggatcagcactttacagaaccaactccaattcagtgccagggatttccgttggctcttagtggccgggatatggtgggcattgctcagactggctctgggaagacgttggcgtatctcctgcctgcaattgttcatattaaccaccagccatacttggaaaggggagatggcccaatctgtctagttctggctcctaccagagagcttgcccagcaagtacagcaggtggccgatgactatggcaaatgttctagattgaagagtacttgtatttatggaggtgctcctaaaggtccccagattcgagacttggaaagaggtgttgagatctgcatagccactcctggacgtctgatagatttcctggagtcaggaaagacaaatcttcgccgatgtacttaccttgtattggacgaagctgacagaatgcttgatatggggtttgaaccccagatccgtaaaattgttgaccaaatcaggcctgataggcagacactgatgtggagtgcaacctggccaaaagaagtaagacagcttgcagaggatttccttcgtgattacacccagatcaacgtaggcaatctggagttgagtgccaaccacaacatcctccagatagtggatgtctgcatggaaagtgaaaaagaccacaagttgatccaactaatggaagaaataatggctgaaaaggaaaacaaaacaataatatttgtggagacaaagagacgctgtgatgatctgactcgaaggatgcgcagagatggttggccagctatgtgtatccatggagacaagagtcaaccagaaagagattgggtacttaatgagttccgttctggaaaggcacccatccttattgctacagatgtagcctcccgtgggctaggttttgatgtggaagatgtcaagtttgtgatcaactatgactatccaaacagctcagaggattatgtgcaccgtattggccgaacagcccgtagcaccaacaagggtaccgcctataccttcttcaccccagggaacctaaaacaggccagagagcttatcaaagtgctggaagaggccaatcaggctatcaatccaaaactgatgcagcttgtggaccacagaggaggcggcggaggcgggggtggtcgttctcgttaccggaccacttcttcagccaacaatcccaatctgatgtatcaggatgagtgtgaccgaaggcttcgaggagtcaaggatggtggccggagagactctgcaagctatcgggatcgtagtgaaaccgatagagctggttatgctaatggcagtggctatggaagtccaaattctgcctttggagcacaagcaggccaatacacctatggtcaaggcacctatggggcagctgcttatggcaccagtagctatacagctcaagaatatggtgctggcacttatggagctagtagcaccacctcaactgggagaagttcacagagctctagccagcagtttagtgggataggccggtctgggcagcagccacagccactgatgtcacaacagtttgcacagcctccgggagctaccaatatgataggttacatggggcagactgcctaccaataccctcctcctcctccccctcctcctccttcacgtaaatgaaaccactcaagtggtagtgactccagcagacttaattacattttaaggaacactgtctttcctttttttttcctcttcgccttttctttttttttccttttttctttttttttttttaatttttccccccaaccatcgtgatttgtcttttcatgcagattagttagaattcactgccaggtttcttctgcccaccaaaatgatccagtctggaataacattttgtaaaaaaaaaaaaaatatatatatatatatatagctgactggaagagattaatttcttcccccaacttcttgcatgttgaagatatttgagctatttttcatctaaaagagtaaggtattaggcccttttgtgggagccccatgttttgtttttctgagttggtggggagggagggagggggagggctgaattgttttgcagaggaagatggcatctgtgctttaaatttctcattactgggttagaaaacaaagagggattgccctgcacattttcttttgtgcttttaaatgtttcttaagttggaacaggtttcctcgggcctgttttgactgattgctggagtgcatttgatagttaaaaattactaattggttttatttcccttcacactctgcctccccacttctccccccgttactgaaaaataaccattttagtgtcaggctagaaattgaattgctgagttttgtgtatcctttaaattaaaaaccacaagtgtttattgtagtggttaaactgtagcatctcagcatctgggtggaagctgcctatatttcttcccagtttaactggggaccatctgtgaaattaattttccatccagacagctgctgtgagcaaatgaacataaatgctcgctggaaatttactaaccagtttttatattgacctgcagtgtaaaaagcacatttaattataaacaatatattcaaaatgggcaaattttattttcaaatgcagtgtagagctagattaaaagcaactctttgccacctactctgcccttttggcaaagttaccttgaacaaagaatcttaagggtttattaagaactctttattttcttcataccctgttctctgcagtgctttctaacagcttctgggtgcagattttcttcggcatccttttgcactcagcttattacaggtaggtagtgcttaagaaaagtcatggaggactaaagcctaagtccttttcacttttcctccatctgaaggtaggtgagttcatcctcttcatggtaatgctgttttaccaagactttatagcagatggacccagaaagaattttctgctattgtgttcactacaacaggatagggacatcagacagccccagaaaccccttccagatctgatatgggactattaatttttatgctgttaattggtattcattcacaatgcagttgaagggggaaggctccactgcattctttggctaaggcctgaatgcttgctcatctgtaagatctatactcgaggttttgttttccttttaaaattctttagggagagagggatggtttctgaggggttctgaaagtatgattcaatgtgcaacatacaggtaggtcttcagcataagctgaaatatatgcatgtaaaaactttgacatctttttttttaattttccactttcttcttaactttacttctctttttgtcccccccccatcttacagaagttgaggccaagggagaatggtaggcacagaagaaacatggcaaactgctctgtgctttcaaaccaaagtgttccccccaaccccaaatttgtctaagcactggccagtctgttgtgggcattgttttctacaaccaaattctgggtttttttcttctttctttaaacatagaggtaccaccacaagggatgccctactctctcgcagctcttgaaagcatctgtttgagggaaaggtctctgggcaagcaagtggttatttggattgcttgcttccctttttccacctgggacattgtaatcataaaataacagtaaattccaaacctcaaaaactattatggcctgagcacagctgaaatctagcagagtttaactcttctgcctccatgtctgtcacttataattcaggttctgctgttggcttcagaacatgagcagaagaatcgttttatgctagttattgcattcatggttgaaactcaacttagggaaagggttccaatgtattaagcaatgggctgcttctccccaatcctccctaacaattcgttgtgtggacttctcatctaaaaggttagtggcttttgcttgggatcagtgctctctattgatgttcttgctggtctccagacacattcctgttgcattaagacttgaaagacttgtagatgtgtgatgttcaggcacaggatgctgaaagctatgttactattcttagtttgtaaattgtccttttgataccatcatcttgttttctttttgtaggt

SEQ ID NO: 164486 - DNA, 2322 bp, Artificial Sequence
  derived and/or modified sequence
cgccattttgtgcagtcgctgggaaggaaggagacgcctaaaccgcggcactgcccggtttgagcgtagccaaacctgcccaccggctttgtagccccgattctctgtgttttgctcccgtctccgacgagagaggcggcgacggtggcgtctgcgacgggagacagcgcgtcggagcgagagagcgctgcgcctgccgccgccccaacagcggaggcgccgccgccatcggtcgtcaccagaccggagccgcaggccctcccgagcccggccatccgtgccccgctcccagatctctatccttttgggaccatgcgcggaggaggctttggggaccgggaccgggatcgtgaccgtggaggatttggagcaagaggtggtggtggccttcccccgaagaaatttggtaatcctggggagcgtttgcgtaaaaaaaagtgggatttgagtgagctccccaagtttgagaaaaatttttatgtggaacatccggaagtagcaaggctgacaccatatgaggttgatgagctacgccgaaagaaggagattacagtgagggggggagatgtttgtcctaaacccgtgtttgccttccatcatgctaacttcccacaatatgtaatggatgtgttgatggatcagcactttacagaaccaactccaattcagtgccagggatttccgttggctcttagtggccgggatatggtgggcattgctcagactggctctgggaagacgttggcgtatctcctgcctgcaattgttcatattaaccaccagccatacttggaaaggggagatggcccaatctgtctagttctggctcctaccagagagcttgcccagcaagtacagcaggtggccgatgactatggcaaatgttctagattgaagagtacttgtatttatggaggtgctcctaaaggtccccagattcgagacttggaaagaggtgttgagatctgcatagccactcctggacgtctgatagatttcctggagtcaggaaagacaaatcttcgccgatgtacttaccttgtattggacgaagctgacagaatgcttgatatggggtttgaaccccagatccgtaaaattgttgaccaaatcaggcctgataggcagacactgatgtggagtgcaacctggccaaaagaagtaagacagcttgcagaggatttccttcgtgattacacccagatcaacgtaggcaatctggagttgagtgccaaccacaacatcctccagatagtggatgtctgcatggaaagtgaaaaagaccacaagttgatccaactaatggaagaaataatggctgaaaaggaaaacaaaacaataatatttgtggagacaaagagacgctgtgatgatctgactcgaaggatgcgcagagatggttggccagctatgtgtatccatggagacaagagtcaaccagaaagagattgggtacttaatgagttccgttctggaaaggcacccatccttattgctacagatgtagcctcccgtgggctagatgtggaagatgtcaagtttgtgatcaactatgactatccaaacagctcagaggattatgtgcaccgtattggccgaacagcccgtagcaccaacaagggtaccgcctataccttcttcaccccagggaacctaaaacaggccagagagcttatcaaagtgctggaagaggccaatcaggctatcaatccaaaactgatgcagcttgtggaccacagaggaggcggcggaggcgggggtggtcgttctcgttaccggaccacttcttcagccaacaatcccaatctgatgtatcaggatgagtgtgaccgaaggcttcgaggagtcaaggatggtggccggagagactctgcaagctatcgggatcgtagtgaaaccgatagagctggttatgctaatggcagtggctatggaagtccaaattctgcctttggagcacaagcaggccaatacacctatggtcaaggcacctatggggcagctgcttatggcaccagtagctatacagctcaagaatatggtgctggcacttatggagctagtagcaccacctcaactgggagaagttcacagagctctagccagcagtttagtgggataggccggtctgggcagcagccacagccactgatgtcacaacagtttgcacagcctccgggagctaccaatatgataggttacatggggcagactgcctaccaataccctcctcctcctccccctcctcctccttcacgtaaatgaaaccactcaagtggtagtgactccagcagacttaattacattttaaggaacactgtc

SEQ ID NO: 164487 - DNA, 3629 bp, Artificial Sequence
  derived and/or modified sequence
gagtagaagtgatttggcctcataacttcacagtggtttaccactttgttctatgttctggttttgtaaaggatagtactggaatttgcgtctgaagaccaatattggtgtaactcctgtcagtatattggtaaaatgtagcagaggcaggagtttggatgtttggatgggattcccttaggattctacagccaataaagatcctatttcctatgcatgtcccaggaatcagtaatcctcttttactctgttgggatgagtctttttttgtttctgttcagagtggttactaacttcaccttctttcctcttgctgtcatctgcattcgtgcttcccacctgttgttggcatgtcctttaccttctctttccctgccacatcaacctacacactgactcatcattgacgtggaagatgtggaagatgtcaagtttgtgatcaactatgactatccaaacagctcagaggattatgtgcaccgtattggccgaacagcccgtagcaccaacaagggtaccgcctataccttcttcaccccagggaacctaaaacaggccagagagcttatcaaagtgctggaagaggccaatcaggctatcaatccaaaactgatgcagcttgtggaccacagaggaggcggcggaggcgggggtggtcgttctcgttaccggaccacttcttcagccaacaatcccaatctgatgtatcaggatgagtgtgaccgaaggcttcgaggagtcaaggatggtggccggagagactctgcaagctatcgggatcgtagtgaaaccgatagagctggttatgctaatggcagtggctatggaagtccaaattctgcctttggagcacaagcaggccaatacacctatggtcaaggcacctatggggcagctgcttatggcaccagtagctatacagctcaagaatatggtgctggcacttatggagctagtagcaccacctcaactgggagaagttcacagagctctagccagcagtttagtgggataggccggtctgggcagcagccacagccactgatgtcacaacagtttgcacagcctccgggagctaccaatatgataggttacatggggcagactgcctaccaataccctcctcctcctccccctcctcctccttcacgtaaatgaaaccactcaagtggtagtgactccagcagacttaattacattttaaggaacactgtctttcctttttttttcctcttcgccttttctttttttttccttttttctttttttttttttaatttttccccccaaccatcgtgatttgtcttttcatgcagattagttagaattcactgccaggtttcttctgcccaccaaaatgatccagtctggaataacattttgtaaaaaaaaaaaaaatatatatatatatatatagctgactggaagagattaatttcttcccccaacttcttgcatgttgaagatatttgagctatttttcatctaaaagagtaaggtattaggcccttttgtgggagccccatgttttgtttttctgagttggtggggagggagggagggggagggctgaattgttttgcagaggaagatggcatctgtgctttaaatttctcattactgggttagaaaacaaagagggattgccctgcacattttcttttgtgcttttaaatgtttcttaagttggaacaggtttcctcgggcctgttttgactgattgctggagtgcatttgatagttaaaaattactaattggttttatttcccttcacactctgcctccccacttctccccccgttactgaaaaataaccattttagtgtcaggctagaaattgaattgctgagttttgtgtatcctttaaattaaaaaccacaagtgtttattgtagtggttaaactgtagcatctcagcatctgggtggaagctgcctatatttcttcccagtttaactggggaccatctgtgaaattaattttccatccagacagctgctgtgagcaaatgaacataaatgctcgctggaaatttactaaccagtttttatattgacctgcagtgtaaaaagcacatttaattataaacaatatattcaaaatgggcaaattttattttcaaatgcagtgtagagctagattaaaagcaactctttgccacctactctgcccttttggcaaagttaccttgaacaaagaatcttaagggtttattaagaactctttattttcttcataccctgttctctgcagtgctttctaacagcttctgggtgcagattttcttcggcatccttttgcactcagcttattacaggtaggtagtgcttaagaaaagtcatggaggactaaagcctaagtccttttcacttttcctccatctgaaggtaggtgagttcatcctcttcatggtaatgctgttttaccaagactttatagcagatggacccagaaagaattttctgctattgtgttcactacaacaggatagggacatcagacagccccagaaaccccttccagatctgatatgggactattaatttttatgctgttaattggtattcattcacaatgcagttgaagggggaaggctccactgcattctttggctaaggcctgaatgcttgctcatctgtaagatctatactcgaggttttgttttccttttaaaattctttagggagagagggatggtttctgaggggttctgaaagtatgattcaatgtgcaacatacaggtaggtcttcagcataagctgaaatatatgcatgtaaaaactttgacatctttttttttaattttccactttcttcttaactttacttctctttttgtcccccccccatcttacagaagttgaggccaagggagaatggtaggcacagaagaaacatggcaaactgctctgtgctttcaaaccaaagtgttccccccaaccccaaatttgtctaagcactggccagtctgttgtgggcattgttttctacaaccaaattctgggtttttttcttctttctttaaacatagaggtaccaccacaagggatgccctactctctcgcagctcttgaaagcatctgtttgagggaaaggtctctgggcaagcaagtggttatttggattgcttgcttccctttttccacctgggacattgtaatcataaaataacagtaaattccaaacctcaaaaactattatggcctgagcacagctgaaatctagcagagtttaactcttctgcctccatgtctgtcacttataattcaggttctgctgttggcttcagaacatgagcagaagaatcgttttatgctagttattgcattcatggttgaaactcaacttagggaaagggttccaatgtattaagcaatgggctgcttctccccaatcctccctaacaattcgttgtgtggacttctcatctaaaaggttagtggcttttgcttgggatcagtgctctctattgatgttcttgctggtctccagacacattcctgttgcattaagacttgaaagacttgtagatgtgtgatgttcaggcacaggatgctgaaagctatgttactattcttagtttgtaaattgtccttttgataccatcatcttgttttctttttgtaggt

SEQ ID NO: 164488 - DNA, 1959 bp, Artificial Sequence
  derived and/or modified sequence
atgagaggcggcggcttcggcgacagagacagagacagagacagaggcggcttcggcgccagaggcggcggcggcctgccccccaagaagttcggcaaccccggcgagagactgagaaagaagaagtgggacctgagcgagctgcccaagttcgagaagaacttctacgtggagcaccccgaggtggccagactgaccccctacgaggtggacgagctgagaagaaagaaggagatcaccgtgagaggcggcgacgtgtgccccaagcccgtgttcgccttccaccacgccaacttcccccagtacgtgatggacgtgctgatggaccagcacttcaccgagcccacccccatccagtgccagggcttccccctggccctgagcggcagagacatggtgggcatcgcccagaccggcagcggcaagaccctggcctacctgctgcccgccatcgtgcacatcaaccaccagccctacctggagagaggcgacggccccatctgcctggtgctggcccccaccagagagctggcccagcaggtgcagcaggtggccgacgactacggcaagtgcagcagactgaagagcacctgcatctacggcggcgcccccaagggcccccagatcagagacctggagagaggcgtggagatctgcatcgccacccccggcagactgatcgacttcctggagagcggcaagaccaacctgagaagatgcacctacctggtgctggacgaggccgacagaatgctggacatgggcttcgagccccagatcagaaagatcgtggaccagatcagacccgacagacagaccctgatgtggagcgccacctggcccaaggaggtgagacagctggccgaggacttcctgagagactacacccagatcaacgtgggcaacctggagctgagcgccaaccacaacatcctgcagatcgtggacgtgtgcatggagagcgagaaggaccacaagctgatccagctgatggaggagatcatggccgagaaggagaacaagaccatcatcttcgtggagaccaagagaagatgcgacgacctgaccagaagaatgagaagagacggctggcccgccatgtgcatccacggcgacaagagccagcccgagagagactgggtgctgaacgagttcagaagcggcaaggcccccatcctgatcgccaccgacgtggccagcagaggcctgggcttcgacgtggaggacgtgaagttcgtgatcaactacgactaccccaacagcagcgaggactacgtgcacagaatcggcagaaccgccagaagcaccaacaagggcaccgcctacaccttcttcacccccggcaacctgaagcaggccagagagctgatcaaggtgctggaggaggccaaccaggccatcaaccccaagctgatgcagctggtggaccacagaggcggcggcggcggcggcggcggcagaagcagatacagaaccaccagcagcgccaacaaccccaacctgatgtaccaggacgagtgcgacagaagactgagaggcgtgaaggacggcggcagaagagacagcgccagctacagagacagaagcgagaccgacagagccggctacgccaacggcagcggctacggcagccccaacagcgccttcggcgcccaggccggccagtacacctacggccagggcacctacggcgccgccgcctacggcaccagcagctacaccgcccaggagtacggcgccggcacctacggcgccagcagcaccaccagcaccggcagaagcagccagagcagcagccagcagttcagcggcatcggcagaagcggccagcagccccagcccctgatgagccagcagttcgcccagccccccggcgccaccaacatgatcggctacatgggccagaccgcctaccagtaccccccccccccccccccccccccccccagcagaaagtag

SEQ ID NO: 164489 - DNA, 2190 bp, Artificial Sequence
  derived and/or modified sequence
ctgcccaccggcttcgtggcccccatcctgtgcgtgctgctgcccagccccaccagagaggccgccaccgtggccagcgccaccggcgacagcgccagcgagagagagagcgccgcccccgccgccgcccccaccgccgaggcccccccccccagcgtggtgaccagacccgagccccaggccctgcccagccccgccatcagagcccccctgcccgacctgtaccccttcggcaccatgagaggcggcggcttcggcgacagagacagagacagagacagaggcggcttcggcgccagaggcggcggcggcctgccccccaagaagttcggcaaccccggcgagagactgagaaagaagaagtgggacctgagcgagctgcccaagttcgagaagaacttctacgtggagcaccccgaggtggccagactgaccccctacgaggtggacgagctgagaagaaagaaggagatcaccgtgagaggcggcgacgtgtgccccaagcccgtgttcgccttccaccacgccaacttcccccagtacgtgatggacgtgctgatggaccagcacttcaccgagcccacccccatccagtgccagggcttccccctggccctgagcggcagagacatggtgggcatcgcccagaccggcagcggcaagaccctggcctacctgctgcccgccatcgtgcacatcaaccaccagccctacctggagagaggcgacggccccatctgcctggtgctggcccccaccagagagctggcccagcaggtgcagcaggtggccgacgactacggcaagtgcagcagactgaagagcacctgcatctacggcggcgcccccaagggcccccagatcagagacctggagagaggcgtggagatctgcatcgccacccccggcagactgatcgacttcctggagagcggcaagaccaacctgagaagatgcacctacctggtgctggacgaggccgacagaatgctggacatgggcttcgagccccagatcagaaagatcgtggaccagatcagacccgacagacagaccctgatgtggagcgccacctggcccaaggaggtgagacagctggccgaggacttcctgagagactacacccagatcaacgtgggcaacctggagctgagcgccaaccacaacatcctgcagatcgtggacgtgtgcatggagagcgagaaggaccacaagctgatccagctgatggaggagatcatggccgagaaggagaacaagaccatcatcttcgtggagaccaagagaagatgcgacgacctgaccagaagaatgagaagagacggctggcccgccatgtgcatccacggcgacaagagccagcccgagagagactgggtgctgaacgagttcagaagcggcaaggcccccatcctgatcgccaccgacgtggccagcagaggcctggacgtggaggacgtgaagttcgtgatcaactacgactaccccaacagcagcgaggactacgtgcacagaatcggcagaaccgccagaagcaccaacaagggcaccgcctacaccttcttcacccccggcaacctgaagcaggccagagagctgatcaaggtgctggaggaggccaaccaggccatcaaccccaagctgatgcagctggtggaccacagaggcggcggcggcggcggcggcggcagaagcagatacagaaccaccagcagcgccaacaaccccaacctgatgtaccaggacgagtgcgacagaagactgagaggcgtgaaggacggcggcagaagagacagcgccagctacagagacagaagcgagaccgacagagccggctacgccaacggcagcggctacggcagccccaacagcgccttcggcgcccaggccggccagtacacctacggccagggcacctacggcgccgccgcctacggcaccagcagctacaccgcccaggagtacggcgccggcacctacggcgccagcagcaccaccagcaccggcagaagcagccagagcagcagccagcagttcagcggcatcggcagaagcggccagcagccccagcccctgatgagccagcagttcgcccagccccccggcgccaccaacatgatcggctacatgggccagaccgcctaccagtaccccccccccccccccccccccccccccagcagaaagtag

SEQ ID NO: 164490 - DNA, 546 bp, Artificial Sequence
  derived and/or modified sequence
atgcagctggtggaccacagaggcggcggcggcggcggcggcggcagaagcagatacagaaccaccagcagcgccaacaaccccaacctgatgtaccaggacgagtgcgacagaagactgagaggcgtgaaggacggcggcagaagagacagcgccagctacagagacagaagcgagaccgacagagccggctacgccaacggcagcggctacggcagccccaacagcgccttcggcgcccaggccggccagtacacctacggccagggcacctacggcgccgccgcctacggcaccagcagctacaccgcccaggagtacggcgccggcacctacggcgccagcagcaccaccagcaccggcagaagcagccagagcagcagccagcagttcagcggcatcggcagaagcggccagcagccccagcccctgatgagccagcagttcgcccagccccccggcgccaccaacatgatcggctacatgggccagaccgcctaccagtaccccccccccccccccccccccccccccagcagaaagtag

SEQ ID NO: 164491 - protein, 916 aa, Artificial Sequence
  derived and/or modified sequence
MEMPLPPDDQELRNVIDKLAQFVARNGPEFEKMTMEKQKDNPKFSFLFGGEFYSYYKCKLALEQQQLICKQQTPELEPAATMPPLPQPPLAPAAPIPPAQGAPSMDELIQQSQWNLQQQEQHLLALRQEQVTAAVAHAVEQQMQKLLEETQLDMNEFDNLLQPIIDTCTKDAISAGKNWMFSNAKSPPHCELMAGHLRNRITADGAHFELRLHLIYLINDVLHHCQRKQARELLAALQKVVVPIYCTSFLAVEEDKQQKIARLLQLWEKNGYFDDSIIQQLQSPALGLGQYQATLINEYSSVVQPVQLAFQQQIQTLKTQHEEFVTSLAQQQQQQQQQQQQLQMPQMEAEVKATPPPPAPPPAPAPAPAIPPTTQPDDSKPPIQMPGSSEYEAPGGVQDPAAAGPRGPGPHDQIPPNKPPWFDQPHPVAPWGQQQPPEQPPYPHHQGGPPHCPPWNNSHEGMWGEQRGDPGWNGQRDAPWNNQPDAAWNSQFEGPWNSQHEQPPWGGGQREPPFRMQRPPHFRGPFPPHQQHPQFNQPPHPHNFNRFPPRFMQDDFPPRHPFERPPYPHRFDYPQGDFPAEMGPPHHHPGHRMPHPGINEHPPWAGPQHPDFGPPPHGFNGQPPHMRRQGPPHINHDDPSLVPNVPYFDLPAGLMAPLVKLEDHEYKPLDPKDIRLPPPMPPSERLLAAVEAFYSPPSHDRPRNSEGWEQNGLYEFFRAKMRARRRKGQEKRNSGPSRSRSRSKSRGRSSSRSNSRSSKSSGSYSRSRSRSCSRSYSRSRSRSRSRSRSSRSRSRSQSRSRSKSYSPGRRRRSRSRSPTPPSSAGLGSNSAPPIPDSRLGEENKGHQMLVKMGWSGSGGLGAKEQGIQDPIKGGDVRDKWDQYKGVGVALDDPYENYRRNKSYSFIARMKARDECK

SEQ ID NO: 164492 - DNA, 2751 bp, Artificial Sequence
  derived and/or modified sequence
atggagatgcccctgccccccgacgaccaggagctgagaaacgtgatcgacaagctggcccagttcgtggccagaaacggccccgagttcgagaagatgaccatggagaagcagaaggacaaccccaagttcagcttcctgttcggcggcgagttctacagctactacaagtgcaagctggccctggagcagcagcagctgatctgcaagcagcagacccccgagctggagcccgccgccaccatgccccccctgccccagccccccctggcccccgccgcccccatcccccccgcccagggcgcccccagcatggacgagctgatccagcagagccagtggaacctgcagcagcaggagcagcacctgctggccctgagacaggagcaggtgaccgccgccgtggcccacgccgtggagcagcagatgcagaagctgctggaggagacccagctggacatgaacgagttcgacaacctgctgcagcccatcatcgacacctgcaccaaggacgccatcagcgccggcaagaactggatgttcagcaacgccaagagccccccccactgcgagctgatggccggccacctgagaaacagaatcaccgccgacggcgcccacttcgagctgagactgcacctgatctacctgatcaacgacgtgctgcaccactgccagagaaagcaggccagagagctgctggccgccctgcagaaggtggtggtgcccatctactgcaccagcttcctggccgtggaggaggacaagcagcagaagatcgccagactgctgcagctgtgggagaagaacggctacttcgacgacagcatcatccagcagctgcagagccccgccctgggcctgggccagtaccaggccaccctgatcaacgagtacagcagcgtggtgcagcccgtgcagctggccttccagcagcagatccagaccctgaagacccagcacgaggagttcgtgaccagcctggcccagcagcagcagcagcagcagcagcagcagcagcagctgcagatgccccagatggaggccgaggtgaaggccaccccccccccccccgcccccccccccgcccccgcccccgcccccgccatcccccccaccacccagcccgacgacagcaagccccccatccagatgcccggcagcagcgagtacgaggcccccggcggcgtgcaggaccccgccgccgccggccccagaggccccggcccccacgaccagatcccccccaacaagcccccctggttcgaccagccccaccccgtggccccctggggccagcagcagccccccgagcagcccccctacccccaccaccagggcggccccccccactgccccccctggaacaacagccacgagggcatgtggggcgagcagagaggcgaccccggctggaacggccagagagacgccccctggaacaaccagcccgacgccgcctggaacagccagttcgagggcccctggaacagccagcacgagcagcccccctggggcggcggccagagagagccccccttcagaatgcagagacccccccacttcagaggccccttccccccccaccagcagcacccccagttcaaccagcccccccacccccacaacttcaacagattcccccccagattcatgcaggacgacttcccccccagacaccccttcgagagacccccctacccccacagattcgactacccccagggcgacttccccgccgagatgggccccccccaccaccaccccggccacagaatgccccaccccggcatcaacgagcaccccccctgggccggcccccagcaccccgacttcggcccccccccccacggcttcaacggccagcccccccacatgagaagacagggccccccccacatcaaccacgacgaccccagcctggtgcccaacgtgccctacttcgacctgcccgccggcctgatggcccccctggtgaagctggaggaccacgagtacaagcccctggaccccaaggacatcagactgcccccccccatgccccccagcgagagactgctggccgccgtggaggccttctacagcccccccagccacgacagacccagaaacagcgagggctgggagcagaacggcctgtacgagttcttcagagccaagatgagagccagaagaagaaagggccaggagaagagaaacagcggccccagcagaagcagaagcagaagcaagagcagaggcagaagcagcagcagaagcaacagcagaagcagcaagagcagcggcagctacagcagaagcagaagcagaagctgcagcagaagctacagcagaagcagaagcagaagcagaagcagaagcagaagcagcagaagcagaagcagaagccagagcagaagcagaagcaagagctacagccccggcagaagaagaagaagcagaagcagaagccccaccccccccagcagcgccggcctgggcagcaacagcgccccccccatccccgacagcagactgggcgaggagaacaagggccaccagatgctggtgaagatgggctggagcggcagcggcggcctgggcgccaaggagcagggcatccaggaccccatcaagggcggcgacgtgagagacaagtgggaccagtacaagggcgtgggcgtggccctggacgacccctacgagaactacagaagaaacaagagctacagcttcatcgccagaatgaaggccagagacgagtgcaagtag

SEQ ID NO: 164493 - DNA, 2751 bp, Artificial Sequence
  derived and/or modified sequence
atggaaatgccactgcctcccgatgaccaggagctgcgcaacgttatcgacaagcttgcccagttcgtggcccgtaacgggcccgagttcgaaaaaatgacaatggagaagcagaaagacaatccaaagttctccttcctgtttggcggagagttctattcgtattacaaatgtaaactcgctctggaacagcagcaactgatttgtaagcagcaaactccagagctggaacctgctgcaacaatgccacccttgcctcagcccccactggcacctgccgctccgatccctcccgcccagggggcgcctagtatggatgaactcatccagcagtctcagtggaatctccagcagcaagaacaacacctccttgcactccgccaggagcaagtgaccgcagcggtggcccacgccgtcgagcagcagatgcagaagctgctcgaggagacccagctggacatgaacgagttcgataaccttctccaaccaattattgacacatgtactaaagacgcaatcagcgccggcaagaactggatgttcagtaacgcaaagtcccccccccattgcgaattgatggccggccacctccggaatagaattactgccgacggtgctcacttcgagctccgtttgcaccttatatatctaatcaatgacgtcttgcatcactgccagcggaagcaggcccgggaactgctggccgcactccagaaggttgttgtgcctatatattgcacttcattcctcgcggtggaggaggacaagcagcagaagatagcccggctgctgcagttgtgggagaaaaacggatacttcgatgatagcatcatccaacagttacagtcccctgctctggggctgggacagtatcaggccactctgattaacgagtattcctctgtcgtgcaacctgtgcagctcgccttccagcagcagattcagaccctgaaaacccagcacgaggagttcgtgacatcgcttgcccaacagcaacagcagcagcagcagcagcaacagcaacttcagatgcctcagatggaagcagaggtaaaggccacaccacccccaccagcaccaccccctgcccccgccccagctccagccatccccccaacaactcaacccgatgactcaaagcccccgatacagatgcctgggtcctcagagtatgaggccccaggcggcgtgcaggaccctgctgctgctggcccccgtggccccggtccacacgatcagatcccacctaataaacccccctggttcgatcagccccatcccgtggcaccctggggtcagcaacagccccctgagcaacccccttatccccatcaccaaggaggtcctccccactgccccccatggaacaatagtcatgagggcatgtggggtgagcaaaggggcgatccaggctggaatggtcaacgggatgccccttggaataaccaacccgatgctgcatggaactcacagttcgagggaccgtggaattcccagcatgagcagcccccctggggagggggtcagcgtgaaccaccatttcggatgcaacgaccacctcactttcgtggcccttttcccccccaccaacagcatccacaattcaatcagcccccccatccgcacaattttaatcggtttcctccaaggttcatgcaagatgattttccaccccgccacccgtttgagagacctccttatcctcatcgctttgactatcctcagggcgacttcccagcagagatgggcccgccacatcatcacccgggccacagaatgccccatccagggattaacgaacaccctccttgggctgggccccagcacccagactttgggcctccgccacacggcttcaatggacagcctcctcacatgagacggcaggggcctccccatataaatcatgacgacccatctttggtgccgaacgtcccatattttgaccttcctgccggcctcatggcaccacttgttaaactcgaggatcatgagtacaagccgctggacccgaaagacattcgcctgccgccaccaatgcctccctcggaacggctcctggcagctgtggaggcattctattcgccaccaagtcatgatcggccccgaaattctgagggctgggaacagaacggcctctacgagtttttccgagccaagatgagggctaggagaagaaaggggcaggaaaagagaaacagcggcccctcgcggtccagatctcgctcgaaatcccgcggtcggtctagctcgcgttccaacagtcgcagcagtaaatctagcggaagttattctcgatccagatcaagaagctgcagtcggagttattcccgcagccgttctcgaagccgaagcaggtctcggtcatcacggagccggagccggtcacagagcaggagcagatcaaagagctactcgccaggaaggagacggcgctctaggagccgcagccccactccccctagctctgctgggctcgggtccaatagtgcccctccaattcccgactcacgtttaggagaagagaacaagggacaccagatgctggtgaaaatggggtggtctgggagcggcggcctcggtgccaaagagcagggtatccaagacccaataaagggcggggatgtccgggacaaatgggatcaatacaagggcgtaggagtggccctcgacgacccctacgagaactatcgccgaaataagtcatactcattcatcgccaggatgaaagcacgcgatgagtgtaagtag

SEQ ID NO: 164494 - DNA, 2751 bp, Artificial Sequence
  derived and/or modified sequence
atggagatgcccctgcccccagatgaccaggagctgagaaatgtcatcgacaagctggcccagtttgtggccagaaatggacctgagtttgagaagatgaccatggagaagcagaaggacaaccccaagttctccttcctgtttggaggagagttctacagctactacaagtgcaagctggccctggagcagcagcagctgatctgcaagcagcagaccccagagctggagcctgctgccaccatgccacccctgccccagccccccctggccccagctgcccccatccccccagcccagggcgcccccagcatggatgagctgatccagcagagccagtggaacctgcagcagcaggagcagcacctgctggccctgcggcaggagcaggtgacagctgctgtggcccatgctgtggagcagcagatgcagaagctgctggaggagacccagctggacatgaatgaatttgacaacctgctgcagcccatcatcgacacctgcaccaaggatgccatctctgctgggaagaactggatgttcagcaatgccaagagccccccccactgtgagctgatggccggccacctgaggaaccgcatcacagcagatggagcccactttgagctgcggctgcacctgatctacctgatcaatgatgtgctgcaccactgccagaggaagcaggcccgggagctgctggccgccctgcagaaggtggtggtgcccatctactgcaccagcttcctggccgtggaggaggacaagcagcagaagatcgcccggctgctgcagctgtgggagaagaatggctactttgatgacagcatcatccagcagctgcagagccctgccctgggcctgggccagtaccaggccaccctcatcaatgagtacagctctgtggtgcagcctgtgcagctggccttccagcagcagatccagaccctgaagacccagcacgaggagtttgtgaccagcctggcccagcagcagcagcagcagcagcagcagcagcagcagctgcagatgccccagatggaggccgaggtgaaggccaccccacctcctccagcccctcctccagccccagccccagccccagccatcccccccaccacccagccagatgacagcaagccacccatccagatgcctggcagcagtgaatatgaggcccctgggggcgtgcaggaccctgctgctgctggcccccggggccctggcccccatgaccagatcccccccaacaagccaccctggtttgaccagccccaccctgtggccccctggggccagcagcagcccccagagcagcccccctacccccaccaccagggcggccccccccactgccccccctggaacaacagccatgagggcatgtggggcgagcagagaggagaccccggctggaatggccagagagatgccccctggaacaaccagccagatgctgcctggaacagccagtttgagggcccctggaacagccagcacgagcagcccccctggggcggcggccagcgggagccccccttcaggatgcagaggcctccccacttccggggccccttccccccccaccagcagcacccccagttcaaccagcccccccacccccacaacttcaaccgcttccccccacgcttcatgcaggatgacttccccccaagacacccctttgagaggcctccctacccccacagatttgactacccccagggcgacttccctgctgagatgggccccccccaccaccaccctggccacaggatgccccaccctggcatcaatgagcaccccccctgggccggcccccagcacccagactttggccccccacctcatggcttcaacggccagcccccccacatgaggcggcagggccccccccacatcaaccatgatgaccccagcctggtgcccaacgtgccctactttgacctgcctgctggcctgatggcccccctggtgaagctggaggaccacgagtacaagcccctggaccccaaggacatccggctgcccccacccatgcctccttctgagcggctgctggccgctgtggaggccttctacagcccccccagccatgaccggcccagaaattctgagggctgggagcagaatggcctgtatgagttcttccgggccaagatgagggcccggcggaggaagggccaggagaagaggaacagcggccccagccgcagccgcagccgcagcaagagccggggccgcagcagcagccgcagcaacagccgcagcagcaagagcagcggcagctacagccgcagccgcagccgcagctgcagccgcagctacagccgcagccgcagccgcagccgcagccgcagccgcagcagccgcagccgcagccgcagccagagccgcagccgcagcaagagctacagccctggaagaagaagaagaagccgcagccgcagccccaccccacccagcagcgctggcctgggcagcaacagcgccccacccatcccagacagccggctgggggaggagaacaagggccaccagatgctggtgaagatgggctggagcggcagcggcggcctgggcgccaaggagcagggcatccaggaccccatcaagggaggagatgtgcgggacaagtgggaccagtacaagggcgtgggcgtggccctggatgacccctatgagaactacagaagaaacaagagctacagcttcatcgccaggatgaaggccagagatgagtgcaagtag

SEQ ID NO: 164495 - DNA, 2751 bp, Artificial Sequence
  derived and/or modified sequence
atggagatgcccctgccccccgacgaccaggagctgcggaacgtgatcgataagctggcacagtttgtcgctcgaaatggaccggagtttgagaaaatgaccatggaaaagcagaaggacaacccgaagttttcatttttgttcgggggggagttttactcttattacaagtgtaaactagcactggaacagcagcaactgatctgcaagcagcagacgccggagctggagccagcagccaccatgccaccactcccgcagccaccactcgcccccgccgcccccatccctcccgcacagggtgcaccctctatggatgaattaatccaacagagccaatggaacctccaacagcaagaacagcacctgctggcacttaggcaggaacaggttacggcagccgtagcccatgccgtggaacagcagatgcaaaagcttttagaagaaacacagctagacatgaacgagtttgataacttgttacagcctatcatcgacacgtgcactaaggatgcgatctctgccggcaagaattggatgtttagcaatgccaagagccctccccattgcgagcttatggcaggacaccttcggaaccgcattaccgcagacggggcccattttgaacttcgtctgcacctgatctacctgattaatgacgtcctgcatcattgccaaagaaagcaagcaagagagctgctcgccgcccttcagaaggttgtggtgcctatatattgcacctctttcttggccgtggaagaggacaagcaacagaaaatcgcccgattgctacagctgtgggaaaagaacgggtatttcgacgatagcatcatccagcagctgcagtcacccgccctggggctgggacaataccaggcgaccctgatcaatgaatacagctccgtcgtgcagcccgtccagctggccttccagcagcagattcaaaccctgaaaacgcaacatgaggaatttgtgacctctctggctcagcagcagcagcaacaacaacagcagcagcaacagctacaaatgccccaaatggaggccgaagtcaaggcaacacctccacctcctgctccccctcctgcgccagcaccagcgccggccattcctcccacgacccagccagatgacagcaaaccgcctatacagatgcctggttctagcgagtatgaggcccctggaggcgtgcaggaccctgccgccgcgggacccagaggtcctggcccccacgatcagatcccgcccaacaagcccccctggtttgatcagccacaccccgtggctccctggggccaacagcagcctccagagcagcctccatacccacaccatcagggaggtcccccgcactgccccccatggaacaactctcacgaaggtatgtggggggagcaacgcggcgatccaggctggaatggccaacgagacgccccctggaataaccagccagacgcggcatggaactcccagtttgaaggcccatggaattcccaacatgagcagccaccctgggggggaggccaaagagaaccacccttccggatgcagaggccaccacactttaggggccctttccctccacatcagcagcacccacagttcaatcagcctccccatccacataattttaatcggttccctccacggtttatgcaggatgattttcctccgagacacccctttgaaaggcccccatacccacatagatttgattatcctcaaggtgactttccagccgaaatgggtccaccccaccaccaccctggccatcggatgccacaccctggaatcaacgaacacccaccttgggccgggccccagcatccggacttcggacctccgccacatgggtttaacggacagcctcctcacatgagacgtcaaggtccgccacatatcaaccatgacgatccctctctcgtgccaaacgtgccttattttgatttgcccgccggactgatggcgcctctcgttaagcttgaagaccacgaatacaagcccttggacccgaaggacatacggctgcccccccccatgccaccctctgagcgtctcctggcagcagttgaagccttttactcaccaccttcccacgatcgacctcggaactcagagggctgggagcagaacgggctctacgagttctttcgcgccaagatgagagctcggaggaggaaggggcaggagaagaggaattctggcccgtcacgatctcgctcaagaagcaaatctcgaggacgaagttcatctaggtccaattcgcgttcaagcaagtctagtggcagctacagtcgtagtaggagtcgcagctgctcacgatcttactcacgcagccggagccgcagtcgcagcaggtcgcggtccagtcgatcacgctcaaggtctcagtcccgtagccgctctaaatcctactctcccggacggcgccgcaggtcaaggagtaggtccccaacgcctccctcctcagcagggctgggatccaattctgccccaccaatacccgactccagactgggagaggaaaacaagggacaccagatgctcgtgaaaatgggctggtctggaagtgggggcctcggtgccaaggagcaggggatccaggacccgattaagggaggggatgtgcgcgataagtgggaccagtataaaggagttggagtagccctggacgatccctacgaaaactatcggcgcaacaaaagctattccttcatcgcccgcatgaaagcccgagacgagtgtaagtag

SEQ ID NO: 164496 - DNA, 2751 bp, Artificial Sequence
  derived and/or modified sequence
atggagatgcctctacctcctgatgatcaggagcttcgcaatgtgatcgacaagttagctcagttcgtcgcccgaaacggaccagagttcgagaaaatgacaatggagaagcagaaggataatccaaagttcagtttccttttcggaggtgaattctactcgtactacaaatgcaagttagctttggaacagcagcagctaatctgcaagcaacaaacccccgagctggaacccgcagctactatgccgccactgccgcaaccacccctggcacccgctgcccctattcctccggctcaaggcgcaccctcaatggacgaattgatccagcagtcccagtggaacctccagcagcaagaacagcacctgctcgctctgagacaagagcaagttaccgctgcagtcgcccacgctgtggaacagcagatgcaaaaactgctggaagaaacgcagctggatatgaacgagttcgacaacttgctgcagcccataatcgatacatgcacaaaggacgccatatcagcagggaaaaattggatgtttagcaatgccaaaagtccccctcattgcgagctgatggccggtcatttacgaaaccgcatcactgctgatggagcacattttgaattgaggttacacctgatatatctgatcaacgacgtcctgcaccactgtcagcggaagcaagccagggaattactggccgctctccagaaggttgtggtgccaatctactgtacatcattcctcgcagttgaagaggacaaacagcagaagattgcgcgtctcctccagctgtgggagaagaatggctactttgatgactcgattattcaacagttacagtcacccgctcttggactgggccagtaccaggctacgcttattaacgaatattcatccgtggtccaacctgtgcagctggcattccagcaacagattcagaccttaaagactcagcatgaagagtttgttaccagtttggctcaacaacagcagcagcagcaacagcagcaacagcaactccagatgccccaaatggaagccgaggtgaaggccaccccgcctcctccagccccacccccagctccagcgcctgcccctgcgattccacccacaacccagccggatgactcgaaaccaccaattcagatgcctggctcgtcagaatacgaagcgccaggcggagtccaggatccagccgctgcaggccctaggggtccaggaccacatgatcagattcctcctaataaacctccctggtttgatcaacctcaccctgtggctccttgggggcaacaacagcctccagagcagcctccctacccgcaccaccaaggagggcctccccactgtcccccatggaataacagccacgaaggcatgtggggcgagcagagaggagaccctggctggaacgggcaaagagatgcaccctggaataatcagcccgatgcagcttggaactcccagttcgaaggaccttggaacagtcagcatgaacagccgccatggggtggtggacaacgcgagcctcctttccgcatgcaacgtccccctcacttccggggacctttccctcctcaccagcagcatccccaattcaatcagccaccccatcctcacaacttcaacagattccctccacgctttatgcaggatgatttcccccctagacacccctttgagcgacctccttacccccatagattcgactacccacagggggacttccccgcagaaatggggccaccacaccatcaccccggacacaggatgccccaccccggtattaacgagcatccaccatgggcaggaccccagcatccagattttggtccaccgcctcacggatttaacgggcagccccctcatatgcggcgtcagggacccccacacatcaatcatgatgacccaagcctcgtgcccaatgtcccctactttgaccttccagctggcctgatggcacccctcgtgaaattagaggaccatgagtacaaaccactggatcctaaagatatcagacttccacccccaatgcccccttccgagagactcctcgctgcagtcgaagccttttactcacccccatcgcacgaccgtcccaggaacagtgagggctgggaacaaaatggtttgtacgaattcttccgggctaagatgcgcgctcggaggcggaagggccaggaaaagcgtaacagcggaccctcacgatcacgttcccgcagcaagtcacgaggtaggtcttctagtaggtctaatagtaggtcatctaaatcctcggggagttattccaggtcacgctctcgcagctgttccaggtcctattcccggagcaggagcaggagtcgcagcagaagccggagctcccgaagccggagtcgctctcagtctcggtcccggagcaaaagctacagtcccggacggcgtaggcgatctcggtctagatcacccacacccccaagttcggccggacttggaagcaattcagcaccacccattccagacagccgccttggagaggagaacaaggggcaccagatgctcgtgaagatggggtggagcgggtccggtggactcggagcgaaggagcagggtattcaggaccccataaagggtggggatgtcagggataaatgggaccaatataagggcgtgggggtcgctctggacgacccatacgaaaactataggaggaacaagagttactcatttatagcccgaatgaaagctagggacgaatgtaaatag

SEQ ID NO: 164497 - DNA, 4173 bp, Artificial Sequence
  derived and/or modified sequence
ggagtttcccagcgacggccgtaagtggcgggcggaagcggccctagaagcccgccgtaaacggctccctcgcgccacttccggccggcttccgcagacggcgctggtggtcgatcgtgtggcgccggaggacgttccccgcggccggagccatggagatgccgctgccccccgatgaccaggagcttcgaaatgtcatcgacaagctcgcccagttcgtggctcgcaatgggcccgagtttgagaagatgactatggagaagcagaaggacaaccccaaattctcgtttcttttcggaggcgaattctacagttactacaagtgcaagctggcgctggagcagcagcagctcatctgcaagcagcagaccccggagctggagccagccgccaccatgccacccctgccacagcccccgctggcccccgccgcgcccatcccgccggcccagggcgcgccatccatggacgagctcatccagcagagccagtggaacctccagcagcaggagcagcacttgctggcgctcagacaggagcaagtgacagcggccgtggcccacgcggtggagcagcagatgcagaagcttctggaggagacccagctagacatgaacgagtttgacaacctcctgcagcccatcatcgacacgtgcaccaaggacgccatctcggccgggaagaactggatgttcagcaatgccaagtccccgccgcactgtgagctgatggccggccacctccggaaccgcatcacggctgatggggcacacttcgagctgcggctgcacctcatctacctgatcaatgacgtgctgcaccactgccagcgcaagcaggcccgggagctgctggccgccctgcagaaggtcgtggtgcccatctactgcaccagcttcttggccgtggaggaagacaagcagcagaagatcgcccggctcctgcagctctgggagaaaaacggctacttcgatgactccatcattcagcagctacagagcccagccctggggcttggtcagtaccaggccaccctcatcaacgagtactcctcagtggtccagccggtgcagctggccttccagcagcagatccagaccctcaagacgcagcacgaggagtttgtcaccagcctggcccagcagcagcagcagcagcaacagcagcagcagcagctccagatgccgcagatggaggctgaagtcaaggccacgcctccaccgcctgctccacccccggccccagcacctgcccctgccatcccgcccaccacccagcctgatgacagcaagcctcccatccagatgcctggctcttcagagtacgaagctccaggaggggtccaggatcctgcagctgccggcccccggggccccgggccacacgaccagatcccaccaaacaagcccccttggtttgaccagcctcaccccgtggctccttggggccagcagcagccgccagagcagccaccctacccgcaccaccagggcggcccaccccactgccccccctggaacaacagccatgagggcatgtggggcgagcagcgcggtgaccccggctggaacggccagcgcgacgcgccctggaacaaccagcccgacgccgcctggaacagccagttcgagggcccctggaacagccagcacgagcagccgccctggggcgggggccagcgcgagccacccttccgcatgcagcggcccccacacttccgggggcccttcccgccccaccagcagcacccgcagttcaaccagcctccgcacccccacaacttcaaccgcttcccgccccgcttcatgcaggacgacttcccgccacggcaccccttcgagcggccgccctatccccaccgcttcgactacccccagggggacttccctgccgaaatggggccccctcaccaccaccctggccaccgcatgcctcatcctggcatcaacgagcacccgccttgggctggaccccagcaccctgacttcggccctcccccccatggcttcaacgggcagcccccacacatgcggcgacagggcccaccccacatcaaccacgatgaccccagcctggtccccaatgtgccctacttcgatctccctgctgggctgatggcccccctcgtgaagctggaagatcacgagtacaagcctttggaccctaaagacatccgcctcccaccccccatgccgcccagcgagaggctgctggctgcagtggaggccttctacagccccccgtcccacgacaggcccaggaacagtgaaggctgggagcagaacggcctctatgagttcttccgagcaaaaatgcgggcccggcggaggaaaggccaggagaagaggaacagcggaccctcgaggtctcggagcagatccaagagtcgagggcgttcttcctcccgctccaactcaagatcctccaagtcttcaggctcgtactcaaggtcaaggtcgcgctcctgctcccgttcctactcccgctccagatctagaagtcggagcaggtcgcgctcctccagaagccgctcccggtcccagtcgcggtcccggtccaagtcgtactccccaggaagaagacgccggtcacggtccaggagccccaccccgccttcctctgctggtctgggttctaattcggcgcctcccatccctgactcaaggctcggagaagagaacaaaggccatcagatgctggtgaagatgggctggagcggctcaggcggcctcggtgcgaaggagcaagggatccaggaccccatcaagggcggggacgtccgggataagtgggaccagtataaaggcgtgggcgtggctctggatgacccctatgagaactaccgcaggaacaagagctactccttcatcgcccgcatgaaggccagggacgagtgtaagtaggcgcccatgccgggagccgcgccggtggccagcggtgccggctgtgggaccttcctggctgactggcagaggaagattgcagtgacagctcagttcttacaccgtctccacttgtggagagccacaggaagagaaggaagaccagcgcatgcccagtgggaacgccgtgctccatggcgtggagggcacgggtgccacccacaaaccacaccaggaggcgctgcagccaccagggccccaggctcgttttcctttatagcgaagcaaaaaacacaagaccctccgcccgagtaaattcttcagccacgaagggatggatgtgcatctgccctaagtcagattgaagcctcctcctaggctccaggaggagcatgtgcaggaagggttggcctgagccagagccggcaccccagctccttcctccagctccccgcacccaccggccctgacctggcttcccctcggctgtgtagggacaaagccgaagcccagtgccatgactgcccgcggattgaaaaacagaaacacaaaactttgacttgacttgcgaagtgaagcagggttttcatttttactctccttggtttaggtctagaaagaagaatactgacctgagaggaggcccagtgagattctgaaacctaattcttcgaaggcgtactggcccttagttcagttattttagttgtataagttgatattttttttctggaatgtagccatttgctgttatctgggaaacaagattctaacaggaaaccagcctaagacacttcaggttgagcgctgcctcggagtctgtgcccgtcgcgtcccctgcttgagttttgcacttggaagaaccctgcaccggctggcgtgtgcgacggcccagtcccatccagagcatggagcccgaccccagccagcgccttccactccatcatttcatttcacacccccgaagggaggggaggccaggaggggagctgctcctgccagaagctggtgggtgaccgttgggaatcggccacacctggtgtccatgggcagcctggtgcaattccattcatttgtacagaaacatttttgaaaaattcttttcaataagatgcaaaatcttccaacttttcaacccaacgtgatgaatatttgattttgttctagatttcctgtagctgtgaattgttaaaatgtatgattcaggataaaacgtaaacacgtgctgttagtaatttcttgtggatttcattgttttgccttcaaataaagcctttttttaaagaccttt

SEQ ID NO: 164498 - DNA, 231 bp, Artificial Sequence
  derived and/or modified sequence
atggctagaggcgccgccttggcactcttactgttcgggctgctgggagtcttggttgctgcaccaggatttggcgacctgaggctgcaggctgcaaggggcggccggcccggggttgcctgccactctcatgctctgcgtcccggacccaagttcggcatagctcgatcccttagaccgggttggtggggcgaaggtaaggagaaattagagaagaatttcgaaccatag

SEQ ID NO: 164499 - protein, 513 aa, Artificial Sequence
  derived and/or modified sequence
MAEVGEIIEGCRLPVLRRNQDNEDEWPLAEILSVKDISGRKLFYVHYIDFNKRLDEWVTHERLDLKKIQFPKKEAKTPTKNGLPGSRPGSPEREVPASAQASGKTLPIPVQITLRFNLPKEREAIPGGEPDQPLSSSSCLQPNHRSTKRKVEVVSPATPVPSETAPASVFPQNGAARRAVAAQPGRKRKSNCLGTDEDSQDSSDGIPSAPRMTGSLVSDRSHDDIVTRMKNIECIELGRHRLKPWYFSPYPQELTTLPVLYLCEFCLKYGRSLKCLQRHLTKCDLRHPPGNEIYRKGTISFFEIDGRKNKSYSQNLCLLAKCFLDHKTLYYDTDPFLFYVMTEYDCKGFHIVGYFSKEKESTEDYNVACILTLPPYQRRGYGKLLIEFSYELSKVEGKTGTPEKPLSDLGLLSYRSYWSQTILEILMGLKSESGERPQITINEISEITSIKKEDVISTLQYLNLINYYKGQYILTLSEDIVDGHERAMLKRLLRIDSKCLHFTPKDWSKRGKW

SEQ ID NO: 164500 - DNA, 1542 bp, Artificial Sequence
  derived and/or modified sequence
atggccgaggttggcgagattattgaaggttgccggcttcccgtgcttaggcgaaatcaagataatgaggatgagtggcctttggcggaaatactcagcgtaaaagacatctcgggcagaaaactgttctacgttcactacatcgatttcaataaacgacttgatgagtgggtgacacacgaacgactggacctgaaaaagatccagtttcctaagaaggaagcaaaaactcctaccaagaacggccttccgggttcaagacctgggagcccagaacgggaggtccccgcatccgcacaggcttccggtaaaacgctgccgatcccggtccagattaccctccgcttcaatttgcccaaggaaagagaagcaatcccggggggtgaacccgatcagcccctttctagttccagttgtctgcagccaaatcatcgttctaccaagcggaaggtggaggttgtgtctcccgcaacacccgtaccctcagagactgcaccagcctcagtctttccacagaatggtgctgctcgcagagccgtagcggctcaaccaggcagaaagagaaaaagcaattgcctgggaacagacgaagattcccaggactcaagcgacggtattccctcggctcctcggatgaccgggagcctggttagtgaccggtcacatgatgatatcgtgacccgtatgaaaaatatcgagtgcatcgagttggggagacatagattaaaaccgtggtatttctcaccttacccacaggaattaactactctcccagtcctgtacctctgtgaattctgcttgaagtacggacgaagtctgaagtgtctgcaacggcacttgaccaaatgcgatctaaggcaccccccagggaatgaaatttatcgtaaaggcaccataagcttttttgagattgacggaaggaagaacaaaagctattcccaaaacctgtgcctgctggcaaagtgttttttggatcataagactctctactacgatacggaccccttcctcttttacgtcatgacagaatatgactgtaagggcttccatatcgtggggtacttctctaaggaaaaagagtctaccgaagattacaatgtagcctgtatactgacgctgcctccatatcagcggcgcggatatggaaagctgctgatagagttcagctatgagctttcaaaagtcgagggcaaaaccggtaccccagaaaagcctctgtcagacctaggcctgctcagctaccgcagttactggagccaaaccatcctagagattcttatgggcctgaaaagtgagtctggcgagaggcctcaaatcaccattaatgaaatctcggagattacctcaatcaagaaggaagatgttatcagtactctgcagtacttgaatcttattaactattacaaaggacagtatatcctgacgttaagcgaggacatcgttgatggccacgagagggctatgttgaaaaggttgctccgcattgactcaaaatgcctgcactttacccctaaggactggtcaaaaagaggtaagtggtag

SEQ ID NO: 164501 - DNA, 1542 bp, Artificial Sequence
  derived and/or modified sequence
atggccgaggtgggggagatcatcgagggctgccgcctgcctgtgctgcggaggaaccaggacaatgaagatgagtggcccctggccgagatcctgtctgtgaaggacatcagcggcaggaagctgttctacgtgcactacatcgacttcaacaagaggctggatgagtgggtgacccatgagcggctggacctgaagaagatccagttccccaagaaggaggccaagacccccaccaagaatggcctgcccggcagccggcccggcagccctgagcgggaggtgcctgccagcgcccaggccagcggcaagaccctgcccatccctgtgcagatcaccctgcgcttcaacctgcccaaggagcgggaggccatccctggaggagagccagaccagcccctgagcagcagcagctgcctgcagcccaaccacaggagcaccaagaggaaggtggaggtggtgtccccagccacccctgtgcccagcgagacagccccagccagcgtcttcccccagaatggagctgccaggagagctgtggccgcccagcccggcaggaagaggaagagcaactgcctgggcacagatgaggacagccaggacagcagtgatggcatccccagcgcccccaggatgacaggcagcctggtgtctgacaggagccatgatgacatcgtgaccaggatgaagaacattgaatgtattgagctgggccgccaccggctgaagccctggtacttcagcccctacccccaggagctgaccaccctgcctgtgctgtacctgtgtgagttctgcctgaagtatggccgcagcctgaagtgcctgcagaggcacctgaccaagtgtgacctgcggcaccccccaggaaatgagatctacaggaagggcaccatctccttctttgaaattgatggcaggaagaacaagagctacagccagaacctgtgcctgctggccaagtgcttcctggaccacaagaccctgtactatgacacagaccccttcctgttctacgtgatgacagaatatgactgcaagggcttccacatcgtgggctacttcagcaaggagaaggagagcacagaggactacaacgtggcctgcatcctgaccctgcccccctaccagaggcggggctacggcaagctgctgattgagttctcctatgagctgagcaaggtggagggcaagacaggcaccccagagaagcccctgagtgacctgggcctgctgagctaccgcagctactggagccagaccatcctggagatcctgatgggcctgaagtctgagagcggggagcggccccagatcaccatcaatgagatcagcgagatcaccagcatcaagaaggaggatgtgatcagcaccctgcagtacctgaacctgatcaactactacaagggccagtacatcctgaccctgtctgaggacatcgtggatggccacgagcgggccatgctgaagaggctgctgagaattgacagcaagtgcctgcacttcacccccaaggactggagcaagaggggcaagtggtag

SEQ ID NO: 164502 - DNA, 1542 bp, Artificial Sequence
  derived and/or modified sequence
atggccgaggtgggcgagatcatcgagggctgccggctgcccgtgctccggcggaaccaggataacgaagatgagtggccccttgccgaaattctatctgtgaaagacattagtgggaggaaactgttctatgttcactacatcgatttcaataagcgcctcgacgaatgggtcacacatgaaagactggacttaaagaagattcagttccccaaaaaggaagctaaaactcccaccaaaaatggcctgcctggctccaggccaggaagtcctgaaagagaggtccctgcatctgctcaggcttccggaaagacactgcccattcctgtgcaaatcacgctgcggttcaacctgcccaaagagcgtgaggccataccagggggggaacctgaccagcccttgagtagtagttcatgcctccaaccaaaccatcgttctacaaagcggaaagtagaagtggttagcccagcaacaccagttcctagcgagacggcacccgcatccgtgtttccacagaacggtgccgcccgacgagccgtcgccgctcagcctggtaggaagaggaagtcaaattgtctgggcaccgacgaggacagtcaggactcttccgatggaatcccttcagcgccccgaatgaccgggagtctggtaagtgatcgctcccacgacgatatagttacacgaatgaaaaatatcgaatgcattgagcttggcagacacagattgaaaccgtggtacttcagcccgtacccacaagagctcactaccctgcccgtattgtacctgtgcgaattttgtcttaagtatggcagatcattgaagtgtctgcagagacacctgaccaagtgtgatctccgacacccacccggcaatgaaatctaccgcaaaggaaccatttccttctttgaaattgatggtcggaaaaacaagtcgtacagccagaacttgtgcctgctggcaaagtgctttttggaccataagaccctgtattacgacaccgatccatttctgttttacgtaatgacggagtatgattgcaagggatttcatatcgtggggtatttttcaaaagagaaagaaagcactgaggactataatgtggcatgtatcctgacactccctccataccagcggagaggctatggaaaattgctcatcgagttctcttatgagctatctaaggtggagggcaagaccggaacgcctgaaaagcccctatctgatctgggcttactgtcatatcgctcctactggagccagacaatacttgaaatccttatgggcttgaaaagtgagagcggggagagaccgcagataacaattaacgagatttccgaaattactagcataaaaaaagaggacgtcataagcacgctgcaatacctgaacctcattaactattacaagggccagtacatcctgaccctgtcagaagacatagttgacggacacgaacgcgccatgttgaaacgcttgctgagaatcgattctaagtgtctacacttcacacctaaagactggagcaaacgcgggaagtggtag

SEQ ID NO: 164503 - DNA, 1542 bp, Artificial Sequence
  derived and/or modified sequence
atggctgaggtcggcgaaatcatcgagggttgtcgcctacctgtgctgcgccgaaaccaagataacgaggatgagtggcctcttgctgaaatcctatccgtcaaagacatatccggacggaaacttttctacgtgcattacatcgattttaataagagactcgacgaatgggttacccacgaaaggctggatctcaagaaaatccagttccccaaaaaggaggcaaagacacccaccaaaaacggtctacctgggtcacgccctggatcccccgagagagaggttccagcttctgcacaggcatccggaaagaccttaccaatccctgtgcagattaccttgaggttcaatctgccaaaggagagagaggctatcccaggaggagagccagaccaaccactgtcgtcctcctcttgcctccagccaaatcacagaagtaccaagcgcaaagtggaggtcgtttcgccagctacccctgttccttctgaaacggccccagccagtgtatttccccaaaatggtgctgctagaagggctgtggcagcacagccgggtcgcaagcgaaagagtaactgccttggaacagacgaggacagccaggacagcagcgatggtattccaagcgcacctcgcatgacagggtctttagtatcagataggtcacatgacgatatcgtgacccggatgaagaacattgaatgcattgagctgggaaggcaccggctaaagccatggtacttcagcccctatccgcaggagctcactactctacctgtgttgtacctatgtgaattttgtcttaagtatggccgttcactgaaatgccttcagcgtcacttaaccaagtgtgatctgcgtcacccgcctgggaacgagatttataggaaagggacgataagcttttttgaaatcgacggcaggaagaataagagctacagtcaaaacctgtgtttactggcgaagtgctttctggatcataaaacattgtactacgacacagatccattcctcttttatgtcatgactgaatacgactgcaaggggtttcatatcgtgggatacttctctaaggaaaaggaaagcaccgaagactataacgttgcttgtatcctgacactgcctccttaccagcgacggggttacggtaaactcctcatcgagttcagctacgaactttccaaggtagaggggaaaactggaacgcccgaaaaaccgctgagcgacctgggcctgctcagttacaggagctactggagccagaccattctggagattctgatgggcctcaagagcgaatctggagaacgtccccaaattacaataaacgaaatctctgagatcacaagcataaagaaggaagatgttatctccaccctccagtacttgaacctgataaattattataaagggcagtacattcttactttgagtgaggatatagtcgatggccacgaacgggctatgttaaaacgactgctgcggattgactcaaagtgcctgcactttacccccaaagactggtctaagcggggtaagtggtag

SEQ ID NO: 164504 - DNA, 1542 bp, Artificial Sequence
  derived and/or modified sequence
atggccgaggtgggcgagatcatcgagggctgcagactgcccgtgctgagaagaaaccaggacaacgaggacgagtggcccctggccgagatcctgagcgtgaaggacatcagcggcagaaagctgttctacgtgcactacatcgacttcaacaagagactggacgagtgggtgacccacgagagactggacctgaagaagatccagttccccaagaaggaggccaagacccccaccaagaacggcctgcccggcagcagacccggcagccccgagagagaggtgcccgccagcgcccaggccagcggcaagaccctgcccatccccgtgcagatcaccctgagattcaacctgcccaaggagagagaggccatccccggcggcgagcccgaccagcccctgagcagcagcagctgcctgcagcccaaccacagaagcaccaagagaaaggtggaggtggtgagccccgccacccccgtgcccagcgagaccgcccccgccagcgtgttcccccagaacggcgccgccagaagagccgtggccgcccagcccggcagaaagagaaagagcaactgcctgggcaccgacgaggacagccaggacagcagcgacggcatccccagcgcccccagaatgaccggcagcctggtgagcgacagaagccacgacgacatcgtgaccagaatgaagaacatcgagtgcatcgagctgggcagacacagactgaagccctggtacttcagcccctacccccaggagctgaccaccctgcccgtgctgtacctgtgcgagttctgcctgaagtacggcagaagcctgaagtgcctgcagagacacctgaccaagtgcgacctgagacacccccccggcaacgagatctacagaaagggcaccatcagcttcttcgagatcgacggcagaaagaacaagagctacagccagaacctgtgcctgctggccaagtgcttcctggaccacaagaccctgtactacgacaccgaccccttcctgttctacgtgatgaccgagtacgactgcaagggcttccacatcgtgggctacttcagcaaggagaaggagagcaccgaggactacaacgtggcctgcatcctgaccctgcccccctaccagagaagaggctacggcaagctgctgatcgagttcagctacgagctgagcaaggtggagggcaagaccggcacccccgagaagcccctgagcgacctgggcctgctgagctacagaagctactggagccagaccatcctggagatcctgatgggcctgaagagcgagagcggcgagagaccccagatcaccatcaacgagatcagcgagatcaccagcatcaagaaggaggacgtgatcagcaccctgcagtacctgaacctgatcaactactacaagggccagtacatcctgaccctgagcgaggacatcgtggacggccacgagagagccatgctgaagagactgctgagaatcgacagcaagtgcctgcacttcacccccaaggactggagcaagagaggcaagtggtag

SEQ ID NO: 164505 - protein, 1037 aa, Artificial Sequence
  derived and/or modified sequence
MDLNRIIQALKGTIDPKLRIAAENELNQSYKIINFAPSLLRIIVSDHVEFPVRQAAAIYLKNMVTQYWPDREPPPGEAIFPFNIHENDRQQIRDNIVEGIIRSPDLVRVQLTMCLRAIIKHDFPGHWPGVVDKIDYYLQSQSSASWLGSLLCLYQLVKTYEYKKAEEREPLIIAMQIFLPRIQQQIVQLLPDSSYYSVLLQKQILKIFYALVQYALPLQLVNNQTMTTWMEIFRTIIDRTVPPETLHIDEDDRPELVWWKCKKWALHIVARLFERYGSPGNVTKEYFEFSEFFLKTYAVGIQQVLLKILDQYRQKEYVAPRVLQQAFNYLNQGVVHSITWKQMKPHIQNISEDVIFSVMCYKDEDEELWQEDPYEYIRMKFDIFEDYASPTTAAQTLLYTAAKKRKEVLPKMMAFCYQILTDPNFDPRKKDGALHVIGSLAEILLKKSLFKDQMELFLQNHVFPLLLSNLGYLRARSCWVLHAFSSLKFHNELNLRNAVELAKKSLIEDKEMPVKVEAALALQSLISNQIQAKEYMKPHVRPIMQELLHIVRETENDDVTNVIQKMICEYSQEVASIAVDMTQHLAEIFGKVLQSDEYEEVEDKTVMAMGILHTIDTILTVVEDHKEITQQLENICLRIIDLVLQKHVIEFYEEILSLAYSLTCHSISPQMWQLLGILYEVFQQDCFEYFTDMMPLLHNYVTIDTDTLLSNAKHLEILFTMCRKVLCGDAGEDAECHAAKLLEVIILQCKGRGIDQCIPLFVQLVLERLTRGVKTSELRTMCLQVAIAALYYNPDLLLHTLERIQLPHNPGPITVQFINQWMNDTDCFLGHHDRKMCIIGLSILLELQNRPPAVDAVVGQIVPSILFLFLGLKQVCATRQLVNREDRSKAEKADMEENEEISSDEEETNVTAQAMQSNNGRGEDEEEEDDDWDEEVLEETALEGFSTPLDLDNSVDEYQFFTQALITVQSRDAAWYQLLMAPLSEDQRTALQEVYTLAEHRRTVAEAKKKIEQQGGFTFENKGVLSAFNFGTVPSNN

SEQ ID NO: 164506 - DNA, 3114 bp, Artificial Sequence
  derived and/or modified sequence
atggaccttaacagaataattcaggccctgaaggggacgatcgacccaaagctgcggattgctgcagagaatgagctgaatcagtcttataaaataatcaactttgcccccagcttgttaaggataatcgtttctgaccatgtggagtttcccgtcaggcaggcagccgctatttacttaaaaaatatggtgacccagtactggcccgacagggagccccccccgggagaagctatctttccattcaatatacatgagaatgacagacagcagattcgagacaatatcgtcgagggcattatccgatcacctgacttggtgcgcgtgcaattgaccatgtgcctccgggctattatcaaacacgacttccctggacactggccgggggttgtggacaagatcgattactacctgcagagccagtctagtgcatcatggttaggatccttactctgcctataccagctcgtgaagacatatgagtacaagaaagccgaggagcgcgagcccctgatcatcgccatgcagatattcctgcccaggatccaacaacaaattgttcagcttcttcctgattcaagttactactccgttctgctgcaaaaacagatactcaaaattttttatgcgctagtccagtacgcgttacctcttcagctggtgaataatcagacgatgacgacgtggatggaaatctttagaacgataattgacagaacagtccccccagagacactacatattgacgaggacgatcgacccgagctggtgtggtggaagtgtaagaaatgggctcttcatatcgtggcccggcttttcgagcgatacggtagtccagggaatgtgaccaaggagtattttgaattcagcgagttctttctaaagacctacgccgtgggtatacagcaagtactcttaaaaattctggatcagtaccgccagaaagagtatgtggcccccagagttttgcagcaggccttcaactatctcaaccagggcgtggtgcattccatcacctggaaacagatgaagccgcacatccaaaatatatctgaagatgtaatcttctcagttatgtgctacaaggatgaggacgaggagctctggcaagaggacccttacgagtatatccggatgaagtttgatattttcgaggactatgcctcgccaaccactgccgcccaaaccctattgtacaccgcagccaagaagcggaaagaagtccttcctaagatgatggctttttgctaccagatcttgactgatccaaatttcgacccccgcaagaaggatggagctctccacgtgattgggtcacttgccgagattctactcaagaaatcactctttaaagaccaaatggagctgttccttcaaaaccatgtgtttccactgctcttatccaatctgggatatctccgggcaagatcttgctgggtgctccatgcattctccagcctcaagttccacaatgagctaaatctgcgcaatgcagtggagcttgcaaagaaatcccttatcgaggataaagagatgccggtaaaggtggaggctgccctcgctctgcagagcctcatctccaaccaaatccaggccaaggagtacatgaaaccgcacgttaggcccatcatgcaggaactgctgcatattgtcagagaaacagaaaacgacgatgtgactaacgtgatccaaaaaatgatttgtgagtacagccaggaagtagccagtattgctgtcgatatgacacagcacctcgccgaaatattcggcaaggtcctacagtctgacgagtatgaagaggtagaggataagactgtgatggctatgggaattctgcacacaatcgataccatcctgaccgtggtggaagaccataaggagataacccagcagttggagaatatttgtctgcgcattattgacctcgtgctgcaaaaacatgtgattgagttctatgaggagatcctctcccttgcttacagcctcacctgccacagcattagtccacaaatgtggcagctgcttggcatcctctatgaggtgttccaacaagattgcttcgagtacttcacagatatgatgcctcttctgcacaactacgtgacaatagacactgacaccctgctgtcaaatgcaaaacatttggagatcttattcacaatgtgccgcaaggtgttgtgtggcgatgcgggcgaagatgctgaatgtcacgccgcgaaactcctggaggtgattatccttcagtgtaaaggccgtggaatcgatcagtgtatccctctgtttgtgcagctcgtgctggaaaggctcaccaggggtgtgaagacctccgagctccgtaccatgtgtctgcaggtggccatcgcggccctctattacaaccctgatctgctgctgcacacattagaacgcatacaactcccgcacaatccagggcccataacggtccagttcataaaccagtggatgaacgacaccgactgttttttgggtcaccacgatcgtaagatgtgcatcatcggtctgagcattctgttggagctgcagaaccggcctccggcagtggacgcggttgttggacagatcgttccctccatcctgtttctgtttctggggctgaagcaggtatgtgctactcggcaattagtcaaccgagaggacaggagcaaagccgaaaaggctgacatggaagagaatgaggagattagctcagacgaagaggagaccaacgtgaccgcgcaggccatgcaatctaacaacgggcggggcgaagatgaggaggaggaagatgacgattgggacgaagaagtgcttgaggaaacagcccttgaaggtttctccacacctttggacctggataattccgtggacgaatatcagttctttacacaggccttgataacagtccaaagtcgggatgccgcctggtaccagttgctgatggcacccctgagtgaggaccagagaacagcactccaggaagtttatacactcgctgagcaccggcggacagtggccgaggcaaagaagaagatcgaacagcagggcggtttcacctttgagaataagggagtgttgtccgcattcaacttcgggaccgtgccttcaaacaactag

SEQ ID NO: 164507 - DNA, 1542 bp, Artificial Sequence
  derived and/or modified sequence
ttgtcgagtggtcacgaactggcaaaagaatatatgaagccgcacgtgcgtcctatcatgcaagagctgcttcacatcgttcgcgagactgaaaacgacgatgtcactaacgtgatccaaaagatgatatgcgagtatagtcaagaggtggcatccatcgccgttgacatgactcagcatctagccgaaatctttggcaaagtgttgcagtcagacgaatacgaagaagtggaagataaaacggtaatggccatgggcatcctgcacactatcgatacaatccttaccgttgtggaagaccacaaagaaatcactcagcagctggagaacatctgtttaagaatcatcgacctggtcctgcagaagcacgtgattgagttctacgaagaaatcctcagccttgcctatagcttaacatgtcacagtataagcccgcagatgtggcagcttctgggaatcttgtatgaggtttttcagcaggattgctttgaatacttcaccgatatgatgcccctgcttcacaattatgtgacgatcgacacagacaccctcctgagcaatgctaaacatctggaaatcctttttaccatgtgcaggaaggtcctgtgcggggacgcgggagaggatgcggaatgccacgctgccaaactgctggaggtgatcatactgcagtgtaagggcaggggcatcgaccaatgtattcccctctttgtgcagttggttcttgaaaggctgacccgcggtgtgaaaacaagcgagctcaggacaatgtgcctgcaggttgccattgcagccctgtattacaatccggacctactacttcacacgcttgaacgcattcagttaccccataaccccggcccaattacagtccaattcattaaccagtggatgaacgatacggattgtttcttgggtcatcacgacaggaagatgtgcataattggcctttccatcctgctggaactccagaaccgcccaccggcagttgatgcagtggttggccagattgttccaagcatcctgttcctcttcctgggcctgaagcaggtgtgcgctacccggcaattggtaaatcgcgaagaccgatcaaaggccgagaaggctgacatggaggaaaatgaagaaatttcatcagacgaggaggagacaaacgtcaccgcccaggccatgcagtccaacaacggacgaggagaggacgaagaagaggaagatgacgactgggatgaggaagttttggaggagacagccctggaaggttttagcaccccgctcgatctcgacaacagcgtggacgaatatcagttcttcacccaggcactgatcaccgtgcaaagcagggatgccgcttggtatcaactgctgatggccccgcttagtgaggatcagagaactgctctacaggaagtgtacaccctagccgagcacaggcggactgtggcggaggcaaaaaagaagatagaacagcagggcgggttcactttcgagaacaaaggagtactgtccgcatttaactttgggacagtgccatccaataactag

SEQ ID NO: 164508 - DNA, 5325 bp, Artificial Sequence
  derived and/or modified sequence
acagcagcatggcggccgccgacgggaggcggtcatagcatcacgcccgggggaagaggccgccgtaaaggaagctctgcttcctcttcttccttctcccgcctcccaccggctgtcgtaaaacggtgaatggagagcgagttgtgggggggaaaaagggaggacagggggcgcggagtcagagtggcgcagcaagtggccgcaggtggcgacggtggcggggggtggggtgtgaggtaatccaggggtcgcggaagaggaggctgagagggtcaaaagaaaactaaagctgcagtccggcctactgttccgggggccgcggagcccccacccggggagatggacctcaaccggatcatccaggcgctgaagggcaccatcgacccgaagttgcggattgcagccgagaacgagctcaaccagtcctacaagattatcaattttgcccccagtttacttcggattatagtctctgaccatgtggaattcccagtacgacaggcagctgccatttacctgaagaacatggtgacacaatactggccagatcgagaacctccaccaggagaagcaatatttccattcaacattcacgaaaacgatcgccagcaaatacgtgataacattgtggaaggaataattcggtctccagatttagtgagagtccaattaacaatgtgtctccgtgccatcataaaacatgattttcctggtcactggccaggagtggtcgacaagatagactattacttgcaatcacagagcagtgcaagctggcttggcagtttattatgcctgtatcaactggtgaagacatatgaatataagaaagcagaagagagagaacctcttataatagcaatgcagatattcctgcctcgtattcagcaacaaattgttcagctccttcctgattcctcctattattctgtattactgcagaaacaaattctgaaaatcttttatgcacttgttcagtatgcattgcctcttcagctagtgaataaccaaaccatgacaacatggatggagatcttccgaactattatcgacaggaccgttcctcctgagactctgcacattgatgaggatgatagaccagaactggtatggtggaagtgtaagaagtgggcactgcatattgtagctcggctctttgaacgatatggaagcccaggaaatgtcacaaaagaatactttgaattttctgaattctttttgaaaacctatgcagtgggcattcagcaggtgctactaaaaattttagatcaatatagacagaaagaatatgtagctccccgtgttcttcagcaagcattcaactatctcaaccaaggggtggttcattctataacctggaagcagatgaagccacacatacagaatatctctgaagatgtgattttttctgtgatgtgttataaagatgaggatgaagagctgtggcaagaagatccatatgagtatataaggatgaaatttgatatttttgaagattatgcttctcccaccacagcagcccagactctcttatatactgctgcaaagaaaagaaaagaggtgttgccaaaaatgatggcattctgttatcaaatcctgacagacccgaactttgaccctaggaagaaagatggagccctgcatgtgattggttccctagctgagattttactgaagaagagtttattcaaggaccaaatggagctgtttctacaaaatcatgtatttccattattattgtctaacctgggatatcttcgagctagatcttgctgggtacttcatgcatttagttctttgaagttccataatgagctcaatctaagaaatgccgttgaattagcgaagaagagcctgattgaagataaagagatgcctgtcaaagttgaagctgcccttgctcttcagtctttaatttctaaccagatacaagctaaggaatatatgaagccacatgtgaggcctattatgcaggaactgttgcacattgttagagagacagaaaatgatgatgttactaatgtcatccagaagatgatatgtgaatacagtcaagaggtagcctcaattgctgttgatatgacccaacacttggctgagatatttggcaaagttcttcaaagtgatgaatatgaagaagttgaagacaaaacagtaatggctatgggaattttacataccattgatactatcttaacagttgtagaagatcataaagagattacccagcagttagagaatatctgtctacggatcattgatcttgttctgcagaaacatgtaattgaattctatgaagaaattctttccctggcatacagtttaacctgccacagtatttcccctcaaatgtggcagcttctaggtatactatatgaagtgtttcagcaggattgctttgaatactttacagacatgatgcctctcctgcataattatgtgacaatagatacagataccttactatcaaatgcaaaacatttagaaattctttttacaatgtgtaggaaggtactatgtggagatgcaggagaagatgcagagtgtcatgcagctaaacttctggaagtcatcattcttcagtgcaaaggaaggggaattgatcagtgcattccactcttcgttcaacttgttttggagagattaactcgaggggtcaaaactagtgagcttcgtactatgtgtcttcaggttgcaattgctgccttgtactacaaccctgatttgctgctacatactttagaacgaattcagttgcctcacaaccctggacctatcactgtacagtttataaatcaatggatgaatgatacagattgttttcttgggcatcatgaccggaagatgtgtataataggactgagtatccttttggaattgcaaaatcgacctcctgcagtagatgctgtggtgggacagattgttccctcaattcttttccttttccttggcctaaagcaggtctgtgctactagacaactggtaaaccgggaagatcgttcaaaagcagagaaagctgatatggaagaaaatgaggagatttcaagtgatgaagaggagacaaatgtaactgctcaagcaatgcagtcaaataatggaagaggtgaagatgaggaggaggaagatgatgactgggatgaagaagtattggaagaaaccgcgcttgaggggttcagtactccacttgaccttgacaatagtgtggatgaatatcagttttttacacaagctctgataactgtgcagagtcgagatgcagcctggtaccagctgctgatggcaccactcagcgaggatcagaggacagcactgcaggaggtgtacacactggcagagcaccgacggacggtggcagaggcaaagaagaagattgaacaacagggaggcttcacctttgaaaacaaaggagtcctctccgcatttaattttgggactgtgcccagcaacaactgaaggaaagaacatcagctgaccaaatgtcatcgctgcattttatttcacaagaggagtgtgagggtcaaggggatgaaatgaggggctgcttttagggccctcctgctgtgccagttaccatctggcattaggcagcacttttatctactctttcccctttgacctttgtcaccctgaaatatatattttaaacagctactgtaagtatgaaatgaaagaaaaacaatcattggacggaaaaggacaacccatatgttccaaaggctgaatgcccaaggttgttttagaggattggatagacttgcacgtctcaggtttttgccatgcagaatcaatggatttatgcggataacagtgccttctgttgtacatgaattatcagaaaaaaatttttggagtgcattgcaattttttttaaagcataaaacatatttctagatacaacataaaccttggttatatgtcaactattctgcattttactctgtgaatttattgttaggcagttactgcaagtcactctggtttcaaaatcttcacggctccctctgctcaccctgctgctggggggcttttttcaggggttgtattataaaatatgcactggctgtggtttttcataagatgttttgtggctttttaaagaagtgtcttactccctcttctctcatttttttctgccttgaaaaggggtggtatttcttttggggtcaacaaatacacatatcagtttcactcctaaccttgtaagttcaggactcattttcttggcagcaagtggcaggggctctttagtcactggagttaacagtaagtctgagtatattctgaataatgtaattatgcaattaattgataatcatacctaaagcacattgaacttctaagagacaggtgctacgtaagcacactgtctttctggatggggacttgtattttaaataacttatcattccagctatgttggactagggtccaaagcattttataatatttttttttaatctaggaaaaagacccaaacaaatctaacttcttgctttctcacctatttgaattttctcctacctaatttgtttgtgtctttattatagctcagtttgacttctcaaacttttcaagggttggggcagctgcacttttaggttgcctataggaaatattgcatatggagattacagtgtttttctgacctagttcaagaccagaacatgggtcatagggtttttattcagcaaaatgaaaacgtatcttcagaacttaacatattactggatgtgatacagattttgctttctgtggaattgaaaattcacaaaaattcacagcttaaatttcccatcagtgactggaggaatttttttcaggtgcttcctatattaccatccctcatgcatattaactctttagaattttaggttaagtgatgtctatagaagtagcctggaaaaccatgagttttggagttcagtgaccccctgctttcctctgctcctcccttcccaaggcattgaagctgaatgtgccaactggcagttagaagcgaaagatggcattgggagaaattttagagagctttcaaactctttattctcatgttccacatggtctaattttaacataaataatatgccttcacactggattgtaaaaggcatgtgatttttgagattttattttgtgatgtattgtcttctgcagtattaaagggaaagagatattaatgtgcattaccctatcttgtttttgaagccagggtagttgtatgattttgttaccagcagtgctaacctgaatgtgacctggttaccttggaaatgcaggaacttatatgaatgtactataaaataaaatgcggactgattcccagga

SEQ ID NO: 164509 - DNA, 3413 bp, Artificial Sequence
  derived and/or modified sequence
ttatcatctgggcatgaattagctaaggaatatatgaagccacatgtgaggcctattatgcaggaactgttgcacattgttagagagacagaaaatgatgatgttactaatgtcatccagaagatgatatgtgaatacagtcaagaggtagcctcaattgctgttgatatgacccaacacttggctgagatatttggcaaagttcttcaaagtgatgaatatgaagaagttgaagacaaaacagtaatggctatgggaattttacataccattgatactatcttaacagttgtagaagatcataaagagattacccagcagttagagaatatctgtctacggatcattgatcttgttctgcagaaacatgtaattgaattctatgaagaaattctttccctggcatacagtttaacctgccacagtatttcccctcaaatgtggcagcttctaggtatactatatgaagtgtttcagcaggattgctttgaatactttacagacatgatgcctctcctgcataattatgtgacaatagatacagataccttactatcaaatgcaaaacatttagaaattctttttacaatgtgtaggaaggtactatgtggagatgcaggagaagatgcagagtgtcatgcagctaaacttctggaagtcatcattcttcagtgcaaaggaaggggaattgatcagtgcattccactcttcgttcaacttgttttggagagattaactcgaggggtcaaaactagtgagcttcgtactatgtgtcttcaggttgcaattgctgccttgtactacaaccctgatttgctgctacatactttagaacgaattcagttgcctcacaaccctggacctatcactgtacagtttataaatcaatggatgaatgatacagattgttttcttgggcatcatgaccggaagatgtgtataataggactgagtatccttttggaattgcaaaatcgacctcctgcagtagatgctgtggtgggacagattgttccctcaattcttttccttttccttggcctaaagcaggtctgtgctactagacaactggtaaaccgggaagatcgttcaaaagcagagaaagctgatatggaagaaaatgaggagatttcaagtgatgaagaggagacaaatgtaactgctcaagcaatgcagtcaaataatggaagaggtgaagatgaggaggaggaagatgatgactgggatgaagaagtattggaagaaaccgcgcttgaggggttcagtactccacttgaccttgacaatagtgtggatgaatatcagttttttacacaagctctgataactgtgcagagtcgagatgcagcctggtaccagctgctgatggcaccactcagcgaggatcagaggacagcactgcaggaggtgtacacactggcagagcaccgacggacggtggcagaggcaaagaagaagattgaacaacagggaggcttcacctttgaaaacaaaggagtcctctccgcatttaattttgggactgtgcccagcaacaactgaaggaaagaacatcagctgaccaaatgtcatcgctgcattttatttcacaagaggagtgtgagggtcaaggggatgaaatgaggggctgcttttagggccctcctgctgtgccagttaccatctggcattaggcagcacttttatctactctttcccctttgacctttgtcaccctgaaatatatattttaaacagctactgtaagtatgaaatgaaagaaaaacaatcattggacggaaaaggacaacccatatgttccaaaggctgaatgcccaaggttgttttagaggattggatagacttgcacgtctcaggtttttgccatgcagaatcaatggatttatgcggataacagtgccttctgttgtacatgaattatcagaaaaaaatttttggagtgcattgcaattttttttaaagcataaaacatatttctagatacaacataaaccttggttatatgtcaactattctgcattttactctgtgaatttattgttaggcagttactgcaagtcactctggtttcaaaatcttcacggctccctctgctcaccctgctgctggggggcttttttcaggggttgtattataaaatatgcactggctgtggtttttcataagatgttttgtggctttttaaagaagtgtcttactccctcttctctcatttttttctgccttgaaaaggggtggtatttcttttggggtcaacaaatacacatatcagtttcactcctaaccttgtaagttcaggactcattttcttggcagcaagtggcaggggctctttagtcactggagttaacagtaagtctgagtatattctgaataatgtaattatgcaattaattgataatcatacctaaagcacattgaacttctaagagacaggtgctacgtaagcacactgtctttctggatggggacttgtattttaaataacttatcattccagctatgttggactagggtccaaagcattttataatatttttttttaatctaggaaaaagacccaaacaaatctaacttcttgctttctcacctatttgaattttctcctacctaatttgtttgtgtctttattatagctcagtttgacttctcaaacttttcaagggttggggcagctgcacttttaggttgcctataggaaatattgcatatggagattacagtgtttttctgacctagttcaagaccagaacatgggtcatagggtttttattcagcaaaatgaaaacgtatcttcagaacttaacatattactggatgtgatacagattttgctttctgtggaattgaaaattcacaaaaattcacagcttaaatttcccatcagtgactggaggaatttttttcaggtgcttcctatattaccatccctcatgcatattaactctttagaattttaggttaagtgatgtctatagaagtagcctggaaaaccatgagttttggagttcagtgaccccctgctttcctctgctcctcccttcccaaggcattgaagctgaatgtgccaactggcagttagaagcgaaagatggcattgggagaaattttagagagctttcaaactctttattctcatgttccacatggtctaattttaacataaataatatgccttcacactggattgtaaaaggcatgtgatttttgagattttattttgtgatgtattgtcttctgcagtattaaagggaaagagatattaatgtgcattaccctatcttgtttttgaagccagggtagttgtatgattttgttaccagcagtgctaacctgaatgtgacctggttaccttggaaatgcaggaacttatatgaatgtactataaaataaaatgcggactgattcccagg

SEQ ID NO: 164510 - DNA, 3114 bp, Artificial Sequence
  derived and/or modified sequence
atggacctgaaccgcatcatccaggccctgaagggcaccatcgaccccaagctgagaattgctgctgaaaatgagctgaaccagagctacaagatcatcaactttgcccccagcctgctgcgcatcatcgtgtctgaccacgtggagttccctgtgcggcaggccgccgccatctacctgaagaacatggtgacccagtactggccagaccgggagcccccacctggagaggccatcttccccttcaacatccatgaaaatgaccggcagcagatccgggacaacatcgtggagggcatcatccgcagcccagacctggtgcgggtgcagctgaccatgtgcctgcgggccatcatcaagcatgacttccctggccactggccaggagtggtggacaagattgactactacctgcagagccagagcagcgcctcctggctgggcagcctgctgtgcctgtaccagctggtgaagacctatgagtacaagaaggccgaggagcgggagcccctcatcatcgccatgcagatcttcctgccccgcatccagcagcagatcgtgcagctgctgcctgacagcagctactacagcgtgctgctgcagaagcagatcctgaagatcttctacgccctggtgcagtatgccctgcccctgcagctggtgaacaaccagaccatgaccacctggatggagatcttccgcaccatcatcgacagaacagtgcccccagagaccctgcacattgatgaagatgacaggcctgagctggtgtggtggaagtgcaagaagtgggccctgcacatcgtggcccggctgtttgaaagatatggcagccctggaaatgtgaccaaggagtactttgagttcagcgagttcttcctgaagacctatgctgtgggcatccagcaggtgctgctgaagatcctggaccagtaccggcagaaggagtatgtggccccccgggtgctgcagcaggccttcaactacctgaaccagggcgtggtgcacagcatcacctggaagcagatgaagccccacatccagaacatcagtgaagatgtgatcttctctgtgatgtgctacaaggatgaagatgaggagctgtggcaggaggacccctatgagtacatccgcatgaagtttgacatctttgaagattatgccagccccaccacagctgcccagaccctgctgtacacagctgccaagaagaggaaggaggtgctgcccaagatgatggccttctgctaccagatcctgacagaccccaactttgaccccaggaagaaggatggagccctgcacgtgattggcagcctggccgagatcctgctgaagaagagcctcttcaaggaccagatggagctgttcctgcagaaccacgtgttccccctgctgctgagcaacctgggctacctgcgggcccggagctgctgggtgctgcacgccttcagcagcctgaagttccacaatgagctgaacctgagaaatgctgtggagctggccaagaagagcctgattgaggacaaggagatgcctgtgaaggtggaggccgccctggccctgcagagcctcatcagcaaccagatccaggccaaggagtacatgaagccccacgtgcggcccatcatgcaggagctgctgcacatcgtgcgggagacagaaaatgatgatgtgaccaacgtcatccagaagatgatctgtgagtacagccaggaggtggccagcattgctgtggacatgacccagcacctggccgagatctttgggaaggtgctgcagagtgatgaatatgaggaggtggaggacaagacagtgatggccatgggcatcctgcacaccatcgacaccatcctgactgtggtggaggaccacaaggagatcacccagcagctggagaacatctgcctgcgcatcatcgacctggtgctgcagaagcacgtgattgagttctatgaggagatcctgagcctggcctacagcctgacctgccacagcatcagcccccagatgtggcagctgctgggcatcctgtatgaggtgttccagcaggactgctttgagtacttcacagacatgatgcccctgctgcacaactacgtgaccatcgacacagacaccctgctgagcaatgccaagcacctggagatcctcttcaccatgtgcaggaaggtgctgtgtggagatgctggggaggatgctgaatgtcatgctgccaagctgctggaggtgatcatcctgcagtgcaagggccggggcatcgaccagtgcatccccctgtttgtgcagctggtgctggagcggctgacccggggcgtgaagaccagcgagctgcggaccatgtgcctgcaggtggccatcgccgccctgtactacaacccagacctgctgctgcacaccctggagcgcatccagctgccccacaaccctggccccatcaccgtgcagttcatcaaccagtggatgaatgacacagactgcttcctgggccaccacgacaggaagatgtgcatcatcggcctgagcatcctgctggagctgcagaacagacctcctgctgtggatgctgtggtgggccagatcgtgcccagcatcctcttcctgttcctgggcctgaagcaggtgtgtgccacccggcagctggtgaacagagaagatagaagcaaggccgagaaggctgacatggaggagaatgaggagatcagcagtgatgaggaggagaccaacgtgacagcccaggccatgcagagcaacaacggcagaggagaagatgaggaggaggaggatgatgactgggatgaggaggtgctggaggagacagccctggagggcttcagcacccccctggacctggacaacagcgtggatgagtaccagttcttcacccaggccctgatcaccgtgcagagcagagatgctgcctggtaccagctgctgatggcccccctgtctgaggaccagaggacagccctgcaggaggtgtacaccctggccgagcacagaagaacagtggccgaggccaagaagaagattgagcagcagggcggcttcacctttgagaacaagggcgtgctgagcgccttcaactttggcaccgtgcccagcaacaactag

SEQ ID NO: 164511 - DNA, 1542 bp, Artificial Sequence
  derived and/or modified sequence
ctgagcagcggccacgagctggccaaggagtacatgaagccccacgtgcggcccatcatgcaggagctgctgcacatcgtgcgggagacagaaaatgatgatgtgaccaacgtcatccagaagatgatctgtgagtacagccaggaggtggccagcattgctgtggacatgacccagcacctggccgagatctttgggaaggtgctgcagagtgatgaatatgaggaggtggaggacaagacagtgatggccatgggcatcctgcacaccatcgacaccatcctgactgtggtggaggaccacaaggagatcacccagcagctggagaacatctgcctgcgcatcatcgacctggtgctgcagaagcacgtgattgagttctatgaggagatcctgagcctggcctacagcctgacctgccacagcatcagcccccagatgtggcagctgctgggcatcctgtatgaggtgttccagcaggactgctttgagtacttcacagacatgatgcccctgctgcacaactacgtgaccatcgacacagacaccctgctgagcaatgccaagcacctggagatcctcttcaccatgtgcaggaaggtgctgtgtggagatgctggggaggatgctgaatgtcatgctgccaagctgctggaggtgatcatcctgcagtgcaagggccggggcatcgaccagtgcatccccctgtttgtgcagctggtgctggagcggctgacccggggcgtgaagaccagcgagctgcggaccatgtgcctgcaggtggccatcgccgccctgtactacaacccagacctgctgctgcacaccctggagcgcatccagctgccccacaaccctggccccatcaccgtgcagttcatcaaccagtggatgaatgacacagactgcttcctgggccaccacgacaggaagatgtgcatcatcggcctgagcatcctgctggagctgcagaacagacctcctgctgtggatgctgtggtgggccagatcgtgcccagcatcctcttcctgttcctgggcctgaagcaggtgtgtgccacccggcagctggtgaacagagaagatagaagcaaggccgagaaggctgacatggaggagaatgaggagatcagcagtgatgaggaggagaccaacgtgacagcccaggccatgcagagcaacaacggcagaggagaagatgaggaggaggaggatgatgactgggatgaggaggtgctggaggagacagccctggagggcttcagcacccccctggacctggacaacagcgtggatgagtaccagttcttcacccaggccctgatcaccgtgcagagcagagatgctgcctggtaccagctgctgatggcccccctgtctgaggaccagaggacagccctgcaggaggtgtacaccctggccgagcacagaagaacagtggccgaggccaagaagaagattgagcagcagggcggcttcacctttgagaacaagggcgtgctgagcgccttcaactttggcaccgtgcccagcaacaactag

SEQ ID NO: 164512 - DNA, 3114 bp, Artificial Sequence
  derived and/or modified sequence
atggacctgaaccggatcatccaggccctgaagggcaccatcgaccctaagcttagaattgcagctgaaaatgaattaaaccagtcatataagattattaactttgccccatctttgctccgtatcatcgtttctgaccacgtggagtttccagtcaggcaggctgcagctatttacttgaagaacatggtgactcagtattggcctgatcgggaacctcccccgggagaggccatcttcccctttaatatacacgaaaatgaccggcagcagattcgtgacaatatcgtggaaggcattattaggagtcccgatctcgtccgcgtccaattgactatgtgcctgcgcgccatcattaaacacgatttcccaggccattggccaggcgtggtggacaagatcgactattacttacagtctcagtcatccgcaagttggcttgggagcctcctgtgtctttaccagctagtcaagacatatgagtataagaaagcagaagaacgtgagccgctgataatcgccatgcagatattcctaccacggattcagcagcagattgttcagttactccctgatagttcttattattccgtgctgttgcaaaaacagattctgaaaatcttctatgcactggtgcagtacgcactcccactgcaattagtgaataatcaaacaatgaccacatggatggagatttttagaacgatcattgatagaacagtcccacctgagaccttacacattgacgaggacgatcggcccgagttagtttggtggaagtgcaagaagtgggcactccatatcgtggcaaggctgttcgagaggtacggcagccccggcaacgtgactaaagagtatttcgagttctctgaatttttcttaaagacttatgctgtgggcatccagcaggtactcctgaagattctggaccagtacagacagaaggagtatgtggccccgcgcgttctgcagcaggcattcaattatttaaaccagggtgtggtgcatagtatcacttggaagcagatgaagccgcacatccagaacatctctgaggatgttatcttcagcgtcatgtgttataaagacgaggacgaagaactttggcaggaagatccctatgaatatattagaatgaagtttgatattttcgaagactatgcaagccctacgactgcagctcaaacacttctgtacaccgctgccaagaagcggaaggaggtgctgccaaaaatgatggcattctgttaccagattcttaccgaccccaactttgacccccggaagaaagatggtgccctccacgtgatagggagcctggcagaaatcctcctgaaaaagtcattgtttaaagaccagatggaactcttcttacagaaccacgtttttccgctgctcctgtccaatctcgggtacctcagagcacgaagctgctgggtgctccacgccttctcatctctaaagttccacaatgaattgaacctccggaacgctgttgaattggctaaaaaatcacttatcgaggacaaggagatgccagtcaaggtggaagcagccttggcgctgcagagtctgatctcaaaccagattcaggccaaagagtatatgaaacctcatgtgaggccaatcatgcaggaactcctgcacattgtccgggagactgagaacgatgatgtgacaaatgttattcaaaaaatgatctgcgaatattcccaggaagtggcttctattgccgtcgacatgacccagcatctcgctgaaattttcggcaaagttcttcagtctgacgagtacgaggaagttgaagacaagaccgttatggcaatgggcatcctgcacacgatcgacaccattctgaccgtggtggaggaccacaaagaaatcacccaacagctggagaatatttgcctaaggataattgacctcgtcctgcaaaagcatgttatcgagttttacgaggaaattctgtcacttgcctacagcctcacctgtcatagcatcagtccacagatgtggcagctgctggggatcctatacgaggtgttccaacaggactgtttcgagtacttcacagatatgatgccgctactgcataactatgtcactatcgatacagatacactcctttccaatgcaaaacacctggagattctgtttacgatgtgtcgtaaagtgctgtgtggcgatgctggagaggacgcagagtgccatgccgctaaactgttagaagtgatcatacttcagtgcaaggggagagggatcgaccagtgcattcccctcttcgtccaattggtgctggagcggctgacacggggcgtcaagactagcgagctgcggacgatgtgtctgcaggtagctattgccgccctgtactacaatccggatcttctcctgcacacgctcgagaggatccagcttccacataaccccggaccgattactgtacaattcattaaccagtggatgaacgatacagactgcttccttggccaccacgatcggaagatgtgcatcattgggctcagcatactgctggagctccagaacaggccaccagcagtggacgctgtagtcggacagattgtgccttccatactttttctcttcctcgggttaaaacaagtttgtgcaactcggcagctggttaaccgcgaagaccgatcaaaggctgagaaggccgacatggaggaaaatgaggagattagcagcgatgaagaagagactaacgtaaccgcccaagccatgcaatctaataacggcaggggggaggatgaagaggaagaagacgacgactgggatgaagaggtccttgaggagaccgccttggaaggattctctaccccccttgacctggataattctgtggacgaatatcaatttttcacacaggccctcataacagtacagagtagagatgcagcatggtaccaattgcttatggcgcccttgagtgaggaccagaggaccgctctccaggaagtgtacacgttggcagaacatagacggaccgtcgctgaagctaagaagaaaatcgaacagcagggaggttttacgttcgagaataagggcgtcttgtctgcttttaacttcggaacagtgcccagcaataactag

SEQ ID NO: 164513 - DNA, 1542 bp, Artificial Sequence
  derived and/or modified sequence
ctgagcagcggccacgagctggccaaggagtacatgaagccccacgtccggcctatcatgcaggagctgttacatatcgtgagggaaaccgaaaatgacgacgtgacgaatgtgatccagaaaatgatatgtgagtacagccaggaggtggcctctatcgccgtggatatgacccagcatttggcagaaatttttggcaaagtcctgcagtcagatgaatatgaagaagttgaggataaaactgtgatggctatgggcattctccacactatcgatactattctgaccgtggtggaggatcataaggagatcacacagcagctagagaacatctgcttaagaataattgatctcgtgctacaaaagcacgtgatcgagttctacgaggaaatcctcagcctggcgtatagccttacctgccatagtatttctccacagatgtggcaacttttggggattttatatgaagttttccagcaggactgttttgagtattttacggatatgatgccactgttgcataattatgtaaccatcgacacagacaccctgctgagcaacgctaagcatctggaaatactctttacgatgtgtaggaaggtgctgtgtggcgacgctggcgaggacgcggaatgtcatgctgccaagctgctggaagtgattatcttgcagtgcaagggtcgggggattgaccagtgtattccgctgttcgtgcagcttgttctcgagcgactgacacgcggggtgaagactagtgagttgagaacaatgtgtcttcaagttgctatcgcagccctatactacaacccagacctcctgctgcacacgctcgaaagaattcagctgccgcacaatcctggccctataaccgttcagtttataaaccagtggatgaacgacaccgactgcttccttgggcatcatgataggaaaatgtgtataatcggcctgtcaatccttcttgaactgcagaataggcccccggctgtggacgccgtcgtcggccagatagtgccttctattctattcttattcctcggcctgaaacaggtgtgtgcgacccgccagctcgtgaaccgggaggataggagtaaggcggaaaaagctgacatggaagagaatgaggagatctcaagtgacgaggaggagaccaacgtaacagctcaggctatgcagtccaacaatggacgcggcgaagacgaagaggaggaggacgatgattgggacgaagaagtcctcgaggaaaccgcactggaaggcttctcaacccccctggacttggataactccgtcgatgaataccagtttttcacccaggccttaatcactgtccaatctcgtgatgcagcctggtaccagttgcttatggctcctctaagcgaagatcaacgcactgcccttcaggaggtgtacactctggccgaacatagaagaactgtggcagaggcaaaaaagaaaatcgaacagcagggggggttcacatttgaaaacaagggcgttctcagcgctttcaatttcggtacggtgccgtccaacaactag

SEQ ID NO: 164514 - DNA, 3114 bp, Artificial Sequence
  derived and/or modified sequence
atggatcttaatcggattatacaagcgttaaagggaaccatcgatcccaagctaaggatagcagctgaaaatgaactgaaccagagctataaaatcataaactttgcgccatcattgctgcgcatcatcgtctcggaccatgtggagtttccagttcgccaggctgcagctatttatttaaagaatatggtgacccagtactggccggatcgtgaaccaccccctggcgaagcgatattccccttcaatatccatgaaaatgatagacagcagatacgcgacaacattgtggagggcattattcgctcccccgatctggtaagggtgcaactgaccatgtgtcttcgcgctattattaagcacgacttcccaggccactggcccggagtagtggacaaaatagattactatttgcagtctcagtccagcgcctcatggctggggtctctgctgtgcctgtatcagctggtcaagacctacgagtacaaaaaggcagaggagagggaaccccttataatagcgatgcagatctttttgccgagaatccaacagcaaatagtccagttgctgccggacagcagttactatagtgtgctgctccagaagcagattctcaaaatattttacgctcttgtacagtatgcactccccttgcagttggtcaacaaccaaacgatgaccacgtggatggaaatctttaggacaatcatcgaccgaaccgtaccacccgagacactgcatattgacgaggacgacagacccgagcttgtttggtggaaatgcaagaaatgggccctgcacattgttgcaagattgtttgaacgatacggttccccgggaaacgttaccaaagaatattttgaattttccgagtttttcttaaagacttatgcagtgggtatccaacaggtgttactcaagatcctggaccaataccggcagaaggagtacgttgcccctagagtgcttcaacaggcttttaactacctgaatcagggcgttgtgcactcaattacctggaagcagatgaaaccccacatacagaacatctccgaagatgtgatcttcagcgtgatgtgttacaaggacgaggatgaggagctgtggcaggaggacccgtacgagtacatcagaatgaagttcgacatattcgaggactacgcatctcctacgaccgccgcacagaccttactgtatacggccgctaagaagcgcaaggaagtcctgcccaaaatgatggctttttgttaccagattctcacagacccaaattttgaccctcgcaagaaagatggcgcattacacgttattgggtcgctcgcagaaatactgctgaaaaagtccttgttcaaagaccaaatggagctgttccttcagaaccacgtattccccttattgctgtccaatttagggtatctaagggctcgcagctgttgggttctgcacgcattttcctcactcaagttccacaacgagctcaatttgcgcaatgcagtggaactagctaaaaaatccctcattgaggataaggagatgccagtcaaggttgaagctgccctagccctgcagagcttaatttctaatcagatccaggctaaagaatatatgaaaccccacgtgaggcccatcatgcaagaactgctccatattgtcagggaaactgagaacgacgatgtgacgaacgtgattcaaaagatgatctgtgaatattctcaagaggtggcatcaattgccgtggacatgacgcagcacctggcagagattttcggaaaggtgctgcagagtgacgagtacgaggaagtcgaggacaaaacagttatggccatgggaatcctgcacacaatcgatactattctcactgtcgtggaagaccacaaagagatcacccagcagctggagaacatctgcctgcggatcatagaccttgtgctccagaagcacgtgattgaattctatgaggaaattctctctctggcttatagcctaacatgccatagtatttctccacagatgtggcagctgttaggcattctgtacgaggtgttccaacaggactgtttcgagtatttcactgacatgatgccactgctgcacaactacgtgacaattgatacagataccctcctgagcaacgccaagcatttggaaattttgttcacaatgtgccgtaaagtcctttgcggagatgccggagaggacgcggagtgccacgccgctaagctactggaggtcataattctccagtgcaagggaagaggaatcgaccagtgcattcctctcttcgtccagctcgttctggaaaggctgacaagaggagtcaagacaagtgaactgagaacaatgtgcctacaggtggctatcgctgcactgtactacaaccccgatctgcttctgcataccctggagcgaatacagttaccacacaaccctgggcctatcaccgtgcagttcatcaatcaatggatgaatgacactgactgttttctgggacaccacgacaggaagatgtgcattattggtctttcgattcttttggaactgcagaaccgcccaccagcagtcgatgccgtcgtagggcagatagtcccaagcattctttttcttttcttaggactcaagcaggtgtgcgctacccgccagctggtgaatcgtgaagataggtcaaaggcagagaaggccgacatggaggagaacgaggagatttcctcagatgaggaggaaactaacgtaaccgcccaggcgatgcaatcaaacaacggccgaggggaagacgaggaggaggaggatgatgattgggatgaagaagtcttagaggagacagcgcttgagggcttttcaacacctctggacctggacaacagcgtggacgaataccaattcttcacacaggctttgattaccgtccaaagtcgcgatgccgcttggtaccagctgctgatggcccctctgagcgaggaccagcgaactgcactccaagaggtgtacaccctcgcagaacaccgacgcaccgtcgcggaggccaaaaagaagatcgaacagcaggggggtttcacgtttgaaaataaaggcgtgctatcagcctttaactttggtactgtgccatccaataattag

SEQ ID NO: 164515 - DNA, 1542 bp, Artificial Sequence
  derived and/or modified sequence
ctatccagtggacacgaactggctaaggaatatatgaagccacatgtcagacctatcatgcaggagctcctccacattgtgagggaaactgagaatgacgatgtgactaacgttatccagaaaatgatttgcgaatacagtcaggaggtagccagtatcgctgtggatatgacccagcacctcgctgagatttttggaaaggtgttacagtccgatgaatacgaggaggtcgaggataagaccgttatggccatgggcatcctgcatacaattgatacaatcctgacggtcgttgaggatcataaggagataacacaacagttggaaaatatctgcctgcgcataatcgatctcgtacttcagaaacacgttatcgagttctacgaagagattctgtcactagcctattcactgacttgccactccatttctccccagatgtggcagttgctagggattctgtatgaagtgttccagcaagattgtttcgaatacttcaccgacatgatgccactgctgcacaattatgtgactatcgatacagacaccctcctctcaaacgcgaaacacctcgaaatactttttacgatgtgtaggaaggtgctgtgcggcgacgcaggtgaagacgctgagtgccacgccgcaaagctgcttgaggtgataattttacaatgtaaaggtcggggaatcgatcagtgtattccactcttcgtccaattagttcttgagcggcttacccgaggggtgaaaacttctgagcttaggactatgtgcctgcaggtagccattgcagctctctattataaccctgacttgctcctgcacacactcgaacggattcaacttccacacaatcccggtcccatcaccgtgcagttcattaaccagtggatgaatgatacggattgttttctgggacaccacgatcggaagatgtgcattataggactctccatcctgctggaactgcagaatcggcctcctgcagtggacgccgtggttggccagattgtcccctccattctcttcttattcctggggctgaagcaagtgtgtgccactcgccagctggtcaaccgcgaagatcgttccaaagccgagaaggctgatatggaggaaaacgaggagataagctctgatgaggaggagaccaatgtcacggcccaggctatgcagagtaataacggacgcggtgaagacgaagaggaggaggatgacgattgggacgaggaggtgctcgaggaaacagcactggagggctttagtacccctctggacctcgataactccgtggatgagtaccagttcttcacgcaagccctgattaccgtgcagtctcgagacgccgcatggtatcagctactgatggctcctttgtctgaggaccaacgtaccgccctgcaggaagtgtatacccttgcagagcacaggcggacagtggctgaagctaagaagaaaatcgaacagcaaggtggattcacttttgaaaataagggagtgctgagcgcttttaactttgggacagtaccttccaataactag

SEQ ID NO: 164516 - DNA, 3114 bp, Artificial Sequence
  derived and/or modified sequence
atggacctgaacagaatcatccaggccctgaagggcaccatcgaccccaagctgagaatcgccgccgagaacgagctgaaccagagctacaagatcatcaacttcgcccccagcctgctgagaatcatcgtgagcgaccacgtggagttccccgtgagacaggccgccgccatctacctgaagaacatggtgacccagtactggcccgacagagagcccccccccggcgaggccatcttccccttcaacatccacgagaacgacagacagcagatcagagacaacatcgtggagggcatcatcagaagccccgacctggtgagagtgcagctgaccatgtgcctgagagccatcatcaagcacgacttccccggccactggcccggcgtggtggacaagatcgactactacctgcagagccagagcagcgccagctggctgggcagcctgctgtgcctgtaccagctggtgaagacctacgagtacaagaaggccgaggagagagagcccctgatcatcgccatgcagatcttcctgcccagaatccagcagcagatcgtgcagctgctgcccgacagcagctactacagcgtgctgctgcagaagcagatcctgaagatcttctacgccctggtgcagtacgccctgcccctgcagctggtgaacaaccagaccatgaccacctggatggagatcttcagaaccatcatcgacagaaccgtgccccccgagaccctgcacatcgacgaggacgacagacccgagctggtgtggtggaagtgcaagaagtgggccctgcacatcgtggccagactgttcgagagatacggcagccccggcaacgtgaccaaggagtacttcgagttcagcgagttcttcctgaagacctacgccgtgggcatccagcaggtgctgctgaagatcctggaccagtacagacagaaggagtacgtggcccccagagtgctgcagcaggccttcaactacctgaaccagggcgtggtgcacagcatcacctggaagcagatgaagccccacatccagaacatcagcgaggacgtgatcttcagcgtgatgtgctacaaggacgaggacgaggagctgtggcaggaggacccctacgagtacatcagaatgaagttcgacatcttcgaggactacgccagccccaccaccgccgcccagaccctgctgtacaccgccgccaagaagagaaaggaggtgctgcccaagatgatggccttctgctaccagatcctgaccgaccccaacttcgaccccagaaagaaggacggcgccctgcacgtgatcggcagcctggccgagatcctgctgaagaagagcctgttcaaggaccagatggagctgttcctgcagaaccacgtgttccccctgctgctgagcaacctgggctacctgagagccagaagctgctgggtgctgcacgccttcagcagcctgaagttccacaacgagctgaacctgagaaacgccgtggagctggccaagaagagcctgatcgaggacaaggagatgcccgtgaaggtggaggccgccctggccctgcagagcctgatcagcaaccagatccaggccaaggagtacatgaagccccacgtgagacccatcatgcaggagctgctgcacatcgtgagagagaccgagaacgacgacgtgaccaacgtgatccagaagatgatctgcgagtacagccaggaggtggccagcatcgccgtggacatgacccagcacctggccgagatcttcggcaaggtgctgcagagcgacgagtacgaggaggtggaggacaagaccgtgatggccatgggcatcctgcacaccatcgacaccatcctgaccgtggtggaggaccacaaggagatcacccagcagctggagaacatctgcctgagaatcatcgacctggtgctgcagaagcacgtgatcgagttctacgaggagatcctgagcctggcctacagcctgacctgccacagcatcagcccccagatgtggcagctgctgggcatcctgtacgaggtgttccagcaggactgcttcgagtacttcaccgacatgatgcccctgctgcacaactacgtgaccatcgacaccgacaccctgctgagcaacgccaagcacctggagatcctgttcaccatgtgcagaaaggtgctgtgcggcgacgccggcgaggacgccgagtgccacgccgccaagctgctggaggtgatcatcctgcagtgcaagggcagaggcatcgaccagtgcatccccctgttcgtgcagctggtgctggagagactgaccagaggcgtgaagaccagcgagctgagaaccatgtgcctgcaggtggccatcgccgccctgtactacaaccccgacctgctgctgcacaccctggagagaatccagctgccccacaaccccggccccatcaccgtgcagttcatcaaccagtggatgaacgacaccgactgcttcctgggccaccacgacagaaagatgtgcatcatcggcctgagcatcctgctggagctgcagaacagaccccccgccgtggacgccgtggtgggccagatcgtgcccagcatcctgttcctgttcctgggcctgaagcaggtgtgcgccaccagacagctggtgaacagagaggacagaagcaaggccgagaaggccgacatggaggagaacgaggagatcagcagcgacgaggaggagaccaacgtgaccgcccaggccatgcagagcaacaacggcagaggcgaggacgaggaggaggaggacgacgactgggacgaggaggtgctggaggagaccgccctggagggcttcagcacccccctggacctggacaacagcgtggacgagtaccagttcttcacccaggccctgatcaccgtgcagagcagagacgccgcctggtaccagctgctgatggcccccctgagcgaggaccagagaaccgccctgcaggaggtgtacaccctggccgagcacagaagaaccgtggccgaggccaagaagaagatcgagcagcagggcggcttcaccttcgagaacaagggcgtgctgagcgccttcaacttcggcaccgtgcccagcaacaactag

SEQ ID NO: 164517 - DNA, 1542 bp, Artificial Sequence
  derived and/or modified sequence
ctgagcagcggccacgagctggccaaggagtacatgaagccccacgtgagacccatcatgcaggagctgctgcacatcgtgagagagaccgagaacgacgacgtgaccaacgtgatccagaagatgatctgcgagtacagccaggaggtggccagcatcgccgtggacatgacccagcacctggccgagatcttcggcaaggtgctgcagagcgacgagtacgaggaggtggaggacaagaccgtgatggccatgggcatcctgcacaccatcgacaccatcctgaccgtggtggaggaccacaaggagatcacccagcagctggagaacatctgcctgagaatcatcgacctggtgctgcagaagcacgtgatcgagttctacgaggagatcctgagcctggcctacagcctgacctgccacagcatcagcccccagatgtggcagctgctgggcatcctgtacgaggtgttccagcaggactgcttcgagtacttcaccgacatgatgcccctgctgcacaactacgtgaccatcgacaccgacaccctgctgagcaacgccaagcacctggagatcctgttcaccatgtgcagaaaggtgctgtgcggcgacgccggcgaggacgccgagtgccacgccgccaagctgctggaggtgatcatcctgcagtgcaagggcagaggcatcgaccagtgcatccccctgttcgtgcagctggtgctggagagactgaccagaggcgtgaagaccagcgagctgagaaccatgtgcctgcaggtggccatcgccgccctgtactacaaccccgacctgctgctgcacaccctggagagaatccagctgccccacaaccccggccccatcaccgtgcagttcatcaaccagtggatgaacgacaccgactgcttcctgggccaccacgacagaaagatgtgcatcatcggcctgagcatcctgctggagctgcagaacagaccccccgccgtggacgccgtggtgggccagatcgtgcccagcatcctgttcctgttcctgggcctgaagcaggtgtgcgccaccagacagctggtgaacagagaggacagaagcaaggccgagaaggccgacatggaggagaacgaggagatcagcagcgacgaggaggagaccaacgtgaccgcccaggccatgcagagcaacaacggcagaggcgaggacgaggaggaggaggacgacgactgggacgaggaggtgctggaggagaccgccctggagggcttcagcacccccctggacctggacaacagcgtggacgagtaccagttcttcacccaggccctgatcaccgtgcagagcagagacgccgcctggtaccagctgctgatggcccccctgagcgaggaccagagaaccgccctgcaggaggtgtacaccctggccgagcacagaagaaccgtggccgaggccaagaagaagatcgagcagcagggcggcttcaccttcgagaacaagggcgtgctgagcgccttcaacttcggcaccgtgcccagcaacaactag

SEQ ID NO: 164518 - protein, 1038 aa, Artificial Sequence
  derived and/or modified sequence
MDPNTIIEALRGTMDPALREAAERQLNEAHKSLNFVSTLLQITMSEQLDLPVRQAGVIYLKNMITQYWPDRETAPGDISPYTIPEEDRHCIRENIVEAIIHSPELIRVQLTTCIHHIIKHDYPSRWTAIVDKIGFYLQSDNSACWLGILLCLYQLVKNYEYKKPEERSPLVAAMQHFLPVLKDRFIQLLSDQSDQSVLIQKQIFKIFYALVQYTLPLELINQQNLTEWIEILKTVVNRDVPNETLQVEEDDRPELPWWKCKKWALHILARLFERYGSPGNVSKEYNEFAEVFLKAFAVGVQQVLLKVLYQYKEKQYMAPRVLQQTLNYINQGVSHALTWKNLKPHIQGIIQDVIFPLMCYTDADEELWQEDPYEYIRMKFDVFEDFISPTTAAQTLLFTACSKRKEVLQKTMGFCYQILTEPNADPRKKDGALHMIGSLAEILLKKKIYKDQMEYMLQNHVFPLFSSELGYMRARACWVLHYFCEVKFKSDQNLQTALELTRRCLIDDREMPVKVEAAIALQVLISNQEKAKEYITPFIRPVMQALLHIIRETENDDLTNVIQKMICEYSEEVTPIAVEMTQHLAMTFNQVIQTGPDEEGSDDKAVTAMGILNTIDTLLSVVEDHKEITQQLEGICLQVIGTVLQQHVLEFYEEIFSLAHSLTCQQVSPQMWQLLPLVFEVFQQDGFDYFTDMMPLLHNYVTVDTDTLLSDTKYLEMIYSMCKKVLTGVAGEDAECHAAKLLEVIILQCKGRGIDQCIPLFVEAALERLTREVKTSELRTMCLQVAIAALYYNPHLLLNTLENLRFPNNVEPVTNHFITQWLNDVDCFLGLHDRKMCVLGLCALIDMEQIPQVLNQVSGQILPAFILLFNGLKRAYACHAEHENDSDDDDEAEDDDETEELGSDEDDIDEDGQEYLEILAKQAGEDGDDEDWEEDDAEETALEGYSTIIDDEDNPVDEYQIFKAIFQTIQNRNPVWYQALTHGLNEEQRKQLQDIATLADQRRAAHESKMIEKHGGYKFSAPVVPSSFNFGGPAPGMN

SEQ ID NO: 164519 - DNA, 3117 bp, Artificial Sequence
  derived and/or modified sequence
atggatccaaacacaataattgaggcgttacgtggcacgatggacccagcactccgggaggccgcagagcgacagctcaacgaggcacacaaatctctaaacttcgtttctactctgctccaaataactatgtccgagcaactggatctaccggttagacaggctggcgtgatctacctaaaaaatatgatcactcagtactggccggaccgagagaccgcacccggcgacatctcaccctataccattcctgaggaggacaggcattgtatacgggaaaatattgtggaagccattatacactctcccgaactgatccgggtgcagctgaccacctgtatccatcacataattaaacacgattatccctcaagatggacagctatagtcgacaagataggtttttatctccagtccgacaattccgcctgctggttaggtatcctgctgtgcctctaccagttagtgaagaactacgaatacaaaaagcccgaggaaaggtccccgttggtggctgctatgcaacatttcttgcccgtgctcaaagatagattcatacagttactgtctgatcagtcagaccagtcggtactaattcagaagcagatttttaagatattttacgcactagtccaatacacactgcccctggaactgattaaccaacagaacctgacagagtggatcgagatactgaagactgtggttaaccgggacgttcccaacgaaactctgcaggtcgaggaggacgatcgacccgaactaccttggtggaaatgtaagaagtgggcgttgcacatcctggccaggctgtttgagcgctatggatctcctggcaatgtgagcaaggagtacaacgagttcgccgaggtgttcctcaaggcgttcgccgttggagtgcaacaggtccttctgaaagttttgtaccaatataaagagaagcagtatatggcgccccgggtacttcagcagactctcaactatattaatcagggcgtttcccacgcactgacctggaagaatctgaagccgcatatccaagggatcatccaggatgtaattttccccctgatgtgttacaccgatgccgacgaagaactttggcaagaagatccatacgagtatattaggatgaagttcgatgtattcgaggatttcattagcccaacaactgcagctcagaccttgctattcaccgcttgctctaaaagaaaagaggtgctgcagaaaactatggggttttgctatcagattctgactgagcctaatgccgatccacgcaagaaagatggtgcccttcatatgatcggctcgctcgctgagatcttactaaaaaagaaaatctacaaggaccaaatggagtatatgctccagaaccacgtgttccccctgttctcttcagaactgggctatatgagagcccgcgcatgctgggtcctgcactacttttgtgaggtgaagtttaagtcagaccagaatctgcaaactgcccttgagctgacacggcgatgcttaatcgacgacagagagatgccagtgaaggttgaggcagcaatcgctctgcaggtgctgatatctaatcaggagaaagccaaagagtacataactcccttcattcggcccgtaatgcaggctctacttcatattattagggagacggagaatgacgatctgactaacgtcatccagaagatgatctgcgagtactccgaggaggtcacaccaattgccgttgaaatgacgcagcaccttgcaatgacttttaaccaggtaatccagactggccctgacgaggaggggtcagacgataaggctgtaacagctatgggtattctgaataccattgataccctgcttagtgtcgtggaagatcataaggaaattactcagcagctggagggaatctgtctgcaggtgataggcaccgtgttgcagcagcacgtcctcgagttctacgaggaaatcttctccctggctcattccctgacatgtcaacaggtctccccccagatgtggcagctgctccctttggtctttgaggtcttccagcaagacggcttcgactacttcaccgacatgatgcccttactacataattatgtgactgtggatacagacacgctgctctccgataccaagtacctggagatgatctactctatgtgcaagaaagtgctgaccggcgttgctggtgaggacgctgaatgccatgcagctaaacttctcgaggttattattcttcagtgtaagggacgggggatcgatcagtgtatccccctctttgtcgaggccgcactcgaaaggcttactcgggaagtcaagacatccgaactgcgaactatgtgtctccaagtggcgatcgccgcgctgtactataacccccacctcctactcaacacgctagagaatctgcggtttccaaacaacgtggagccggtcacaaatcactttattacccagtggctcaacgacgtcgactgtttcctaggccttcatgatcgaaaaatgtgtgtgctgggactttgcgctttgattgatatggagcagatcccacaagttctcaatcaggttagcggacagatacttccggccttcattctgctgttcaatggactgaagagagcctatgcctgccatgctgagcacgagaacgactcagatgacgatgacgaggctgaagacgacgacgagaccgaggagctgggctccgacgaagatgatatagatgaagatgggcaggaatatctggagatactggccaaacaggcaggagaggatggggacgatgaggattgggaggaagatgatgccgaagaaaccgcgctagaggggtactccacaattatcgacgatgaagataatccagttgacgagtatcaaatttttaaagccattttccaaactatacagaacaggaatcctgtgtggtaccaggccctgacacatggtctaaatgaggaacagaggaaacaattgcaggatatcgctactttggcagatcagcgaagggctgcacacgaatctaagatgatcgaaaagcacggggggtataagttctcagcgccagttgtgcccagttctttcaactttggcggccctgcccctggaatgaattag

SEQ ID NO: 164520 - DNA, 6191 bp, Artificial Sequence
  derived and/or modified sequence
gttctatccggggccttggcgcttctctttcctttcgcgccggttgccgctgcggagcgcggcgggtccatgtgcgcagtgagtggcgctattcctggcccagtagcacccgagccccgggtttgaccgagtccgcgctgcgatggaccccaacaccattatcgaggccctgcggggcactatggacccagccctgcgtgaggccgcggagcgccagctcaatgaagcacacaagtctctgaattttgtctcaacactgctccagattactatgtcggaacagctggatttacctgtgagacaggcaggtgttatctatctgaaaaatatgataacacagtattggcctgatcgagaaacagcaccaggggatatatccccttatactattccagaagaagatcgccattgtattcgagaaaatattgtagaagccattatccattctcctgagctcatcagggtacagcttactacatgcattcatcacatcatcaaacatgattatccaagccgctggactgccattgtggacaaaattggcttttatcttcagtccgataacagtgcttgttggctaggaattcttctttgcctttatcagcttgtgaaaaattatgagtataaaaaaccagaggagcggagtccattggtagcagcaatgcagcattttctgccagttctaaaggatcgttttatccagcttctttctgaccagtctgatcagtctgtcctcatccagaaacagatattcaagatcttctatgctcttgttcagtatacactaccactggaactgataaaccaacagaacctgacagaatggatagaaattttaaagactgttgtgaacagggatgtacctaatgaaacacttcaagttgaagaagatgatcgacctgagttaccatggtggaaatgcaagaagtgggccttacatattttagcaagactttttgaaagatatggaagccctggcaatgtttccaaggagtataatgaatttgctgaagtatttctgaaggcatttgctgttggtgtccagcaagttttattgaaggtgttatatcagtacaaggagaagcaatatatggctcctcgagttttacaacagacattaaattatattaatcaaggagtttctcatgctctcacctggaagaatctgaagccccatatacaaggcattatccaagatgttatttttccattgatgtgctatacagatgctgatgaggaactttggcaagaagacccttacgaatatatacgcatgaagtttgatgtgtttgaagatttcatttctcctaccactgctgcccagacacttttgtttacagcctgtagtaagaggaaagaggtactgcaaaagactatgggattttgttaccagattcttacagaaccaaatgctgaccctcgaaaaaaagatggagccctgcatatgattggctctttagctgaaatacttctgaagaaaaagatctataaagatcagatggaatacatgttgcagaatcatgtattccctctcttcagcagtgaactaggctacatgagagcaagggcttgctgggtacttcactatttttgtgaagtgaagttcaaaagtgatcagaaccttcaaacagccttagagctaacaagaagatgtctgattgatgatagagaaatgcctgtgaaagtggaagctgccattgcccttcaagtattgatcagcaatcaagaaaaagctaaagaatatatcacaccattcatcagacctgtaatgcaggctcttcttcacattataagagaaacagaaaatgatgaccttaccaatgtaattcagaaaatgatctgtgaatatagtgaagaagttactcctattgcagtagaaatgacacaacatttggcaatgacatttaaccaagtaatccagacggggccagatgaagaaggtagtgatgacaaagcagttactgctatgggaattctgaatacaattgatacacttcttagtgtagttgaagatcataaagagataacccaacagcttgagggaatctgcttacaggtcattggtactgttttacaacagcatgtcttagaattctatgaggagatcttctctttagcgcacagtttgacatgtcaacaagtgtctccacagatgtggcagctactaccccttgtatttgaagtctttcagcaagatggctttgattactttacagatatgatgcccctccttcataattatgtaacagttgatacagacacacttctgtctgacaccaagtatcttgaaatgatatacagtatgtgcaaaaaggttcttacaggagttgcaggagaagatgcagagtgtcatgcagcaaaattgttagaggtcatcattctgcagtgcaaagggcgtggcattgaccagtgcattcccttattcgtggaagcagccttagaaagactgacaagagaggttaagacaagtgaacttcgaactatgtgtctgcaagttgcaattgcagctttgtattataatccacacctactactcaataccttagaaaatcttcgcttccctaataatgttgaaccagttacaaatcattttattacacagtggcttaatgatgttgactgtttcttggggcttcatgacagaaagatgtgtgttctcggactctgtgctcttattgatatggaacagataccccaagttttaaatcaggtttctggacagattttgccggcttttatccttttatttaacggattgaaaagagcatatgcctgccatgcagaacatgagaatgacagtgatgatgatgatgaagctgaagatgatgatgaaaccgaggaactggggagtgatgaagatgatattgatgaagatgggcaagaatatttggagattctggctaagcaggctggtgaagatggagatgatgaagattgggaagaagatgatgctgaagagactgctctggaaggctattccacaatcattgatgatgaagataaccctgttgatgagtatcagatatttaaagctatctttcaaactattcaaaatcgtaatcctgtgtggtatcaggcactgactcacggtcttaatgaagaacaaagaaaacagttacaggacatagcaactctggctgatcaaagaagagcagcccatgaatccaaaatgattgagaagcatggaggatacaaattcagtgctccagttgtgccaagttctttcaattttggaggcccagcaccagggatgaattgagttatctctttctttcctgctgtgtgcttgtagtgaagagcttgtgttcctcctagtagtggttccagaactggttcatgttatctattctaaactaataatcaatagatggacaaaagaaacaacaaccccaggagatgggacctgatcatgcaacctggcactggaaaagaaatcagcgggattttgggggtggggggggatgggaggtaccttagagggagtattttctttattttttgaagaaagtaagatcctgactctgaagcttcaaagtgacactgtggaaatctgaaacgaggggatgtcatgaaggcagcttttctttttctgaggaaaaaataggcatgggctacaggactatttaaaatgtctcatttacagtataaaactcaaaggtagatgtaatttttacacctatgagtatttgtccaatttctgtctcttcctcaccattgggtatctattctttatatgtaaataagataaggtcatctgatagccttattcagtcttcatcattttcatcattgttcctatgtagattattggacatttattgtagcactacataactgattataaaaatctgtaaatgaattagcactttcatattgaaacaagcctgctagcctatgtataaaatagcaaaatgtttgctgtttataaaaagatgtaatggggtggggggcaggggtaatttcaagttattaatttaaaaatgaactagcaattttgtacctggtgactttgtggtgcactcacctctgatagtgacttgaattcggtatgtaaaaaggggttagtggtatttcattgctgctaaaaatgacaactccctctgtgtcctgtttttcttaaagctgtcagtgtacaagtgggtatttgaataccagaccttactgtaaaaaataaaaaaggtggtatctagagcatgtaaattggatataaagttctgctcttaaagagttgatctaagagtatggctaaacatctatatatgcaatctattaaaagaacttaattcggctattatgtcttgatttgattgcagttttttcctaattataacaaatttttcctcattggcctgtttttaatcctgtgcctagaaggagtacaaaatgcacactttacaaaattgatatttaacacttacccactcccctttccccatctcttctaccgctcttgttgatcgtggtatctgatcttgactagataggctgaaggcacatggttccctccaaaaaccactattgataccactacaaaaacaagccagcaaaaagatactgtagagaggttggcttgcttccctctcttcctaactgcatgttgaaaaataagccgttattgatcttaaacatcggtcagatgagtcatacattgggttattttttatatacatgtatacacaaaatatttcaaattgaaagcaacatcttaatggattcaaaactattacaagctgttgtctaaaacaggtgagaaaaaaatttataactgtaaaaacaaatgcacatattgatatttaaaatgcgtaattaagaaaacccattgttgttgtgtttttcttgtataccaataattaagccactactgttggcactgtttggttttctattttaacactgaaggagtgaaagtatttcctatatttatgaatttactactaaaatcttggcaaaaaaagaaaaaaattgtctaacgtgtgtgggtgaaaactgttaatcaagtgtttctactcccccccgaaaatcccctgaaagttggacaccaactgtataccctaggttgcttaaagggatttcactattatataaagtcaataaaaatgaagtagttgtatatatgcaacattgtgtacagaggggaaataatgaatagtattaaagaaacattctcgtcttcctttacctttaatcccctaatacctagtctactttttaaattttcagacttcactgctttttgaattcataattctaattttcacattattgttaatggaaaatcatatctaataaaggttttagttattcccatgcacagtatgaaaattctcatttgctgaggttttgtttcaagaaaatgtattggcatgtctttgagaacatgttttattgtctcctgtgtcatataatccaaactaatctccgtttacagactttaacttgaaattagaccttataattaaactatttaaatagtgttcaaatgatagtttctaatgcatcaaatatatacctcagttttcatgatttcctttaacattataatttggtatagatcaagaatcttaacatgtatcagtttctagatgaggctgcaggatttttggaaaactttttgaatgtatttacaatattctcttgtaattagctacatagggacttgtctttttttctttttacatacagcttttcctacagttttattaccctgtaatttttttttagttgtagaagttaattctgattttgtgtggatttcagtatttgtctttgttaatggcacatattagcataaatcacttttgtaaatgtaagctttctttttttttcttgaaaaagcctttctatttatcagtattaaataaaggaagttaatctgtttctctgcaggtaataaaatagtgacacactgtattaagatagtgactgctatactcaactctggaagagactagagtatagagcatgagtggcaaaaccacagcccttgggccatatgctgctattcagtcccagatgtagcccctgaagcaagcataaagaaaaatgaattaaaaattaaattaatatggaaagttaaaaaatggattacattagtatgactaaaccatgtctttggcaaagatctaacacaatgtcttaagtataataggtagtctctgtttgtaaaataaatgacttaaatttaaaacatc

SEQ ID NO: 164521 - DNA, 3117 bp, Artificial Sequence
  derived and/or modified sequence
atggaccccaacaccatcatcgaggccctgcggggcaccatggaccctgccctgcgggaggccgctgagcggcagctgaatgaggcccacaagagcctgaactttgtgtccaccctgctgcagatcaccatgtctgagcagctggacctgcctgtgcggcaggccggggtcatctacctgaagaacatgatcacccagtactggccagaccgggagacagcccctggggacatcagcccctacaccatccctgaggaggacagacactgcatcagagaaaatattgtggaggccatcatccacagccctgagctgatccgggtgcagctgaccacctgcatccaccacatcatcaagcatgactaccccagccgctggacagccatcgtggacaagattggcttctacctgcagagcgacaacagcgcctgctggctgggcatcctgctgtgcctgtaccagctggtgaagaactatgagtacaagaagccagaggagaggagccccctggtggccgccatgcagcacttcctgcctgtgctgaaggaccgcttcatccagctgctgagtgaccagagcgaccagagcgtgctgatccagaagcagatcttcaagatcttctacgccctggtgcagtacaccctgcccctggagctgatcaaccagcagaacctgacagagtggattgagatcctgaagacagtggtgaacagagatgtgcccaatgagaccctgcaggtggaggaggatgacaggcctgagctgccctggtggaagtgcaagaagtgggccctgcacatcctggcccggctgtttgaaagatatggcagccctggaaatgtgtccaaggagtacaatgaatttgctgaggtgttcctgaaggcctttgctgtgggcgtgcagcaggtgctgctgaaggtgctgtaccagtacaaggagaagcagtacatggccccccgggtgctgcagcagaccctgaactacatcaaccagggcgtgtcccatgccctgacctggaagaacctgaagccccacatccagggcatcatccaggacgtcatcttccccctgatgtgctacacagatgctgatgaggagctgtggcaggaggacccctatgagtacatccgcatgaagtttgatgtgtttgaggacttcatcagccccaccacagctgcccagaccctgctcttcaccgcctgcagcaagaggaaggaggtgctgcagaagaccatgggcttctgctaccagatcctgacagagcccaatgctgaccccaggaagaaggatggagccctgcacatgattggcagcctggccgagatcctgctgaagaagaagatctacaaggaccagatggagtacatgctgcagaaccacgtgttccccctcttcagcagcgagctgggctacatgagggcccgggcctgctgggtgctgcactacttctgtgaggtgaagttcaagagtgaccagaacctgcagacagccctggagctgacccggcgctgcctgattgatgaccgggagatgcctgtgaaggtggaggccgccatcgccctgcaggtgctgatcagcaaccaggagaaggccaaggagtacatcacccccttcatccggcctgtgatgcaggccctgctgcacatcatccgggagacagaaaatgatgacctgaccaacgtcatccagaagatgatctgtgagtacagcgaggaggtgacccccatcgctgtggagatgacccagcacctggccatgaccttcaaccaggtgatccagacaggcccagatgaggagggcagtgatgacaaggctgtgacagccatgggcatcctgaacaccatcgacaccctgctgtctgtggtggaggaccacaaggagatcacccagcagctggagggcatctgcctgcaggtgattggcaccgtgctgcagcagcacgtgctggagttctatgaggagatcttcagcctggcccacagcctgacctgccagcaggtgagcccccagatgtggcagctgctgcccctggtgtttgaggtgttccagcaggacggctttgactacttcacagacatgatgcccctgctgcacaactacgtgacagtggacacagacaccctgctgagtgacaccaagtacctggagatgatctacagcatgtgcaagaaggtgctgactggagtggccggggaggatgctgaatgtcatgctgccaagctgctggaggtgatcatcctgcagtgcaagggccggggcatcgaccagtgcatccccctgtttgtggaggccgccctggagcggctgacccgggaggtgaagaccagcgagctgcggaccatgtgcctgcaggtggccatcgccgccctgtactacaacccccacctgctgctgaacaccctggagaacctgcgcttccccaacaacgtggagcctgtgaccaaccacttcatcacccagtggctgaatgatgtggactgcttcctgggcctgcatgacaggaagatgtgtgtgctgggcctgtgtgccctgattgacatggagcagatcccccaggtgctgaaccaggtgtctggccagatcctgcctgccttcatcctgctcttcaacggcctgaagagggcctatgcctgccacgccgagcatgaaaatgacagtgatgatgatgatgaagcagaagatgatgatgaaacagaggagctgggcagtgatgaagatgacattgatgaagatggccaggagtacctggagatcctggccaagcaggccggagaagatggagatgatgaggactgggaggaggatgatgctgaggagacagccctggagggctacagcaccatcattgatgatgaggacaaccctgtggatgagtaccagatcttcaaggccatcttccagaccatccagaacagaaatcctgtgtggtaccaggccctgacccacggcctgaatgaggagcagaggaagcagctgcaggacatcgccaccctggccgaccagaggcgggccgcccacgagagcaagatgattgagaagcacggcggctacaagttcagcgcccctgtggtgcccagcagcttcaactttggaggccctgcccctggcatgaactag

SEQ ID NO: 164522 - DNA, 3117 bp, Artificial Sequence
  derived and/or modified sequence
atggaccccaacaccatcatcgaggccctgcggggcaccatggaccccgcactgcgtgaggctgccgagcgccaactgaacgaggctcataaatccctgaattttgtgtctacactgctgcagataactatgtctgaacagctcgacctgccagtgcgccaggcaggagtgatttacctcaagaacatgattactcaatattggccagatcgagaaaccgctccaggagatatttcaccctacacaattcctgaggaagacagacattgcatcagagaaaacatcgtcgaagctatcattcacagccctgagctgatccgcgtgcaactgacaacatgtatacaccacatcatcaagcatgattatcccagccgctggaccgcgattgtagataagatcggtttctacctgcagtctgataacagcgcttgctggctaggaatcctgttatgcttataccaattggttaagaattacgaatataaaaagccagaagaacgctcacctctagtcgctgcaatgcagcatttcctaccagtcctgaaagatcgtttcatccagttactttcagaccagagtgatcaaagtgtcttgattcaaaagcagatatttaagattttctacgctctcgtgcagtataccctcccactggagctaataaatcagcagaatctaaccgaatggattgaaattctgaagacggtggtcaaccgagacgttcccaatgagacacttcaggtggaggaagatgatcgccctgagcttccctggtggaagtgtaagaaatgggccctgcacatattggctcgtcttttcgagcgttatgggtctcccggaaatgtctctaaggaatacaatgaatttgcagaggtattcctgaaagccttcgccgttggcgtgcaacaggtcctactcaaagtcttgtatcagtacaaagaaaaacaatatatggcacctagagtgctgcaacaaacactcaactatatcaaccagggggtatcgcacgctcttacatggaagaacctcaagcctcacatccaaggaattatccaggacgtgatcttccctctgatgtgctataccgatgccgacgaagagctctggcaggaggatccatatgaatacatacgcatgaaatttgacgttttcgaggactttatttctcctactacagctgctcagaccctgctgttcactgcttgttcgaagcgaaaagaggtgctgcagaaaactatggggttttgttaccaaatccttaccgagcccaacgcggacccgcgaaaaaaggatggcgctctgcacatgatcggctcactagccgaaatcctgctaaagaagaaaatttacaaagatcagatggaatacatgctgcagaaccacgtcttcccacttttcagcagtgagctgggttatatgagagcgcgtgcgtgctgggtcttgcactatttctgcgaagttaagttcaagtctgaccagaacctccagactgcccttgagctgaccaggcgatgtctgatcgatgaccgagagatgccagtaaaagtggaggccgcaatcgcccttcaagtgctgattagcaaccaagagaaggctaaagaatacatcacaccttttataagaccggtgatgcaggccctgctgcacattattagagaaacagagaacgacgatctgaccaatgtgatccagaaaatgatatgtgaatacagcgaagaagtgactcccattgctgtggaaatgacacaacatctcgctatgaccttcaatcaggtaattcagaccggacccgatgaggaaggttctgatgataaagcggtgacagcaatggggattctgaataccattgataccctcttgtccgtggtggaggatcataaagagataactcagcagctcgaaggcatctgcctgcaggtgatagggaccgtgttgcagcagcatgttctcgagttctacgaggagatattctcactggcccacagtcttacctgtcagcaggtttctccacagatgtggcagctcctacctctggtattcgaagtgttccaacaggacggctttgattactttacggacatgatgcccctgctgcataactacgtgaccgtggataccgacacactgctttccgacaccaagtacctggagatgatctatagtatgtgcaagaaggttttgacaggtgtcgctggagaggacgccgagtgccacgctgcaaaactgttggaggtcattatattacagtgcaagggccggggcatcgaccagtgcatccccttgtttgtcgaagctgccctggagagattgactcgcgaagtgaagacctcagagcttcgcacgatgtgcctgcaagtggctatcgcggcgctgtactataacccacacctgttgcttaatacactggagaacctgagatttcccaacaatgtggagccagtcactaatcattttataacccagtggttaaatgatgttgactgcttcctcgggctccacgatagaaagatgtgtgtgctgggcctctgcgctttgattgatatggaacagattccccaggtactcaaccaggtgtccggccagatcctccccgctttcatcctgctctttaacggcttgaaacgcgcttatgcatgtcatgccgaacatgagaatgactcagatgatgacgacgaagccgaagacgacgacgaaaccgaagaactgggtagcgacgaggatgacatcgacgaggacggacaggagtacttagagatcttagctaagcaggccggggaggacggcgacgacgaagattgggaagaagacgatgccgaggagactgccctggaggggtatagcactattattgatgacgaggacaatcctgttgacgaataccagatctttaaggcaatctttcagacaatccaaaatcgcaatccagtttggtatcaggctctgacccacggacttaacgaagaacagcgcaaacagctgcaggatatcgccaccctggccgatcaacgacgcgccgctcatgaatcaaagatgattgagaagcacggcgggtacaaattcagtgcccccgttgtgcccagcagctttaactttggcgggcccgcgcccggcatgaattag

SEQ ID NO: 164523 - DNA, 3117 bp, Artificial Sequence
  derived and/or modified sequence
atggatccgaatactattattgaggccctgcgtggaacaatggaccccgcactgcgtgaagccgctgagcgtcagctgaacgaggcccataagtctctcaacttcgttagcactctgctacagatcacgatgtctgagcagctggatctgcccgtgcgacaggccggagtgatatatctgaaaaacatgatcacgcaatactggccagatagagagaccgccccaggggacatttcgccatatactattccagaagaagaccgtcattgtatacgagaaaacattgtggaggctataatacactctccagaacttatccgcgtgcagttaaccacttgtatacaccacattatcaaacacgactacccctctaggtggactgcaatcgtggataagatcggattctatctgcagagcgataactctgcttgttggctggggattctgctgtgcctatatcagcttgtgaagaactatgaatataagaagcccgaggagagatctcccctggtagctgcaatgcagcattttctcccagtcctgaaagatcggttcatccagttattgtctgatcagagtgatcaaagtgtgttgatccagaagcagatttttaaaattttttacgccctggtccaatacaccttacctttagagttgatcaatcagcaaaatctgaccgagtggatcgagattttgaagaccgtggtaaaccgagatgtgccaaacgaaaccctgcaagtggaggaggacgatcggcctgagttaccctggtggaaatgcaagaagtgggctctgcacatattggcccgtctttttgagagatacggaagtcccggaaacgtctccaaggaatacaacgagttcgccgaggtgttccttaaagcgtttgcagtaggggttcagcaggttcttctgaaggtgttgtaccagtacaaggaaaagcaatatatggcacctcgcgtgctgcagcagaccctgaactacatcaaccagggggttagtcacgcactcacctggaagaatctcaaaccccacattcagggaatcattcaggacgtaatttttcccttgatgtgctatacggacgcagacgaggagctctggcaagaggatccatatgaatacattaggatgaaattcgacgtattcgaagattttatatcccccaccaccgccgctcaaaccctcctgttcacagcctgttctaagcgtaaggaggtgctgcagaaaactatgggcttttgttaccaaattcttaccgagccaaatgcagaccccagaaaaaaagacggagccttacacatgatcggctccctggctgagatactccttaagaaaaaaatttataaggatcagatggagtacatgctgcagaaccacgtctttcccctgtttagtagcgagctgggctacatgcgagcacgtgcctgctgggtgctgcattatttttgtgaagtaaaattcaagtctgatcagaacctgcagactgccctagaactcaccaggcgttgcctcattgacgatagggaaatgcccgtgaaggtggaggccgcaattgctctgcaggttttgattagcaatcaggagaaggccaaggaatatataacccccttcattagaccagtaatgcaggctctgctccacattatcagagaaacagaaaatgatgatctgacaaacgtgattcaaaagatgatttgcgagtacagcgaagaagtaacacctatagcagtcgagatgactcagcacctggctatgacgtttaaccaagttattcagacagggcctgacgaggagggaagtgatgataaagcagtgacggcaatgggcatcctgaatactatcgataccctgctgagcgttgtggaggaccacaaggagatcacacagcagcttgagggtatctgtcttcaagtgattggaacagtgttgcagcagcatgtcctcgagttctacgaagagattttctcattggcgcacagcctcacttgccagcaggttagccctcaaatgtggcagttgctacctctggtgttcgaagtgttccaacaggatggtttcgactatttcacagatatgatgcctctgctgcataactacgtgactgtggataccgacaccctgctgagcgatacgaaatatcttgagatgatatactctatgtgcaagaaagttttgaccggggtcgcaggagaagacgcagaatgccacgcagctaaacttctcgaagtcatcatcctccagtgtaaggggaggggcatagatcagtgtatccctttgttcgtagaagcagctctcgagagactgaccagggaggtgaaaacgtctgaactgagaactatgtgtcttcaggtcgccatagcggctctctattacaacccacacctcctgctgaatactctggagaacctacgctttcccaataacgtggagcccgtcaccaatcacttcatcacacagtggctgaacgacgtggactgttttctaggacttcacgatcgcaagatgtgcgtactcgggctgtgcgcattgattgacatggaacaaatccctcaggtcctcaatcaggtgtcaggccagattttgccagccttcattcttctgttcaatgggttgaaaagggcctatgcatgccacgctgagcatgagaacgatagcgacgacgatgacgaagccgaggacgatgacgaaacagaagagctgggatctgacgaagatgacattgatgaagacggccaggagtaccttgaaatcctggccaagcaggccggagaggatggagacgatgaggactgggaagaggatgatgcagaagaaaccgccctggagggatacagcacaatcattgatgatgaggataacccggttgacgaatatcagatctttaaagctatttttcagacgatccaaaatcgcaaccccgtgtggtaccaggccctgactcatggtctcaacgaggaacagcgcaagcagttgcaagacattgcgacgctggctgaccagcgcagggccgctcacgaaagcaagatgatcgaaaagcacggaggatataaattcagtgcgcctgtggtgccaagcagctttaattttggaggccctgctcccggaatgaactag

SEQ ID NO: 164524 - DNA, 3117 bp, Artificial Sequence
  derived and/or modified sequence
atggaccccaacaccatcatcgaggccctgagaggcaccatggaccccgccctgagagaggccgccgagagacagctgaacgaggcccacaagagcctgaacttcgtgagcaccctgctgcagatcaccatgagcgagcagctggacctgcccgtgagacaggccggcgtgatctacctgaagaacatgatcacccagtactggcccgacagagagaccgcccccggcgacatcagcccctacaccatccccgaggaggacagacactgcatcagagagaacatcgtggaggccatcatccacagccccgagctgatcagagtgcagctgaccacctgcatccaccacatcatcaagcacgactaccccagcagatggaccgccatcgtggacaagatcggcttctacctgcagagcgacaacagcgcctgctggctgggcatcctgctgtgcctgtaccagctggtgaagaactacgagtacaagaagcccgaggagagaagccccctggtggccgccatgcagcacttcctgcccgtgctgaaggacagattcatccagctgctgagcgaccagagcgaccagagcgtgctgatccagaagcagatcttcaagatcttctacgccctggtgcagtacaccctgcccctggagctgatcaaccagcagaacctgaccgagtggatcgagatcctgaagaccgtggtgaacagagacgtgcccaacgagaccctgcaggtggaggaggacgacagacccgagctgccctggtggaagtgcaagaagtgggccctgcacatcctggccagactgttcgagagatacggcagccccggcaacgtgagcaaggagtacaacgagttcgccgaggtgttcctgaaggccttcgccgtgggcgtgcagcaggtgctgctgaaggtgctgtaccagtacaaggagaagcagtacatggcccccagagtgctgcagcagaccctgaactacatcaaccagggcgtgagccacgccctgacctggaagaacctgaagccccacatccagggcatcatccaggacgtgatcttccccctgatgtgctacaccgacgccgacgaggagctgtggcaggaggacccctacgagtacatcagaatgaagttcgacgtgttcgaggacttcatcagccccaccaccgccgcccagaccctgctgttcaccgcctgcagcaagagaaaggaggtgctgcagaagaccatgggcttctgctaccagatcctgaccgagcccaacgccgaccccagaaagaaggacggcgccctgcacatgatcggcagcctggccgagatcctgctgaagaagaagatctacaaggaccagatggagtacatgctgcagaaccacgtgttccccctgttcagcagcgagctgggctacatgagagccagagcctgctgggtgctgcactacttctgcgaggtgaagttcaagagcgaccagaacctgcagaccgccctggagctgaccagaagatgcctgatcgacgacagagagatgcccgtgaaggtggaggccgccatcgccctgcaggtgctgatcagcaaccaggagaaggccaaggagtacatcacccccttcatcagacccgtgatgcaggccctgctgcacatcatcagagagaccgagaacgacgacctgaccaacgtgatccagaagatgatctgcgagtacagcgaggaggtgacccccatcgccgtggagatgacccagcacctggccatgaccttcaaccaggtgatccagaccggccccgacgaggagggcagcgacgacaaggccgtgaccgccatgggcatcctgaacaccatcgacaccctgctgagcgtggtggaggaccacaaggagatcacccagcagctggagggcatctgcctgcaggtgatcggcaccgtgctgcagcagcacgtgctggagttctacgaggagatcttcagcctggcccacagcctgacctgccagcaggtgagcccccagatgtggcagctgctgcccctggtgttcgaggtgttccagcaggacggcttcgactacttcaccgacatgatgcccctgctgcacaactacgtgaccgtggacaccgacaccctgctgagcgacaccaagtacctggagatgatctacagcatgtgcaagaaggtgctgaccggcgtggccggcgaggacgccgagtgccacgccgccaagctgctggaggtgatcatcctgcagtgcaagggcagaggcatcgaccagtgcatccccctgttcgtggaggccgccctggagagactgaccagagaggtgaagaccagcgagctgagaaccatgtgcctgcaggtggccatcgccgccctgtactacaacccccacctgctgctgaacaccctggagaacctgagattccccaacaacgtggagcccgtgaccaaccacttcatcacccagtggctgaacgacgtggactgcttcctgggcctgcacgacagaaagatgtgcgtgctgggcctgtgcgccctgatcgacatggagcagatcccccaggtgctgaaccaggtgagcggccagatcctgcccgccttcatcctgctgttcaacggcctgaagagagcctacgcctgccacgccgagcacgagaacgacagcgacgacgacgacgaggccgaggacgacgacgagaccgaggagctgggcagcgacgaggacgacatcgacgaggacggccaggagtacctggagatcctggccaagcaggccggcgaggacggcgacgacgaggactgggaggaggacgacgccgaggagaccgccctggagggctacagcaccatcatcgacgacgaggacaaccccgtggacgagtaccagatcttcaaggccatcttccagaccatccagaacagaaaccccgtgtggtaccaggccctgacccacggcctgaacgaggagcagagaaagcagctgcaggacatcgccaccctggccgaccagagaagagccgcccacgagagcaagatgatcgagaagcacggcggctacaagttcagcgcccccgtggtgcccagcagcttcaacttcggcggccccgcccccggcatgaactag

SEQ ID NO: 164525 - protein, 594 aa, Artificial Sequence
  derived and/or modified sequence
MVLLHVLFEHAVGYALLALKEVEEISLLQPQVEESVLNLGKFHSIVRLVAFCPFASSQVALENANAVSEGVVHEDLRLLLETHLPSKKKKVLLGVGDPKIGAAIQEELGYNCQTGGVIAEILRGVRLHFHNLVKGLTDLSACKAQLGLGHSYSRAKVKFNVNRVDNMIIQSISLLDQLDKDINTFSMRVREWYGYHFPELVKIINDNATYCRLAQFIGNRRELNEDKLEKLEELTMDGAKAKAILDASRSSMGMDISAIDLINIESFSSRVVSLSEYRQSLHTYLRSKMSQVAPSLSALIGEAVGARLIAHAGSLTNLAKYPASTVQILGAEKALFRALKTRGNTPKYGLIFHSTFIGRAAAKNKGRISRYLANKCSIASRIDCFSEVPTSVFGEKLREQVEERLSFYETGEIPRKNLDVMKEAMVQAEEAAAEITRKLEKQEKKRLKKEKKRLAALALASSENSSSTPEECEEMSEKPKKKKKQKPQEVPQENGMEDPSISFSKPKKKKSFSKEELMSSDLEETAGSTSIPKRKKSTPKEETVNDPEEAGHRSGSKKKRKFSKEEPVSSGPEEAVGKSSSKKKKKFHKASQED

SEQ ID NO: 164526 - protein, 225 aa, Artificial Sequence
  derived and/or modified sequence
MDISAIDLINIESFSSRVVSLSEYRQSLHTYLRSKMSQVAPSLSALIGEAVGARLIAHAGSLTNLAKYPASTVQILGAEKALFRALKTRGNTPKYGLIFHSTFIGRAAAKNKGRISRYLANKCSIASRIDCFSEVPTSVFGEKLREQVEERLSFYETGEIPRKNLDVMKEAMVQAEEAAAEITRKLEKQEKKRLKKEKKRLAALALASSENSSSTPEECEEGDRC

SEQ ID NO: 164527 - protein, 219 aa, Artificial Sequence
  derived and/or modified sequence
  misc_feature (1)..(1): Xaa can be any naturally occurring amino acid
XLINIESFSSRVVSLSEYRQSLHTYLRSKMSQVAPSLSALIGEAVGARLIAHAGSLTNLAKYPASTVQILGAEKALFRALKTRGNTPKYGLIFHSTFIGRAAAKNKGRISRYLANKCSIASRIDCFSEVPTSVFGEKLREQVEERLSFYETGEIPRKNLDVMKEAMVQAEEAAAEITRKLEKQEKKRLKKEKKRLAALALASSENSSSTPEECEEGDRC

SEQ ID NO: 164528 - protein, 281 aa, Artificial Sequence
  derived and/or modified sequence
MVLLHVLFEHAVGYALLALKEVEEISLLQPQVEESVLNLGKFHSIVRLVAFCPFASSQVALENANAVSEGVVHEDLRLLLETHLPSKKKKVLLGVGDPKIGAAIQEELGYNCQTGGVIAEILRGVRLHFHNLVKGLTDLSACKAQLGLGHSYSRAKVKFNVNRVDNMIIQSISLLDQLDKDINTFSMRVRQSRCGEGKAVALWFLMKQLGQGVTVALCREWYGYHFPELVKIINDNATYCRLAQFIGNRRELNEDKLEKLEELTMDGAKAKAILDASRSSM

SEQ ID NO: 164529 - DNA, 1785 bp, Artificial Sequence
  derived and/or modified sequence
atggtcctgctgcatgtcttgtttgagcacgcggtaggttacgcactgctggcgctgaaagaggtagaagagatatccctcctgcaaccccaggtggaggaatccgttttaaatctcgggaagttccactcgattgtgcggcttgtcgctttctgccctttcgccagctctcaggtggctcttgaaaatgccaacgccgtctcagaaggcgtcgttcacgaggacctgaggcttctcctggaaacacaccttccctctaagaaaaagaaagtcctgctcggagtgggagacccaaaaatcggggcagcgatccaggaagaacttggttacaattgtcagactggcggggtgatcgccgaaattttacggggcgtgaggctccatttccataacctcgtgaagggcctaactgacctgagcgcttgtaaagcccagctggggctgggtcatagctatagccgcgcaaaagtaaagttcaatgtgaatagagtcgacaatatgataatacagtcaatttccctcttagaccaattagacaaggacataaatactttttccatgcgggttcgtgagtggtacggatatcattttccagaactggtgaaaatcattaatgacaacgcgacttactgtcggctggcgcagtttattgggaatcggcgtgagctgaacgaagacaagctagagaaactcgaagagctgacgatggacggggctaaggcaaaagctatcctggacgcctctaggtctagtatggggatggatatttccgctatcgacctgatcaacatcgagtccttcagctctcgcgtggtgagcctctctgagtatcgacaatcactccacacttatctccggagcaagatgagccaggtcgctccatcgttaagtgcgttaattggagaggccgtgggcgcccgcctgattgctcacgctggatccctgactaacctggcaaagtatcccgccagcactgtgcagatactgggcgcagagaaggcattgtttcgagctctcaaaactaggggcaacacccccaaatatggactcatcttccatagcacattcatcgggcgagctgcagctaagaataagggacggatcagccggtatttggcgaacaagtgctctattgcgtctcgtatcgattgtttttctgaagtgcccacaagcgtgtttggtgagaaactgagggagcaggtggaagagagactgtccttctacgaaaccggcgagattcccagaaagaacctggatgtcatgaaagaagcgatggttcaggccgaagaggccgctgctgagattacaagaaaattggagaagcaggagaaaaagaggctgaaaaaggagaagaagagactggcagcccttgcccttgcctcgagcgaaaactcgagttccacccctgaggaatgcgaagagatgagcgaaaagcctaagaaaaaaaagaagcagaagccccaagaggtgccacaagagaatggcatggaagacccaagcatctcattttccaaaccaaaaaaaaagaagtccttttctaaggaggagttaatgtcttctgaccttgaggagactgccgggtccacaagtatcccaaaacgtaagaaaagcacacccaaggaagaaacggtcaacgaccccgaggaggctggccaccgttcaggtagcaaaaaaaaacggaagttcagcaaagaggaacccgtgtcaagcggcccagaagaagcggtgggtaagagtagctcaaaaaaaaagaagaagttccacaaagcctcccaagaagactag

SEQ ID NO: 164530 - DNA, 678 bp, Artificial Sequence
  derived and/or modified sequence
atggacatatctgctatagatctgattaatatcgaaagtttttcttctcgggtggtgagcttgagcgaataccgacagtctttgcacacctatctgagatcgaagatgtcacaggtggctccctcactctcggctctgatcggagaggccgtaggcgcccggttgatcgcgcacgcaggatcactgaccaacctggccaaataccctgcgtccacggtgcagatcctgggggccgagaaagcattatttagagccctcaagacccggggaaacacgcccaagtatgggcttatctttcacagtacttttatcggtcgggcagccgctaagaacaagggacgcattagtcggtacctggccaacaaatgttccatcgccagccgcatagactgcttttcagaggtgccaacttccgtctttggggaaaagctacgtgaacaggtggaagaacgtctttcattctatgagacaggggaaattcctcgaaagaatctggatgtgatgaaggaggccatggtgcaggctgaggaagcagctgccgaaattacccgcaaattagagaagcaagagaagaagaggcttaagaaggaaaagaaacggctggcggctctcgccctggcttcatcggaaaatagttccagcacacctgaagaatgcgaggaaggggaccgctgctag

SEQ ID NO: 164531 - DNA, 660 bp, Artificial Sequence
  derived and/or modified sequence
tgactgatcaacattgaatcctttagctcaagagtcgtgagcctttcagaataccggcagtctttgcatacttatttgagatccaaaatgtctcaggtggcccctagtcttagcgcactgattggggaggccgtgggggcgaggcttatcgcacatgcaggttctttgacgaatcttgcaaagtatcctgcatctacggtgcagatcctcggcgccgaaaaagctttgtttcgcgcgttgaagacgaggggcaacaccccaaagtacggactaatttttcactcgacgtttatcggaagggccgccgctaaaaataaggggcgaatttctcggtacctggctaacaaatgttccatagcttcacgcattgactgttttagcgaggttcccacaagcgtcttcggcgagaaactccgcgagcaagtcgaagaacggctgagcttctacgagaccggggaaattcctcgaaagaacctggacgtgatgaaggaagccatggtgcaagctgaagaggctgccgctgagatcacgcgaaagctggaaaaacaggagaagaaacggctcaagaaagaaaaaaaacggttagcggccctcgcactggcatcctctgaaaatagctccagcacaccagaagagtgcgaggagggggatcggtgctag

SEQ ID NO: 164532 - DNA, 846 bp, Artificial Sequence
  derived and/or modified sequence
atggtccttctgcatgtgctctttgaacacgcagtgggctatgctctgctcgcattaaaggaggtcgaggaaatctcccttttacagccacaggtggaggagtccgtgcttaatttgggcaaattccactccatcgtgcggctggtggccttttgccctttcgcaagcagtcaagtcgcgctggagaatgcaaacgctgtctcggagggcgtcgtgcacgaggacttgagacttctactcgagacgcatcttcccagtaagaaaaagaaagtcctgttgggggtgggggatcccaagataggagccgcaatccaggaggagttggggtacaactgccagaccgggggggttatagccgaaattctgcgaggggttcggttacatttccacaatttggtgaaaggtctgaccgatctcagtgcttgtaaagcacagttgggtcttggacactcttactcaagagcaaaggtgaagttcaacgtgaacagagtggataatatgataatccagtcaatctcactcctggatcagctggataaggacattaacacctttagcatgcgagtgagacagtccaggtgtggcgagggcaaggcagttgcactgtggttcctgatgaagcagctaggccaaggcgtcaccgttgccctctgcagggagtggtatggctaccacttccccgagctcgtgaagatcatcaacgacaacgctacatactgccgtcttgctcagttcattggtaatcgaagagagttgaatgaggacaaactggagaagctggaagagcttactatggacggggctaaggctaaggccatcctcgatgcgtcaagaagcagcatgtag

SEQ ID NO: 164533 - DNA, 1785 bp, Artificial Sequence
  derived and/or modified sequence
atggtgctgctgcacgtgctgtttgagcacgctgtgggctacgccctgctggccctgaaggaggtggaggagatcagcctgctgcagccccaggtggaggagagcgtgctgaacctgggcaagttccacagcatcgtgcggctggtggccttctgcccctttgccagcagccaggtggccctggagaatgccaatgctgtgtctgagggcgtggtgcatgaggacctgcggctgctgctggagacccacctgcccagcaagaagaagaaggtgctgctgggcgtgggggaccccaagatcggggccgccatccaggaggagctgggctacaactgccagacaggaggagtgattgctgagatcctgcggggcgtgcggctgcacttccacaacctggtgaagggcctgacagacctgagcgcctgcaaggcccagctgggcctgggccacagctacagccgggccaaggtgaagttcaacgtgaacagagtggacaacatgatcatccagagcatcagcctgctggaccagctggacaaggacatcaacaccttctccatgagggtgcgggagtggtacggctaccacttccctgagctggtgaagatcatcaatgacaatgccacctactgccgcctggcccagttcatcggcaacagaagagagctgaatgaagacaagctggagaagctggaggagctgaccatggatggagccaaggccaaggccatcctggatgccagccgcagctccatgggcatggacatcagcgccatcgacctgatcaacatcgagagcttcagcagccgggtggtgtccctgtctgagtaccggcagagcctgcacacctacctgcggagcaagatgagccaggtggcccccagcctgagcgccctgattggagaggccgtgggcgcccggctgattgcccacgccggcagcctgaccaacctggccaagtacccagccagcacagtgcagatcctgggcgctgagaaggccctcttccgggccctgaagacccggggcaacacccccaagtatggcctcatcttccacagcaccttcatcggccgggctgctgccaagaacaagggccgcatcagccgctacctggccaacaagtgcagcatcgccagcagaattgactgcttcagcgaggtgcccacctctgtgtttggagagaagctgcgggagcaggtggaggagcggctgtccttctatgagaccggggagatccccaggaagaacctggatgtgatgaaggaggccatggtgcaggccgaggaggccgctgctgagatcaccaggaagctggagaagcaggagaagaagaggctgaagaaggagaagaagaggctggccgccctggccctggccagcagcgagaacagcagcagcaccccagaagaatgtgaggagatgtctgagaagcccaagaagaagaagaagcagaagccccaggaggtgccccaggagaatggcatggaggaccccagcatctccttcagcaagcccaagaagaagaagagcttcagcaaggaggagctgatgagcagtgacctggaggagacagctggcagcaccagcatccccaagaggaagaagagcacccccaaggaggagaccgtgaatgaccctgaggaggccggccacaggagcggcagcaagaagaagaggaagttcagcaaggaggagcctgtgagcagcggccctgaggaggccgtgggcaagagcagcagcaagaagaagaagaagttccacaaggccagccaggaggactag

SEQ ID NO: 164534 - DNA, 678 bp, Artificial Sequence
  derived and/or modified sequence
atggacatcagcgccatcgacctgatcaacatcgagagcttcagcagccgggtggtgtccctgtctgagtaccggcagagcctgcacacctacctgcggagcaagatgagccaggtggcccccagcctgagcgccctgattggagaggccgtgggcgcccggctcatcgcccatgctggcagcctgaccaacctggccaagtacccagccagcacagtgcagatcctgggcgctgagaaggccctcttccgggccctgaagacccggggcaacacccccaagtatggcctcatcttccacagcaccttcatcggccgggccgccgccaagaacaagggccgcatcagccgctacctggccaacaagtgcagcatcgccagcagaattgactgcttcagcgaggtgcccacctctgtgtttggagagaagctgcgggagcaggtggaggagcggctgtccttctatgaaacaggagagatccccaggaagaacctggatgtgatgaaggaggccatggtgcaggccgaggaggccgctgctgagatcaccaggaagctggagaagcaggagaagaagaggctgaagaaggagaagaagaggctggccgccctggccctggccagcagcgagaacagcagcagcaccccagaggagtgtgaggagggggaccgctgctag

SEQ ID NO: 164535 - DNA, 660 bp, Artificial Sequence
  derived and/or modified sequence
tgactcatcaacatcgagagcttcagcagccgggtggtgtccctgtctgagtaccggcagagcctgcacacctacctgcggagcaagatgagccaggtggcccccagcctgagcgccctgattggagaggccgtgggcgcccggctcatcgcccatgctggcagcctgaccaacctggccaagtacccagccagcacagtgcagatcctgggcgctgagaaggccctcttccgggccctgaagacccggggcaacacccccaagtatggcctcatcttccacagcaccttcatcggccgggccgccgccaagaacaagggccgcatcagccgctacctggccaacaagtgcagcatcgccagcagaattgactgcttcagcgaggtgcccacctctgtgtttggagagaagctgcgggagcaggtggaggagcggctgtccttctatgaaacaggagagatccccaggaagaacctggatgtgatgaaggaggccatggtgcaggccgaggaggccgctgctgagatcaccaggaagctggagaagcaggagaagaagaggctgaagaaggagaagaagaggctggccgccctggccctggccagcagcgagaacagcagcagcaccccagaggagtgtgaggagggggaccgctgctag

SEQ ID NO: 164536 - DNA, 846 bp, Artificial Sequence
  derived and/or modified sequence
atggtgctgctgcacgtgctgtttgagcacgctgtgggctacgccctgctggccctgaaggaggtggaggagatcagcctgctgcagccccaggtggaggagagcgtgctgaacctgggcaagttccacagcatcgtgcggctggtggccttctgcccctttgccagcagccaggtggccctggagaatgccaatgctgtgtctgagggcgtggtgcatgaggacctgcggctgctgctggagacccacctgcccagcaagaagaagaaggtgctgctgggcgtgggggaccccaagatcggggccgccatccaggaggagctgggctacaactgccagacaggaggagtgattgctgagatcctgcggggcgtgcggctgcacttccacaacctggtgaagggcctgacagacctgagcgcctgcaaggcccagctgggcctgggccacagctacagccgggccaaggtgaagttcaacgtgaacagagtggacaacatgatcatccagagcatcagcctgctggaccagctggacaaggacatcaacaccttctccatgagggtgcggcagagccgctgtggggagggcaaggctgtggccctgtggttcctgatgaagcagctgggccagggcgtgacagtggccctgtgccgggagtggtacggctaccacttccctgagctggtgaagatcatcaatgacaatgccacctactgccgcctggcccagttcatcggcaacagaagagagctgaatgaagacaagctggagaagctggaggagctgaccatggatggagccaaggccaaggccatcctggatgccagccgcagctccatgtag

SEQ ID NO: 164537 - DNA, 1785 bp, Artificial Sequence
  derived and/or modified sequence
atggtgctgctgcacgtgctgttcgagcacgccgtgggctacgccctcctggccctgaaagaagtggaagagatctcactgctacagccacaagtggaggaatccgtcttgaatctgggcaaattccactccattgtgcgtcttgtcgctttctgccctttcgcatcctcacaggtggccttggaaaatgcaaatgctgttagcgaaggcgtagttcacgaggaccttaggctcctgctcgaaacccatctcccttcaaaaaagaagaaagtgctgctcggcgttggtgatcctaagataggcgcggccatacaagaggagctgggctacaactgccaaaccgggggcgtgattgcagagatcttacgcggggttcgtctccactttcacaacttagtcaaaggcctgacagatctctcggcctgcaaagcccagctgggactagggcactcctattctagagcaaaggtgaaattcaacgtgaatagagtggacaacatgataatccagtcaatttcacttttggaccagcttgacaaggatattaacacatttagcatgcgtgtcagagagtggtacgggtaccacttccccgaactagtgaaaataatcaacgacaacgccacttattgtcgcctcgcacaattcataggcaaccggcgtgagttgaacgaagacaagctggagaagcttgaagagctgaccatggatggggccaaggcaaaagccatcttggatgcatcgaggagttcgatgggcatggacatttctgccattgaccttattaatatcgaatcttttagttctcgcgtggtctccctgagtgagtaccggcagtcactgcatacatatcttcgaagtaagatgtcacaggtggccccaagcctgagtgccttgatcggagaggccgtaggggcccgattgattgcccatgccggttccctcaccaacctggcaaaatacccggccagcaccgtgcagattcttggggccgagaaggccctcttccgcgcgctcaagacgaggggtaatacacccaagtacggcttgatcttccattccacctttatcggacgcgccgccgccaagaataagggacgcatcagtaggtatttggccaataaatgttctatcgccagccgcatcgattgcttctctgaagtccctactagcgtgttcggagaaaaactccgagagcaggtcgaggaacgcttatctttctatgaaaccggggaaatcccccgaaaaaatttggacgttatgaaggaagccatggtgcaggctgaagaggccgccgcggagatcacacggaagttagaaaagcaagagaaaaagagactgaaaaaggaaaaaaaacgcctggctgccttagcactggcctccagcgagaactcctcatctacccctgaggagtgcgaagagatgtctgagaagcccaagaaaaaaaagaaacagaaaccccaggaggtgccgcaggagaatggcatggaagaccccagcatatcattttcaaaaccaaagaaaaaaaagagcttttccaaggaagagctgatgagctcagatctggaggaaaccgctggaagcacctccatccccaaacgcaaaaaaagcactcctaaggaggagacggttaatgaccctgaggaggcaggtcaccggagcgggtccaagaagaagagaaagttttcaaaggaagaacccgtctcaagtggccccgaggaagctgtggggaaaagtagcagtaaaaaaaagaaaaaattccataaagcatcacaggaggattag

SEQ ID NO: 164538 - DNA, 678 bp, Artificial Sequence
  derived and/or modified sequence
atggacatcagcgccatcgacctgatcaacatcgagagcttcagctcacgcgtcgtgtcactatccgaataccgccagtctctgcatacctacctgcgaagcaaaatgagccaggtggccccctctctgagcgctctcataggcgaagcggtaggagcaagactcatcgcacatgctggcagcctcacaaacctagcaaagtatcccgcaagtacagtgcagatcctgggagcagagaaggctctgtttcgtgccttaaaaactaggggcaatacaccgaaatatggcctgatcttccattctactttcattgggcgtgccgcggcaaagaacaaaggacgtatatctcgctacctcgctaacaaatgctccatcgcctcacggatcgactgcttcagtgaagtgccaacttcagttttcggagagaagctgcgtgagcaggtcgaggagagactgagcttttacgaaactggcgagatcccacgtaagaacctggatgtcatgaaagaagctatggtgcaagctgaagaagctgccgcggagattacacgcaagcttgagaagcaagagaagaagagactcaagaaggaaaaaaaaaggcttgccgcattagctctcgcatccagtgagaacagcagcagcactcctgaagagtgcgaggaaggcgaccgatgttag

SEQ ID NO: 164539 - DNA, 660 bp, Artificial Sequence
  derived and/or modified sequence
tgactgatcaacatcgagagcttcagcagccgggtggtgagcctgtctgagtacaggcaatctttgcatacatatcttaggagcaagatgtcccaggtagcccccagcctgtccgccctgataggcgaggcagtgggggcccggctgatcgcacacgcagggtcactcacaaatcttgctaagtatccagcaagcaccgtgcagattctaggtgctgagaaggccctctttcgagcacttaaaactcgaggcaacacgcctaagtatggcctaatcttccactctaccttcattggacgagccgcagctaaaaacaagggcaggatatctaggtacctagcaaataaatgttcaatagcctcccgcatcgattgcttttccgaggtaccgacatctgtcttcggcgaaaaattacgggaacaggtggaagagagactctcgttttacgagacgggagaaattccgcgaaagaacctggacgtcatgaaggaggcaatggtacaggcagaggaagccgctgccgagattacacgaaaactggagaagcaagagaagaaacgcctcaagaaagaaaaaaagagattagccgcattggccctcgctagtagcgagaactccagcagtacaccagaggaatgcgaggagggcgatcgctgctag

SEQ ID NO: 164540 - DNA, 846 bp, Artificial Sequence
  derived and/or modified sequence
atggtgctgctgcacgtgctgttcgagcacgccgtgggctacgccctgctggccctgaaagaggtggaagagatctcattgctgcaacctcaggtggaagagtctgtgctgaacctcggtaagtttcatagcatcgtgaggctcgtcgccttttgtccctttgcctcaagtcaggtggcacttgagaacgcaaatgccgtgtcggaaggagtggtccatgaggacctgcggctcctgctggagacccacctgccaagcaagaagaagaaggtactactgggagtcggagatccgaaaattggcgccgccatccaagaagagctcggatacaattgtcagacaggtggagtgatcgcagagatcctgaggggcgtgcggctgcacttccataatcttgtcaaaggcctcacagacttaagtgcctgtaaggcccagctgggactgggccactcctacagccgagctaaggtcaaattcaatgtaaacagggtggataatatgattattcagagcatcagcttgctcgatcagctggataaggatataaacactttctccatgcgagtaaggcaatctagatgcggcgagggcaaagctgttgccctgtggttcctcatgaaacagctcggtcagggagtgaccgtggcactgtgcagagaatggtacggttatcatttccccgaactagtgaagattatcaatgacaatgccacctattgccgtttagcccagtttattggtaaccgcagggagttgaatgaagacaagctagaaaagcttgaagaactgacaatggatggcgccaaggccaaggccatactggatgccagtcgatcaagcatgtag

SEQ ID NO: 164541 - DNA, 2400 bp, Artificial Sequence
  derived and/or modified sequence
ggctcgtccccgagtaggggacgggaacgcctgggtcccggggacgtggggcgcagggtctggggcccgaggccacggacgaagcgggaagccggctaggcagcggtctctgtctgggatggacgccgcgccccacgcggacctcccgccccgacttcacccagctctgctgcccgtaactcatatgacaagaacatcaggaaccggactattaccccgaaagggccttcccaagtcgtttcgccgcctgcagtgcccgaccgggggccgcgcgtccccggcaaccacgcccgcccgcgcagctgcagaggccggaaaaggcccgctcgcccgcgctcggcaccacccagcccgcgctccgggcgataccaccctgggcggcccctccaaaggccggagatggtgtcgtccccggcctccgattggtcgggggggcgggggcgtggcctctggagcctggttccgcgcgccggagcgcgctagccgcattgcgagccgaacccgggagctggcgccatggtgctgttgcacgtgctgtttgagcacgcggtcggctacgcgctgctggcgctgaaggaagtggaggagatcagtctgctgcagccgcaggtggaggagtctgtgctcaacctgggcaaattccacagcatcgttcgtctggtggccttttgtccctttgcctcatcccaggttgccttggaaaatgccaacgccgtgtctgaaggggttgttcatgaggacctccgcctgctcttggagacccacctgccgtccaaaaagaagaaagtactcttgggagttggggatcccaagattggtgccgcaatacaggaggagttagggtacaactgccagactggaggagtcatagctgagatcctgcgaggagttcgtctgcacttccacaatctggtgaagggtctgaccgatctgtcagcttgtaaagcacagctggggctgggacacagctattcccgtgccaaagttaagtttaatgtgaaccgggtggacaatatgatcatccagtccattagcctcctggaccagctggataaggacatcaataccttctctatgcgtgtcagggagtggtacgggtatcactttccggagctggtgaagatcatcaacgacaatgccacatactgccgtcttgcccagtttattggaaaccgaagggaactgaatgaggacaagctggagaagctggaggagctgacaatggatggggccaaggctaaggctattctggatgcctcacggtcctccatgggcatggacatatctgccattgacttgataaacatcgagagcttctccagtcgtgtggtgtctttatctgaataccgccagagcctacacacttacctgcgctccaagatgagccaagtagcccccagcctgtcagccctaattggggaagcggtaggtgcacgtctcatcgcacatgctggcagcctcaccaacctggccaagtatccagcatccacagtgcagatccttggggctgaaaaggccctgttcagagccctgaagacaaggggtaacactccaaaatatggactcattttccactccaccttcattggccgagcagctgccaagaacaaaggccgcatctcccgatacctggcaaacaaatgcagtattgcctcacgaatcgattgcttctctgaggtgcccacgagtgtattcggggagaagcttcgagaacaagttgaagagcgactgtccttctatgagactggagagataccacgaaagaatctggatgtcatgaaggaagcaatggttcaggcagaggaagcggctgctgagattactaggaagctggagaaacaggagaagaaacgcttaaagaaggaaaagaaacggctggctgcacttgccctcgcgtcttcagaaaacagcagtagtactccagaggagtgtgaggagatgagtgaaaaacccaaaaagaagaaaaagcaaaagccccaggaggttcctcaggagaatggaatggaagacccatctatctctttctccaaacccaagaaaaagaaatctttttccaaggaggagttgatgagtagcgatcttgaagagaccgctggcagcaccagtattcccaagaggaagaagtctacacccaaggaggaaacagttaatgaccctgaggaggcaggccacagaagtggctccaagaaaaagaggaaattctccaaagaggagccggtcagcagtgggcctgaagaggcggttggcaagagcagctccaagaagaagaaaaagttccataaagcatcccaggaagattagaatgcaaatggacattctctgggaggtggggcataccatagcccaaggtgacatttcccaccctgtgccgtgttccccaataaaaacaaattcacaaga

SEQ ID NO: 164542 - DNA, 1566 bp, Artificial Sequence
  derived and/or modified sequence
caaaggccggagatggtgtcgtccccggcctccgattggtcgggggggcgggggcgtggcctctggagcctggttccgcgcgccggagcgcgctagccgcattgcgagccgaacccgggagctggcgccatggtgctgttgcacgtgctgtttgagcacgcggtcggctacgcgctgctggcgctgaaggaagtggaggagatcagtctgctgcagccgcaggtggaggagtctgtgctcaacctgggcaaattccacagcatcgttcgtctggtggccttttgtccctttgcctcatcccaggttgccttggaaaatgccaacgccgtgtctgaaggggttgttcatgaggacctccgcctgctcttggagacccacctgccgtccaaaaagaagaaagtactcttgggagttggggatcccaagattggtgccgcaatacaggaggagttagggtacaactgccagactggaggagtcatagctgagatcctgcgaggagttcgtctgcacttccacaatctggtgaagggtctgaccgatctgtcagcttgtaaagcacagctggggctgggacacagctattcccgtgccaaagttaagtttaatgtgaaccgggtggacaatatgatcatccagtccattagcctcctggaccagctggataaggacatcaataccttctctatgcgtgtcagggagtggtacgggtatcactttccggagctggtgaagatcatcaacgacaatgccacatactgccgtcttgcccagtttattggaaaccgaagggaactgaatgaggacaagctggagaagctggaggagctgacaatggatggggccaaggctaaggctattctggatgcctcacggtcctccatgggcatggacatatctgccattgacttgataaacatcgagagcttctccagtcgtgtggtgtctttatctgaataccgccagagcctacacacttacctgcgctccaagatgagccaagtagcccccagcctgtcagccctaattggggaagcggtaggtgcacgtctcatcgcacatgctggcagcctcaccaacctggccaagtatccagcatccacagtgcagatccttggggctgaaaaggccctgttcagagccctgaagacaaggggtaacactccaaaatatggactcattttccactccaccttcattggccgagcagctgccaagaacaaaggccgcatctcccgatacctggcaaacaaatgcagtattgcctcacgaatcgattgcttctctgaggtgcccacgagtgtattcggggagaagcttcgagaacaagttgaagagcgactgtccttctatgagactggagagataccacgaaagaatctggatgtcatgaaggaagcaatggttcaggcagaggaagcggctgctgagattactaggaagctggagaaacaggagaagaaacgcttaaagaaggaaaagaaacggctggctgcacttgccctcgcgtcttcagaaaacagcagtagtactccagaggagtgtgaggaaggagataggtgctga

SEQ ID NO: 164543 - DNA, 919 bp, Artificial Sequence
  derived and/or modified sequence
acttgataaacatcgagagcttctccagtcgtgtggtgtctttatctgaataccgccagagcctacacacttacctgcgctccaagatgagccaagtagcccccagcctgtcagccctaattggggaagcggtaggtgcacgtctcatcgcacatgctggcagcctcaccaacctggccaagtatccagcatccacagtgcagatccttggggctgaaaaggccctgttcagagccctgaagacaaggggtaacactccaaaatatggactcattttccactccaccttcattggccgagcagctgccaagaacaaaggccgcatctcccgatacctggcaaacaaatgcagtattgcctcacgaatcgattgcttctctgaggtgcccacgagtgtattcggggagaagcttcgagaacaagttgaagagcgactgtccttctatgagactggagagataccacgaaagaatctggatgtcatgaaggaagcaatggttcaggcagaggaagcggctgctgagattactaggaagctggagaaacaggagaagaaacgcttaaagaaggaaaagaaacggctggctgcacttgccctcgcgtcttcagaaaacagcagtagtactccagaggagtgtgaggaaggagataggtgctgaacttgctcaagagcccagagagctggttgtagctcacacccgttccctgggcatgtgtgttctgtcctcggctgcctcccaggagtcctcaacctggggtagtgtaaattcctgctctgcttattatcagacgtgtgtccggaggtggtcgtgtttcacagtggggatgggggcagggaggtccccaatgtgctaagctacaatcattctccctgagattttcatttagcacccagtttcttaaacagtgtttcagggcc

SEQ ID NO: 164544 - DNA, 856 bp, Artificial Sequence
  derived and/or modified sequence
ggagctggcgccatggtgctgttgcacgtgctgtttgagcacgcggtcggctacgcgctgctggcgctgaaggaagtggaggagatcagtctgctgcagccgcaggtggaggagtctgtgctcaacctgggcaaattccacagcatcgttcgtctggtggccttttgtccctttgcctcatcccaggttgccttggaaaatgccaacgccgtgtctgaaggggttgttcatgaggacctccgcctgctcttggagacccacctgccgtccaaaaagaagaaagtactcttgggagttggggatcccaagattggtgccgcaatacaggaggagttagggtacaactgccagactggaggagtcatagctgagatcctgcgaggagttcgtctgcacttccacaatctggtgaagggtctgaccgatctgtcagcttgtaaagcacagctggggctgggacacagctattcccgtgccaaagttaagtttaatgtgaaccgggtggacaatatgatcatccagtccattagcctcctggaccagctggataaggacatcaataccttctctatgcgtgtcaggcagagtaggtgtggagaaggcaaggctgtagctctatggtttttgatgaagcagctgggccagggagtgactgtggctctttgcagggagtggtacgggtatcactttccggagctggtgaagatcatcaacgacaatgccacatactgccgtcttgcccagtttattggaaaccgaagggaactgaatgaggacaagctggagaagctggaggagctgacaatggatggggccaaggctaaggctattctggatgcctcacggtcctccatgg

SEQ ID NO: 164545 - DNA, 1785 bp, Artificial Sequence
  derived and/or modified sequence
atggtcttactgcacgtactctttgagcatgcagtcggctatgccttgctggccctcaaggaggtcgaagagatcagcctgctgcaaccgcaagtggaggagtccgtcctaaatctgggaaaatttcactctatcgtgaggctggtggcattctgccccttcgcgtcaagccaggttgccctggaaaacgccaacgccgtctcggagggcgtggtgcacgaagacctgcgcttgttgctggagacacatcttccgagcaagaagaaaaaggtgcttttgggcgtcggtgacccgaagattggagccgcaattcaggaggagctggggtacaattgccagacgggaggcgtgattgccgagatcctaaggggggtgcgactccactttcacaacttggttaaagggctgactgatttatctgcctgtaaggctcagcttggcctgggccacagttactctagggctaaggtgaaatttaacgttaatagagttgacaatatgatcatacagagcataagtctgctcgaccagcttgataaagacattaacacgttctcgatgcgggtaagggagtggtacggctatcatttccctgaactcgtcaaaattatcaacgataacgccacatactgccgcttggcccagtttattggtaaccgcagggaattaaacgaggacaagctagagaaattggaggaactgactatggacggcgctaaggctaaagctatcttggacgcttcgagatccagcatgggaatggatatctccgctatagatctgatcaatattgagtcattctcgagccgtgtggtctcattgtccgagtaccggcagagtctacacacttacctccgcagtaaaatgtcacaggtcgcccctagcctatcagctctgattggggaagccgtgggcgcacgactcatcgctcatgctggatccctgacaaacctcgcaaaataccccgcaagcaccgtccagattctaggcgctgagaaggccctctttcgagccctaaaaaccagaggaaatacgcctaagtatggcctgatattccactccacattcattggcagggcagcggctaagaataagggtcgtatatcccgttatttagcgaacaaatgctccattgcttctcgaatcgattgtttctctgaggtgccaacttccgtctttggcgaaaaactgagagagcaggtggaagagaggctaagcttttatgaaaccggcgaaatcccaagaaagaacctggacgtcatgaaagaagctatggtgcaggccgaggaggccgctgctgagatcacaagaaagttggagaagcaggaaaaaaagcggctgaagaaagagaagaaaagactagccgctctagctctggctagctccgagaactccagcagcacgcctgaagaatgtgaagaaatgtctgaaaagccaaagaagaagaagaagcaaaagccccaggaggtaccccaggagaatggaatggaagacccatccatatccttttcaaagcccaaaaaaaagaagtctttcagtaaggaagagttgatgagctcagacctggaggagaccgcaggcagcacatcaatccctaagaggaagaaatctacacccaaggaggaaaccgtgaatgatcctgaggaggctggacatcgttccggttctaaaaaaaagaggaaattctccaaagaggaaccagtgtcttccggacccgaggaagctgtggggaaatcttcttccaagaagaagaaaaagttccataaggcatctcaggaggactag

SEQ ID NO: 164546 - DNA, 678 bp, Artificial Sequence
  derived and/or modified sequence
atggatatcagtgccatcgatctcattaatattgaaagcttcagttctcgggtggtatcccttagtgagtatagacaatcgctacatacctatcttcggagcaaaatgtctcaggtggctcccagcctatcagccctgatcggtgaagctgtgggcgcaagactgatcgctcatgccggtagcctgacgaatctagcaaaatatccggctagcactgtgcaaatactcggggcagaaaaagcactgttcagagccttaaagaccaggggtaacactcctaaatacggcctaattttccattccacctttattgggagggcagcagctaaaaacaagggtagaatctctaggtacctcgctaataaatgctcaatcgcctctcgtatagactgcttctcagaggtgcctaccagcgtgtttggcgagaagctgagagagcaggtggaggaaagactatcattttatgagaccggcgagattcctagaaagaacctggacgtgatgaaagaggcaatggtccaggcagaggaggccgctgctgaaataacgaggaagctcgagaagcaagagaaaaagcgtctcaagaaagaaaagaaacgactcgctgccctcgctctcgccagttcggagaatagttcatccacccccgaggagtgcgaggaaggagacagatgctag

SEQ ID NO: 164547 - DNA, 660 bp, Artificial Sequence
  derived and/or modified sequence
tagctcattaacatcgaaagcttcagcagccgggttgtttctttgagcgaatatcgccaaagcttgcatacttatctgcgatctaaaatgtctcaggtcgcacctagcttgagcgccctcatcggagaggccgtgggtgccagacttatcgctcatgcgggaagcctgactaatttagccaaataccctgcatcaaccgtccagatcctgggtgcagaaaaagcactgtttcgtgcgctgaaaacacgagggaatacccccaaatatggactcatttttcacagcacattcattggcagggcagccgctaagaataaaggacggatcagtcgctatctggctaacaagtgttccattgctagtcggattgattgctttagcgaggtcccaactagtgtcttcggggaaaaattacgtgagcaggtcgaggagaggcttagtttctatgaaacaggcgagattccacgtaagaacctggacgtgatgaaagaggcaatggtgcaggctgaagaagccgcagcagaaatcacccggaagctggaaaagcaggagaagaaacggctaaaaaaggagaaaaaacgtctcgcagccctcgctctggcatctagcgagaattcatccagtacgcctgaggaatgtgaagagggggacagatgttag

SEQ ID NO: 164548 - DNA, 846 bp, Artificial Sequence
  derived and/or modified sequence
atggtgctcctacacgtgttgttcgagcacgcagtgggctacgcacttttggctctgaaggaggtcgaagaaatcagcctcctgcagccccaagtcgaggaatcagtcttaaacctcgggaaatttcactctattgtaagacttgtggcgttctgtcccttcgcctcttcccaggtggcactggagaacgccaatgcggtctccgagggggtggtgcatgaggacctgaggttgctcttagagacccacttaccgagcaaaaaaaaaaaagtgctgctgggcgtgggcgatcctaaaattggcgcagccatccaggaagagctggggtataactgtcagaccggtggcgtcatcgctgaaattctgcgcggtgttcgcttgcatttccacaacctggtcaaaggactgactgacctctccgcatgtaaggcccagttaggcctgggccacagttattcacgggctaaggtgaagttcaatgttaaccgcgtcgataacatgatcatacagtccattagcttgttggaccagctagataaggacattaacactttttcaatgagagtacgtcagagtcgctgcggggaaggcaaggctgtcgccctctggttcctgatgaagcagctgggccaaggtgttaccgtcgccctttgtcgagaatggtatggctaccactttcctgagcttgtcaagataatcaacgataacgcgacttactgtagactcgcccagttcataggaaatcgacgcgaattaaacgaggataagctcgagaagctggaggaacttaccatggacggtgcgaaagcaaaggccatcttggacgccagcaggtcaagcatgtag

SEQ ID NO: 164549 - DNA, 1785 bp, Artificial Sequence
  derived and/or modified sequence
atggtgctgctgcacgtgctgttcgagcacgccgtgggctacgccctgctggccctgaaggaggtggaggagatcagcctgctgcagccccaggtggaggagagcgtgctgaacctgggcaagttccacagcatcgtgagactggtggccttctgccccttcgccagcagccaggtggccctggagaacgccaacgccgtgagcgagggcgtggtgcacgaggacctgagactgctgctggagacccacctgcccagcaagaagaagaaggtgctgctgggcgtgggcgaccccaagatcggcgccgccatccaggaggagctgggctacaactgccagaccggcggcgtgatcgccgagatcctgagaggcgtgagactgcacttccacaacctggtgaagggcctgaccgacctgagcgcctgcaaggcccagctgggcctgggccacagctacagcagagccaaggtgaagttcaacgtgaacagagtggacaacatgatcatccagagcatcagcctgctggaccagctggacaaggacatcaacaccttcagcatgagagtgagagagtggtacggctaccacttccccgagctggtgaagatcatcaacgacaacgccacctactgcagactggcccagttcatcggcaacagaagagagctgaacgaggacaagctggagaagctggaggagctgaccatggacggcgccaaggccaaggccatcctggacgccagcagaagcagcatgggcatggacatcagcgccatcgacctgatcaacatcgagagcttcagcagcagagtggtgagcctgagcgagtacagacagagcctgcacacctacctgagaagcaagatgagccaggtggcccccagcctgagcgccctgatcggcgaggccgtgggcgccagactgatcgcccacgccggcagcctgaccaacctggccaagtaccccgccagcaccgtgcagatcctgggcgccgagaaggccctgttcagagccctgaagaccagaggcaacacccccaagtacggcctgatcttccacagcaccttcatcggcagagccgccgccaagaacaagggcagaatcagcagatacctggccaacaagtgcagcatcgccagcagaatcgactgcttcagcgaggtgcccaccagcgtgttcggcgagaagctgagagagcaggtggaggagagactgagcttctacgagaccggcgagatccccagaaagaacctggacgtgatgaaggaggccatggtgcaggccgaggaggccgccgccgagatcaccagaaagctggagaagcaggagaagaagagactgaagaaggagaagaagagactggccgccctggccctggccagcagcgagaacagcagcagcacccccgaggagtgcgaggagatgagcgagaagcccaagaagaagaagaagcagaagccccaggaggtgccccaggagaacggcatggaggaccccagcatcagcttcagcaagcccaagaagaagaagagcttcagcaaggaggagctgatgagcagcgacctggaggagaccgccggcagcaccagcatccccaagagaaagaagagcacccccaaggaggagaccgtgaacgaccccgaggaggccggccacagaagcggcagcaagaagaagagaaagttcagcaaggaggagcccgtgagcagcggccccgaggaggccgtgggcaagagcagcagcaagaagaagaagaagttccacaaggccagccaggaggactag

SEQ ID NO: 164550 - DNA, 678 bp, Artificial Sequence
  derived and/or modified sequence
atggacatcagcgccatcgacctgatcaacatcgagagcttcagcagcagagtggtgagcctgagcgagtacagacagagcctgcacacctacctgagaagcaagatgagccaggtggcccccagcctgagcgccctgatcggcgaggccgtgggcgccagactgatcgcccacgccggcagcctgaccaacctggccaagtaccccgccagcaccgtgcagatcctgggcgccgagaaggccctgttcagagccctgaagaccagaggcaacacccccaagtacggcctgatcttccacagcaccttcatcggcagagccgccgccaagaacaagggcagaatcagcagatacctggccaacaagtgcagcatcgccagcagaatcgactgcttcagcgaggtgcccaccagcgtgttcggcgagaagctgagagagcaggtggaggagagactgagcttctacgagaccggcgagatccccagaaagaacctggacgtgatgaaggaggccatggtgcaggccgaggaggccgccgccgagatcaccagaaagctggagaagcaggagaagaagagactgaagaaggagaagaagagactggccgccctggccctggccagcagcgagaacagcagcagcacccccgaggagtgcgaggagggcgacagatgctag

SEQ ID NO: 164551 - DNA, 660 bp, Artificial Sequence
  derived and/or modified sequence
tgactgatcaacatcgagagcttcagcagcagagtggtgagcctgagcgagtacagacagagcctgcacacctacctgagaagcaagatgagccaggtggcccccagcctgagcgccctgatcggcgaggccgtgggcgccagactgatcgcccacgccggcagcctgaccaacctggccaagtaccccgccagcaccgtgcagatcctgggcgccgagaaggccctgttcagagccctgaagaccagaggcaacacccccaagtacggcctgatcttccacagcaccttcatcggcagagccgccgccaagaacaagggcagaatcagcagatacctggccaacaagtgcagcatcgccagcagaatcgactgcttcagcgaggtgcccaccagcgtgttcggcgagaagctgagagagcaggtggaggagagactgagcttctacgagaccggcgagatccccagaaagaacctggacgtgatgaaggaggccatggtgcaggccgaggaggccgccgccgagatcaccagaaagctggagaagcaggagaagaagagactgaagaaggagaagaagagactggccgccctggccctggccagcagcgagaacagcagcagcacccccgaggagtgcgaggagggcgacagatgctag

SEQ ID NO: 164552 - DNA, 846 bp, Artificial Sequence
  derived and/or modified sequence
atggtgctgctgcacgtgctgttcgagcacgccgtgggctacgccctgctggccctgaaggaggtggaggagatcagcctgctgcagccccaggtggaggagagcgtgctgaacctgggcaagttccacagcatcgtgagactggtggccttctgccccttcgccagcagccaggtggccctggagaacgccaacgccgtgagcgagggcgtggtgcacgaggacctgagactgctgctggagacccacctgcccagcaagaagaagaaggtgctgctgggcgtgggcgaccccaagatcggcgccgccatccaggaggagctgggctacaactgccagaccggcggcgtgatcgccgagatcctgagaggcgtgagactgcacttccacaacctggtgaagggcctgaccgacctgagcgcctgcaaggcccagctgggcctgggccacagctacagcagagccaaggtgaagttcaacgtgaacagagtggacaacatgatcatccagagcatcagcctgctggaccagctggacaaggacatcaacaccttcagcatgagagtgagacagagcagatgcggcgagggcaaggccgtggccctgtggttcctgatgaagcagctgggccagggcgtgaccgtggccctgtgcagagagtggtacggctaccacttccccgagctggtgaagatcatcaacgacaacgccacctactgcagactggcccagttcatcggcaacagaagagagctgaacgaggacaagctggagaagctggaggagctgaccatggacggcgccaaggccaaggccatcctggacgccagcagaagcagcatgtag

SEQ ID NO: 164553 - protein, 1014 aa, Artificial Sequence
  derived and/or modified sequence
MRVPVFEDIKDETEEEKIGEEENEEDQVFYKPVIEDLSMELARKCTELISDIRYKEEFKKSKDKCTFVTDSPMLNHVKNIGAFISEAKYKGTIKADLSNSLYKRMPATIDSVFAGEVTQLQSEVAYKQKHDAAKGFSDYAHMKEPPEVKHAMEVNKHQSNISYRKDVQDTHTYSAELDRPDIKMATQISKIISNAEYKKGQGIMNKEPAVIGRPDFEHAVEASKLSSQIKYKEKFDNEMKDKKHHYNPLESASFRQNQLAATLASNVKYKKDIQNMHDPVSDLPNLLFLDHVLKASKMLSGREYKKLFEENKGMYHFDADAVEHLHHKGNAVLQSQVKYKEEYEKNKGKPMLEFVETPSYQASKEAQKMQSEKVYKEDFEKEIKGRSSLDLDKTPEFLHVKYITNLLREKEYKKDLENEIKGKGMELNSEVLDIQRAKRASEMASEKEYKKDLESIIKGKGMQAGTDTLEMQHAKKAAEIASEKDYKRDLETEIKGKGMQVSTDTLDVQRAKKASEMASQKQYKKDLENEIKGKGMQVSMDIPDILRAKRTSEIYSQRKYKDEAEKMLSNYSTIADTPEIQRIKTTQQNISAVFYKKEVGAGTAVKDSPEIERVKKNQQNISSVKYKEEIKHATAISDPPELKRVKENQKNISNLQYKEQNYKATPVSMTPEIERVRRNQEQLSAVKYKGELQRGTAISDPPELKRAKENQKNISNVYYRGQLGRATTLSVTPEMERVKKNQENISSVKYTQDHKQMKGRPSLILDTPAMRHVKEAQNHISMVKYHEDFEKTKGRGFTPVVDDPVTERVRKNTQVVSDAAYKGVHPHIVEMDRRPGIIVDLKVWRTDPGSIFDLDPLEDNIQSRSLHMLSEKASHYRRHWSRSHSSSTFGTGLGDDRSEISEIYPSFSCCSEVTRPSDEGAPVLPGAYQQSHSQGYGYMHQTSVSSMRSMQHSPNLRTYRAMYDYSAQDEDEVSFRDGDYIVNVQPIDDGWMYGTVQRTGRTGMLPANYIEFVN

SEQ ID NO: 164554 - DNA, 3045 bp, Artificial Sequence
  derived and/or modified sequence
atgagggtgcccgtgtttgaggacattaaagatgagaccgaagaggagaaaatcggggaggaggagaatgaggaagaccaggtgttttataagcccgttattgaggacctgtcgatggaactggcccggaaatgcaccgaactcatctcggacatacgctataaggaggaatttaagaagagcaaggataagtgcacattcgttactgactctcctatgcttaaccatgtcaaaaacataggcgcttttatctcggaggcaaaatataagggcaccatcaaagccgacctgagtaactctctgtataagaggatgcccgcaacgatcgactctgtatttgccggcgaggtgactcagcttcagtctgaagtggcttacaaacagaaacacgatgccgcgaaaggtttttctgactacgcccacatgaaagagccgccagaggtgaaacatgctatggaggtcaacaagcatcagtcaaatatatcataccgcaaagatgtgcaggacactcatacgtactctgctgagctggatcgacccgatataaagatggctacacagatttctaaaatcatcagtaacgctgagtataaaaagggacagggcatcatgaataaggagcctgcagtgattggacggccggactttgagcatgccgtggaggctagtaagctctcctctcagatcaagtataaggagaagtttgacaatgagatgaaagacaaaaagcatcattataaccctttggagagcgcaagctttcgccagaatcaactggccgctactctggccagcaacgtcaaatacaaaaaggacatccagaatatgcatgacccggtgagcgacctgcctaatcttctgtttctggaccatgtgctaaaggccagcaaaatgctcagtggccgggagtataagaagctgttcgaagaaaacaagggaatgtatcacttcgacgctgatgccgtggagcacctgcaccacaaaggtaacgctgtgctacagtctcaggtgaagtataaagaggagtatgagaagaacaaaggtaaaccaatgttggagttcgttgaaaccccctcttatcaggcctctaaagaggcccagaagatgcaatctgagaaggtatacaaggaagacttcgagaaggagattaagggcaggtcttcccttgatctggacaagacacccgaatttctccatgttaaatacatcacaaacctgctgagagagaaggagtataaaaaagatctagaaaatgaaattaaagggaaaggcatggagctgaatagtgaggtcctagatatccagcgggctaagagagccagtgaaatggcttctgaaaaggagtacaaaaaggatctcgaatctattataaaaggcaaagggatgcaggcaggaactgatacactggagatgcagcacgctaagaaggccgcagagatcgcttcggaaaaggactataagcgggacctggaaaccgaaatcaaaggcaagggaatgcaggtgagcacggataccctggatgtacagcgcgcaaaaaaggcaagcgagatggcatcccaaaagcagtataagaaggacctggagaacgagatcaaggggaaaggcatgcaagtctccatggacatacccgacattcttagagcgaagcgcacatcggagatatactcccagagaaaatacaaagatgaggccgaaaagatgcttagcaattacagtacgattgccgacaccccggaaattcaacgaattaagaccacccagcagaacatcagcgcggtgttctacaagaaggaagtcggtgcaggcaccgccgtcaaagactcaccagagattgaaagagtgaagaaaaaccagcagaacatttcctccgttaagtataaagaagaaatcaagcatgccacagctatcagcgatcctccggagttaaaaagagttaaggagaatcagaaaaacatatctaaccttcagtacaaagagcagaactataaagccacccctgtgtctatgacccctgagatcgagagggtgagacgaaatcaggaacagttgagcgccgtgaagtacaaaggcgaattgcagagagggactgctatttcggatcccccggaacttaagcgcgcaaaagagaaccagaagaacattagcaatgtctactacagaggccaactgggaagggccacaacgctgagcgtgacccctgaaatggaaagagtcaaaaagaatcaggagaacatatcatcagtaaagtacacgcaggaccataaacagatgaagggccgaccatccctaatcctggacacccccgccatgagacacgttaaggaagctcagaaccacattagtatggtgaaatatcatgaggactttgaaaaaactaagggaagaggatttacacccgtggtggacgacccagtgaccgagagggtgcgcaagaacacacaggttgtcagtgatgcagcctataaaggtgtgcacccccatatagtcgagatggaccgtcgaccaggtattatcgtcgacttaaaggtgtggcgaactgatcccggaagtatctttgatctggacccgcttgaagacaatattcagtccagatccctgcacatgcttagcgagaaggccagccattaccgacggcattggagtagaagtcatagctctagcacattcggcaccggactaggggatgaccgctccgagatctctgaaatttacccatccttttcttgctgcagtgaggtgacacgcccaagcgatgagggggcccccgttcttccaggtgcgtaccagcagagccacagccaggggtatggctatatgcatcagacaagtgtgtcctctatgcggtccatgcagcattcacccaaccttcgaacgtaccgagccatgtacgactactccgcgcaggatgaggatgaggtaagctttcgggatggtgactacatcgttaacgttcaaccaatcgacgacggctggatgtacggaacagttcagcgaacaggaagaacaggtatgctgcctgccaattatatagagtttgtgaactag

SEQ ID NO: 164555 - DNA, 3045 bp, Artificial Sequence
  derived and/or modified sequence
atgagggtgcctgtgtttgaggacatcaaggatgaaacagaggaggagaagatcggggaggaggagaatgaggaggaccaggtgttctacaagcctgtgattgaggacctgtccatggagctggccaggaagtgcacagagctgatcagtgacatccgctacaaggaggagttcaagaagagcaaggacaagtgcacctttgtgacagacagccccatgctgaaccacgtgaagaacatcggggccttcatcagcgaggccaagtacaagggcaccatcaaggctgacctgagcaacagcctgtacaagaggatgcctgccaccattgattctgtgtttgctggggaggtgacccagctgcagagcgaggtggcctacaagcagaagcatgatgctgccaagggcttcagtgactatgcccacatgaaggagcccccagaggtgaagcacgccatggaggtgaacaagcaccagagcaacatctcctacaggaaggatgtgcaggacacccacacctacagcgctgagctggacagaccagacatcaagatggccacccagatcagcaagatcatcagcaatgctgagtacaagaagggccagggcatcatgaacaaggagcctgctgtgattggccgcccagactttgagcacgctgtggaggccagcaagctgagcagccagatcaagtacaaggagaagtttgacaatgagatgaaggacaagaagcaccactacaaccccctggagagcgccagcttccggcagaaccagctggccgccaccctggccagcaatgtgaagtacaagaaggacatccagaacatgcatgaccctgtgtctgacctgcccaacctgctcttcctggaccacgtgctgaaggccagcaagatgctgagcggccgggagtacaagaagctgtttgaggagaacaagggcatgtaccactttgatgctgatgctgtggagcacctgcaccacaagggaaatgctgtgctgcagagccaggtgaagtacaaggaggagtatgagaagaacaagggcaagcccatgctggagtttgtggagacccccagctaccaggccagcaaggaggcccagaagatgcagagcgagaaggtgtacaaggaggactttgagaaggagatcaagggccgcagcagcctggacctggacaagaccccagagttcctgcacgtgaagtacatcaccaacctgctgcgggagaaggagtacaagaaggacctggagaatgagatcaagggcaagggcatggagctgaacagcgaggtgctggacatccagagggccaagagggccagcgagatggccagcgagaaggagtacaagaaggacctggagagcatcatcaagggcaagggcatgcaggccggcacagacaccctggagatgcagcacgccaagaaggctgctgagatcgccagcgagaaggactacaagagggacctggagacagagatcaagggcaagggcatgcaggtgtccacagacaccctggatgtgcagagggccaagaaggccagcgagatggccagccagaagcagtacaagaaggacctggagaatgagatcaagggcaagggcatgcaggtgtccatggacatcccagacatcctgcgggccaagaggaccagcgagatctacagccagaggaagtacaaggatgaggccgagaagatgctgagcaactacagcaccatcgctgacaccccagagatccagaggatcaagaccacccagcagaacatctctgctgtgttctacaagaaggaggtgggcgccggcacagctgtgaaggacagccctgagattgagcgggtgaagaagaaccagcagaacatcagctctgtgaagtacaaggaggagatcaagcacgccacagccatcagtgaccccccagagctgaagagggtgaaggagaaccagaagaacatcagcaacctgcagtacaaggagcagaactacaaggccacccctgtgtccatgaccccagaaattgagcgggtgagaagaaaccaggagcagctgtctgctgtgaagtacaagggggagctgcagaggggcacagccatcagtgaccccccagagctgaagagggccaaggagaaccagaagaacatcagcaatgtgtactaccggggccagctgggccgggccaccaccctgtctgtgaccccagagatggagcgggtgaagaagaaccaggagaacatcagctctgtgaagtacacccaggaccacaagcagatgaagggccggcccagcctcatcctggacaccccagccatgagacatgtgaaggaggcccagaaccacatctccatggtgaagtaccatgaagattttgagaagaccaagggccggggcttcacccctgtggtggatgatcctgtgacagagcgggtgaggaagaacacccaggtggtgtctgatgctgcctacaagggcgtgcacccccacatcgtggagatggacagaagacctggcatcatcgtggacctgaaggtgtggaggacagaccccggcagcatctttgacctggaccccctggaggacaacatccagagccgcagcctgcacatgctgtctgagaaggccagccactacagaagacactggagccgcagccacagcagcagcacctttggaacaggcctgggagatgacagaagtgagatcagcgagatctaccccagcttcagctgctgcagcgaggtgacccggcccagtgatgagggcgcccctgtgctgcccggggcctaccagcagagccacagccagggctacggctacatgcaccagacctctgtgtcctccatgaggtccatgcagcacagccccaacctgcggacctaccgggccatgtatgactacagcgcccaggatgaagatgaggtgtccttcagagatggagactacatcgtgaatgtgcagcccattgatgatggctggatgtatggaacagtgcagaggactggaagaacaggcatgctgcctgccaactacatcgagtttgtgaactag

SEQ ID NO: 164556 - DNA, 3045 bp, Artificial Sequence
  derived and/or modified sequence
atgcgggtgcccgtgttcgaggacatcaaggacgagaccgaggaggagaagatcggagaagaggaaaacgaggaggatcaggttttctataaaccggtgattgaggatctctccatggagttagcccggaaatgtaccgagctgatatccgatataaggtataaggaagagttcaaaaaaagtaaggacaaatgcactttcgttaccgactcaccaatgctgaatcatgttaaaaacataggagcttttattagcgaggccaaatacaagggaacaatcaaggcagacctgtcgaacagcctgtataagcgtatgcctgccaccattgatagcgtctttgctggcgaagtaacacaacttcagagcgaggttgcgtataaacagaagcatgacgcggccaaagggttctccgactacgcccacatgaaggaaccccccgaagtgaagcatgcaatggaggtcaacaagcatcagagcaacatctcctaccggaaggatgttcaggatactcacacatatagcgccgaactggatagacccgatatcaagatggcaacacagatttccaagataattagtaatgctgagtataagaaaggccagggcattatgaacaaagagcccgccgtgataggccgcccagattttgagcacgccgtggaggcgagcaagctgtccagccaaattaagtacaaggagaagtttgataacgagatgaaagataagaagcatcattataaccccctggagagcgcatcgtttcgacagaatcaactggccgctactctggccagcaatgtcaaatacaagaaagatatccagaacatgcatgaccccgttagcgatctaccgaatctcctattcttggatcacgtgcttaaggctagtaaaatgctgtctggccgagagtacaagaagctgttcgaggagaataaaggcatgtatcatttcgatgcggatgctgtagagcacttgcatcataaagggaacgcggtgcttcagagccaagtgaagtacaaagaggagtatgaaaagaataaaggaaaacccatgctagagtttgtggaaacaccaagttaccaagcgtccaaagaggcgcagaaaatgcaaagcgaaaaggtctacaaagaggacttcgagaaagaaatcaagggccgctcttccctggatctggacaaaacgcccgaatttctacatgtaaagtacataacaaatctgctccgtgaaaaagaatataagaaagatctggagaacgaaatcaagggcaagggaatggagctcaattctgaagtgttggacattcagcgggctaagcgggctagcgagatggcctctgagaaggaatataaaaaagatctggagagtataatcaaaggtaaagggatgcaggccggcacagacacactcgagatgcagcatgccaaaaaggctgcagaaatcgcctctgagaaagactacaagagagacctggagaccgagatcaagggcaagggtatgcaggtgtcaacggacactctcgacgtccagagagctaaaaaggcctcagagatggcaagtcagaaacagtacaaaaaagatctggaaaatgagattaagggcaaaggaatgcaggtgtccatggacataccagacattctgcgagctaaaaggacctcagaaatatattcccagagaaaatataaagacgaagcagagaaaatgctatctaactactccacaattgcagataccccagaaatacagagaattaagactacacagcagaacatcagcgccgtcttttataaaaaagaagtcggtgcaggcacagcggtcaaggattccccggagatagagcgcgtcaagaaaaatcagcagaatatatcgtctgtcaaatacaaggaagagatcaagcacgctaccgctatttcggaccctccggagctaaagcgcgtgaaggagaaccagaagaacatatctaatctccaatacaaggagcagaactataaggctaccccagtctcaatgacacccgagattgagcgagtgcgcaggaatcaggaacagctgtccgccgtgaagtacaaaggcgagctccagcggggcaccgctatcagcgatcccccagagctgaagagggctaaggaaaaccagaaaaacatatcaaatgtatattatcgcggacagcttggaagggcgacaactctgtcagttacacctgagatggaacgcgtaaaaaagaatcaggaaaacataagctcagtcaagtatacacaagatcacaaacagatgaaaggacgtcctagtctgatcctggacactcccgccatgagacacgtgaaagaagctcagaatcatattagtatggtcaagtaccatgaagacttcgagaaaactaaaggccgaggattcaccccagttgtggatgatcccgtaacagagcgtgtcagaaagaatacacaggtggtgagtgacgccgcctataagggagtacacccccacatcgttgaaatggaccggaggcctgggataattgtggatttgaaggtatggcgtacagacccaggttccatatttgatcttgaccctctcgaggacaacatccaatcccggtctctgcatatgctttcagaaaaggcctcccactatagacggcactggagcagaagccacagtagctcaacatttggcactggtctcggagacgacagaagtgagatctccgaaatctacccctcctttagctgttgttcagaggtcacccggccaagtgacgaaggggcacccgtcttgccaggcgcctaccaacagtctcatagtcagggatacgggtacatgcatcaaacctcggtttcctccatgagaagcatgcagcactcaccaaatttgcggacttacagagcaatgtacgactacagcgcccaggatgaagacgaggtgtcgtttcgtgacggagactacattgtcaacgtacaaccaatcgacgacggttggatgtatggtaccgtgcagcgtacgggccgtaccggcatgctacccgccaactatatcgaatttgtgaactag

SEQ ID NO: 164557 - DNA, 9216 bp, Artificial Sequence
  derived and/or modified sequence
cttgagtgttagagctgagtagttttcccagaatctctaagtcctttttatgctcttttatgaatgaatagaattagtaaaagataaataaattttttcttttggatttcttaaccagtggaaaaaatgttgactttaaaagttcataaaatcaaattttgcttaagaatatgttatttccacttgtgaggccagcctggtagacctctgggatccttttctgttcactcacacaccactgagataaggagtgaagtgtgggctaaatagggctgaggcttgggcaagggcatttctgccagagcaccagagacgtcagcatctcaagggcactgtggtatggaaaaggacgccacatgagtaaattttaaaaatataaatattttaaagggtaaaaatgagggtccctgtatttgaggatataaaagatgaaactgaagaagaaaagataggggaagaagaaaatgaagaagaccaggtcttctataagcctgttattgaagacttaagcatggaattggccagaaaatgcacggaactcattagcgatatccgttataaagaagagtttaaaaagtccaaggataagtgtacatttgtgactgacagtcctatgctaaaccatgtaaaaaatatcggtgcttttatttctgaggcaaaatacaaaggcaccattaaagctgacctttctaattctctttataagcggatgccagccacaattgacagtgtttttgcaggagaagttacacagctccagagtgaggtggcctacaagcagaaacatgatgctgccaaaggattctcagattatgcccacatgaaggagccccctgaggttaaacatgccatggaggtcaataaacaccagagtaatatttcttataggaaagacgtgcaggacacccacacgtacagtgcagaacttgaccgaccagacatcaagatggcaacccagatctctaagatcataagcaatgcagaatacaagaaaggacaaggaataatgaataaagagcccgctgtaattggaagaccagattttgaacatgccgtggaagcttctaaactttctagtcaaattaaatacaaagaaaaatttgataatgaaatgaaggataagaaacatcattacaatcctcttgaaagtgcttcttttaggcagaatcagcttgctgctacactggcgagcaatgtgaagtacaagaaagacattcaaaatatgcatgatccagtttcagatctcccaaatttgttgtttttagaccatgttttgaaagccagcaaaatgctcagcggccgagaatataaaaagctctttgaggaaaacaaaggaatgtatcattttgatgcagatgctgtggaacatctgcaccataaaggcaatgccgtcctccaaagtcaggtgaaatataaagaagaatatgagaaaaataagggaaagccaatgcttgaatttgttgagacaccatcatatcaagcttcaaaggaggctcaaaagatgcaaagtgaaaaagtttacaaagaggattttgagaaggagattaaaggaaggtcatcactggatttagacaagactccagaatttttacatgtaaagtacatcaccaaccttctgagggagaaagaatataaaaaagatttggaaaatgagataaaagggaaaggaatggaacttaattcagaagttcttgatatccaaagagcaaagcgagcctctgaaatggcaagtgagaaagaatacaagaaagacctggagtcaataattaaagggaaaggaatgcaagctggcactgacacccttgaaatgcagcatgccaagaaggctgcagagatagcgagtgagaaagactataaaagagatctggagactgaaattaaagggaaagggatgcaggtgagcacagacactcttgatgtccagagagctaagaaagcatccgagatggccagccagaaacaatacaagaaggacttagaaaatgaaattaaagggaaaggaatgcaagtgagcatggatatcccagatatccttcgagccaagaggacatctgaaatctatagccagagaaagtataaagatgaagcagagaagatgctttctaactattctaccatagcagatactcctgaaattcagagaattaagacaactcaacaaaacattagtgcggtattttataagaaagaagtgggagctggcactgcagtgaaagatagcccagagatcgaacgagtgaagaaaaatcagcagaatattagttcagtgaaatacaaagaagagattaaacatgcaacagccatttctgatcctccagaactaaagagagttaaagaaaaccagaagaacatcagcaatctccagtataaagagcaaaactacaaggccactccggtaagcatgaccccggagatagagagagtgaggcgaaaccaggagcagctgagtgcggtaaaatataagggagaacttcaacggggaactgcaatttctgatccaccagagctgaagagggcaaaagaaaaccagaaaaacatcagcaatgtttattacagaggtcagctgggaagagctaccactttaagtgtaactcctgaaatggaaagagtgaagaagaatcaagaaaatattagctcggtaaaatatacccaggaccataaacagatgaaaggtagaccaagtctgattttagatacacctgctatgagacatgttaaagaagcacaaaatcatatttcaatggtaaaataccatgaagattttgaaaaaacaaaggggagaggctttactcccgtcgtggacgatcctgtgacagagagagtgaggaagaacacccaggtggtcagcgatgctgcctataaaggggtccaccctcacatcgtggagatggacaggagacctggaatcattgttgacctcaaagtttggcgcacagatcctggctccatcttcgaccttgatcccctggaagacaatattcagtctagaagtctccatatgctctctgaaaaggcgagtcactataggcgacactggtctcgatcccattccagcagtactttcggtacaggtctcggagacgacaggtcagaaatctccgagatttaccctagcttttcatgctgcagtgaggtaacaagaccgtctgatgaaggagcacctgttcttcccggagcctatcagcaaagccattcccaaggctatggctacatgcaccagaccagtgtgtcatccatgagatcaatgcagcattcaccaaatctaaggacctaccgagccatgtacgattacagtgcccaggatgaagacgaggtctcctttagagacggcgactacatcgtcaacgtgcagcctattgacgatggctggatgtacggcacagtgcagagaacagggagaacaggaatgctcccagcgaattacattgagtttgttaattaattatttctccctgccctttgagctttattctaatgtatcccaaacctaatctttttaaaagatagaagatacttttaagacaacttggccattattttacaatgatgtatccttcctttgacaattagacacacaggtaccaggaagaaggaatgacctctgggctgaaaacagcagcattttcagtaattcctacaaacaaaaatctttgtgtctggacacctggtgctgctaattgtgttcatggtttcctttgattggctattgaacccttctgggaaatgtatttttgtagactttaatagagaagttgattgtcccttaaatgtagtgtgtgtttgaaacttcttagctgtcactttggaatcaccccaagccaattctcttaactctgtaatgcagccaataatttcaaacccgttttgcttttgagtcatgaggcaatttccaatattagtgaaaattgcccaatataataagtgtaaacagtggcagaaggacagtctggttaaaattatattgactggtggccttagggatctagaaacttctactaaacagagaaatttccttgttccctaggctgactggtatctatttatttctcatttgtaccaaggcatctcctactctccatttatattctatggacccaagtctatgctcagttccacagaatgtcaggaccaaataacttcacagctactctgcaaagggcaaattataatgtcattgatataatttccctagtagcatttaccctgttgcatgtcatgtagattcaagcttctgtaacataggcagctgcactgcgcgttcctattattgaagcaaaaagggtgactgatacctaaaagccctttcttcctctagtcgccagctcatcagaaaaacatactttgaaaagatgcttgagattttcctgctgcatcgcactctagttttgaaggatttacatcttaggaaataacatgtatactctagtaaataagcgatttaggtgttccattgaacagctttgattaacttaatgccaccattgatttcaaagtgaagaaaatgtaacagaagccagtgaagcaatggaagctggagtgtgactggaaaaatactcagcaaacaaagttaccaattccatacagagatgatctggtatcttcttttggaaaatggtattcaaattctggaatggaaatctagccaccaaaacgggttaatcaaaagacgtccttttccatttttttttgcttttattttctaaatcatttttaagggaatgaaacaggaatgtcatcagagattttttagtacaggcccaagagcctgttctctaagaaagaaattgttgccatgttttgattttcgaataagtgactttgcaggctttatgctagcccttgctggtgggtcttgaaatttcatccagagtctgcagtccaggtcaccaagccagcggcacccgtcggcaaccctgtgtttttctgattgtgccgtttactgtgacctgcaacggggtggcattcacttagggtctgacttcacagctatgacaaaaccgaaaaagcaaaactgcaaaaaagtactaagatgtacgggtcttggggatatctgccttatatgttatattcaaggaaattaacaaaacatcctgtaaaacatcgtttaaggaaacgtttactagtccaaaggccaaagctaatttatttccactttagaaaagttagcacatgcttttgaaaatctgtgatttcattttattaggctaaaagggtaaataggctttattacactgaagctgcatctatatgtcactgacataaagttgaaaaaataaatgcaggcaaataactagagacttcttttaagggggtttggctggttttctctcactgaaatggccagtcgtgattaaagtgataaaaccccatatctgttttggtatattgtacacaaacctacaaaaataaactgaacttgcaatatttttgcaaaaaaatctgtcgttaaaactgaggataaaatacctgctcaattttattttactaagtatatatttacatttcacccaggcaggccattttcttttgtgattataagaaagagtagttgttgattaaattttcagactaaatataggacaggtacaattttggataaatagcacatttataagaaccgcaatgaaaactgacttgaaataatgcttgtaatcaggaaagtaatttcatccaccgatttcaaaaccagattcactgagcataaaagtcaatacatatttgaggaataagtctcctaaaattttaagcttcacgtaataatgtttgcatagcaaaatatttctgcttcaagcctttaggaattaagatctgatcagaatttaactaaagggtagttgttttacaatgaagactaaaactgaacaagatgttgcatgctcttgaggccataatttggtagtgttggcagttgttaataaagcttgtcaggatgttaagcatctcaggagaaatattggaaaattatatgtataaaaccaaagtgctatttttaaaagcatcatttaaaaaaaaatgacatgcctgaacaacttttccactttccacgtgcttccctcccacctttggtttggcaacaggtatctcgtgcatgaagctgacagctaaagaagattttaaaaattgagttaaagatgactgtgtaaatgtccaagcacagagagcatgcacctgactttctaaagtttgatgtgttctcaagcctgacagaagcacaaggaacagtttgatacacttttaaaaggttctgaaaacaaagctgtatagggatcctctctctcttgagcaaagtatagcaacagaatatattgcttttgttgtaagcttttgtagtacatgtttttactaataattcttgttctctagaaagctttctatttctaacctatggcaaaatgaatccttcatgtcttcttgttattgtttacacacttgcagtgtagcccagtttgaaatatttatttggttatcaactgcccatggaggaggctcttgatgatcccaggtctcctcgacctccatacaccacacaggcatttgtaagcacagtttccacaagcaccttgtaggaatatggataagattagaccagcccctctctgtccactgggtttatttcttgaagaagatgcagatctggtttttccaatgtgccacagtctttccttatcctctccatgctgagcttgacaacactctgggaatgaggaacaagactttttctaaaaagatagtggaagttcaagggatgtacctcgttttcaggttcatccatctccagtggaatgttttcaataaaagatgaagaaaatgtgtgtgatctttaataacacatccctatagaaagtggataaaagatataccaaaactgtaatacagatatatacaaatataggtgcctttttgattactcttgtttgtctagtatgctcttggaaagaaaaccaagcaagcaagttgctgcctattctatagtaatattttattacacatgattgatatttttgtggtagggaagtgggatgctcctcagatattaaaggtgttagctgattgtattttatctctaaagatttagaactttagaaaatgccgacttcttccatctatttctgaaaggttctttgtggatttatatagagttgagctatataaacattaactttagatttgggatttaaaatgcctattgtaagatagaataattgtgaggctggattcactacacaagatgaacttcacttcataaattaattataccttagcgatttgcttctgataatctaaaagtggctagattgtggttgttttggttaaggtgatatggaggtgggagagcttttagttaagtaagaagctatgtaaactgacaaggatgctaaaataaaagtctctgaagtattccatgccttttggaccctttcctcgcaactaactgtcaactgttgatcaaaaaagtcaaggcattgtatgttgcttctgtggttattattctgtgatgcttagactacttgaacccataaacttggaagaatctttgagcaaattttctcagttgtctgtatgacttcagtatattcctgggaatgccataggattttttgtgcttgatacatggtatccagtttgcatagtatcacttctttgtaatccagttgctgttaagaatgatgtactttaaaggaaaagagaaaactgcatcacagtcccattctccagtgtccatgcaatgaattgctgagcatttaggaagcagcaccaagtctattacaggcatggtgtgaaacttgatgtttgacctgtgatcaaaattgaaccattgtacagtttggcttctgtttgcttcaaaatatgtagaattgtggttgatgattaatttgcgagactaactttgagagtgtaacagttttgaagaaaacattgaatgttttgcaaatgaaggggcttcacggaatgttacaatgttactaatataatttggcttttgttatgcaaattgttaacaccagctattaaaatatattttagtagaaatgctttaattcatatttttttcctctacactgtgaatctttaagccttggtggactagagcaacatcgtgctgcccaaaggactaacctatgcaaactagttcacattttagtggatgtcgcagttaatgtgtaataagacattatttcccctgcataatgtacaacagcattgaaatgacacattaagcctagcatcacattgtatagtacagtcactcacaaacccttcaaggctaccctaatcattaacattaatatttgtttaaaagcaaatcaccgatttatctattgaaactacttaaatgacggcaaaccaggaatgacagatggctgtgtcagcaatggctttaatgtgttccctgcaagtggtctcctatgatagaactgcgttctcaaatgcactctcttcagggtcttaatattctgtgttttctctctgtatttgtaaaacattataacacattaatttcctatctctacacatttggtttgcttaaataaatgcaggatataaaaaaaatggttcacttcttggctctcaccgtggtttcttggagcatgggttgttagatgcaagcaatgcaccctaataataccccgggtctgagatttaacatgacaactcacatcaaatcgcatcagaggtgtgtgctgccttcagtgcatttacattggtgaatcagtcaagatattttcctcccccaaataaacttagttgtaagtgataacaatattatgcttctccaagctcagtatctttctgattttatatcaaagtaccgcaacaatgcatcattgtagttaatttatttcaagaataaattcctcatatgtcctcaatagtacaattctaattttcttctattcataagatgaaagaaatggtttggagcatagaatagaaagtgcacaaattgagtacataaaatgggaagcaactgatttctcagctaagaaaggctcatttatcacagaacacaattgcttttctccccccactacgcttcccataattgaaaaagtgagtccctatttttcacactcatataaatctatgcgatttggatgctagtcttattgtattattttgtaaaactttctctttggctcataatccttcctaattgtaaattgataaactttgcggatgacatctgctcgtagaataaacacttcttccaaa

SEQ ID NO: 164558 - DNA, 3045 bp, Artificial Sequence
  derived and/or modified sequence
atgcgagttcccgtcttcgaggacataaaggatgagactgaggaggaaaagatcggagaagaggagaatgaggaggatcaggtgttttacaaacccgtgatcgaagatctctctatggaactcgccaggaagtgcacagagctgatcagcgacatacggtacaaggaagagttcaaaaagtctaaagataagtgtacctttgtcacggattcccccatgcttaaccacgttaaaaatattggtgcctttatttcggaggctaaatacaaaggcaccatcaaggcggatcttagtaattccttgtacaaaagaatgcccgctactatcgattctgtctttgccggagaagttactcagctccagtccgaggtcgcctacaaacagaagcacgatgcggcaaaaggattttctgattatgctcacatgaaggaacctccggaagtgaagcacgccatggaggttaataaacaccaatccaatatatcctaccgaaaggatgtgcaggacacacacacatattccgctgagcttgaccgaccggacatcaagatggcgacccagatttctaaaattatcagtaacgccgaatataagaaaggccagggaattatgaataaggaacccgctgtcataggtagacctgattttgagcacgccgtggaggcaagcaaactgtcaagccagatcaaatataaagagaaatttgacaacgagatgaaagacaagaagcatcattacaatccactggagagtgcttctttcaggcagaaccagctcgcagcaacactggcttccaacgtgaaatataagaaggacatccagaacatgcatgaccccgtttcagacctgccaaacctgctgtttttagatcatgtgcttaaggcctcaaagatgctgagcggccgtgagtataaaaaattgttcgaggagaacaagggcatgtatcacttcgacgcagatgccgtcgagcatcttcaccataaaggcaacgccgtgctgcagagccaagtgaaatacaaggaggagtatgaaaagaacaagggcaaaccaatgctggaatttgtcgagacaccctcatatcaggcgtctaaggaggcgcagaaaatgcagagtgagaaggtctataaggaggatttcgaaaaggaaatcaaaggtcgatcctcccttgaccttgataagactcccgagtttctgcacgtcaagtacattacaaacctgctgagagagaaagagtacaagaaggatctagagaatgagattaagggcaaagggatggaactgaattcagaagttctggacatccaacgggctaaacgtgcatccgagatggcgagcgaaaaggaatacaagaaggatctggaatctattattaaggggaagggaatgcaggccggaacagatacattggagatgcagcatgctaaaaaagcagcagaaatagcatctgagaaggactacaagcgggatcttgaaacggagatcaagggcaaggggatgcaagtcagcaccgatacgctcgacgtacagagggccaaaaaggccagtgaaatggcctcacagaaacaatacaagaaggacctggaaaatgaaattaaagggaaggggatgcaggtctctatggatatccccgacatcctgcgggctaaacgcacaagtgagatctacagtcagaggaaatacaaagacgaggctgagaagatgctctcaaactattctaccattgcagacaccccagaaatccagagaatcaagacaacccagcagaacatttcagccgttttttataagaaagaggtgggtgcgggaaccgctgtgaaagatagtcctgaaatcgagcgagtcaagaagaatcagcaaaacataagttctgtaaagtataaggaggagattaaacacgcaacagccatctctgatccccctgagttgaagcgggtgaaagaaaaccagaagaatattagtaacctccaatataaggagcagaactacaaagccacaccggttagtatgacacccgagatcgaaagagtcaggcgtaatcaggaacaactgagtgctgtgaagtacaagggggagctccaaagagggactgctatctccgatccgcctgaactcaagcgcgcaaaggagaatcagaagaatattagtaacgtctattaccgcggacagctcggacgagccactacactttcagtgactccagagatggaaagagtcaaaaagaaccaggagaatatcagcagcgtcaagtacacgcaggaccataaacaaatgaaagggagacccagcctgattctcgatacaccagccatgcgacatgttaaagaggctcagaaccacatttcgatggttaagtaccacgaagactttgaaaagactaaggggagaggctttacccctgtggtggatgatcctgttaccgaacgggttaggaaaaacacccaggtcgtaagcgatgctgcgtacaagggggtacatccgcacattgtagagatggacagaaggccaggtatcattgtcgacctcaaggtatggaggacagatccgggatccattttcgatctcgatccactggaggataatattcaatcccgcagtctgcatatgctatctgaaaaggcaagccactatagacgacactggtcaagatcccatagctccagcacttttggcacaggactcggagatgaccggtctgagatttccgaaatttatccgagctttagttgctgctcggaggtgacacgccctagcgatgaaggagctcctgtgctgcccggagcctatcagcaatcccattctcagggctacggttacatgcaccagacatctgtgtccagcatgcgctcaatgcagcattctcccaacctcagaacctatagagccatgtatgattacagtgcgcaagatgaagacgaggtgtcattccgggacggggactacatagttaacgtgcaacccattgacgatggctggatgtatgggacagtgcagcgtacaggaagaactgggatgctgcccgcaaattatatcgagttcgtgaactag

SEQ ID NO: 164559 - DNA, 3045 bp, Artificial Sequence
  derived and/or modified sequence
atgagagtgcccgtgttcgaggacatcaaggacgagaccgaggaggagaagatcggcgaggaggagaacgaggaggaccaggtgttctacaagcccgtgatcgaggacctgagcatggagctggccagaaagtgcaccgagctgatcagcgacatcagatacaaggaggagttcaagaagagcaaggacaagtgcaccttcgtgaccgacagccccatgctgaaccacgtgaagaacatcggcgccttcatcagcgaggccaagtacaagggcaccatcaaggccgacctgagcaacagcctgtacaagagaatgcccgccaccatcgacagcgtgttcgccggcgaggtgacccagctgcagagcgaggtggcctacaagcagaagcacgacgccgccaagggcttcagcgactacgcccacatgaaggagccccccgaggtgaagcacgccatggaggtgaacaagcaccagagcaacatcagctacagaaaggacgtgcaggacacccacacctacagcgccgagctggacagacccgacatcaagatggccacccagatcagcaagatcatcagcaacgccgagtacaagaagggccagggcatcatgaacaaggagcccgccgtgatcggcagacccgacttcgagcacgccgtggaggccagcaagctgagcagccagatcaagtacaaggagaagttcgacaacgagatgaaggacaagaagcaccactacaaccccctggagagcgccagcttcagacagaaccagctggccgccaccctggccagcaacgtgaagtacaagaaggacatccagaacatgcacgaccccgtgagcgacctgcccaacctgctgttcctggaccacgtgctgaaggccagcaagatgctgagcggcagagagtacaagaagctgttcgaggagaacaagggcatgtaccacttcgacgccgacgccgtggagcacctgcaccacaagggcaacgccgtgctgcagagccaggtgaagtacaaggaggagtacgagaagaacaagggcaagcccatgctggagttcgtggagacccccagctaccaggccagcaaggaggcccagaagatgcagagcgagaaggtgtacaaggaggacttcgagaaggagatcaagggcagaagcagcctggacctggacaagacccccgagttcctgcacgtgaagtacatcaccaacctgctgagagagaaggagtacaagaaggacctggagaacgagatcaagggcaagggcatggagctgaacagcgaggtgctggacatccagagagccaagagagccagcgagatggccagcgagaaggagtacaagaaggacctggagagcatcatcaagggcaagggcatgcaggccggcaccgacaccctggagatgcagcacgccaagaaggccgccgagatcgccagcgagaaggactacaagagagacctggagaccgagatcaagggcaagggcatgcaggtgagcaccgacaccctggacgtgcagagagccaagaaggccagcgagatggccagccagaagcagtacaagaaggacctggagaacgagatcaagggcaagggcatgcaggtgagcatggacatccccgacatcctgagagccaagagaaccagcgagatctacagccagagaaagtacaaggacgaggccgagaagatgctgagcaactacagcaccatcgccgacacccccgagatccagagaatcaagaccacccagcagaacatcagcgccgtgttctacaagaaggaggtgggcgccggcaccgccgtgaaggacagccccgagatcgagagagtgaagaagaaccagcagaacatcagcagcgtgaagtacaaggaggagatcaagcacgccaccgccatcagcgacccccccgagctgaagagagtgaaggagaaccagaagaacatcagcaacctgcagtacaaggagcagaactacaaggccacccccgtgagcatgacccccgagatcgagagagtgagaagaaaccaggagcagctgagcgccgtgaagtacaagggcgagctgcagagaggcaccgccatcagcgacccccccgagctgaagagagccaaggagaaccagaagaacatcagcaacgtgtactacagaggccagctgggcagagccaccaccctgagcgtgacccccgagatggagagagtgaagaagaaccaggagaacatcagcagcgtgaagtacacccaggaccacaagcagatgaagggcagacccagcctgatcctggacacccccgccatgagacacgtgaaggaggcccagaaccacatcagcatggtgaagtaccacgaggacttcgagaagaccaagggcagaggcttcacccccgtggtggacgaccccgtgaccgagagagtgagaaagaacacccaggtggtgagcgacgccgcctacaagggcgtgcacccccacatcgtggagatggacagaagacccggcatcatcgtggacctgaaggtgtggagaaccgaccccggcagcatcttcgacctggaccccctggaggacaacatccagagcagaagcctgcacatgctgagcgagaaggccagccactacagaagacactggagcagaagccacagcagcagcaccttcggcaccggcctgggcgacgacagaagcgagatcagcgagatctaccccagcttcagctgctgcagcgaggtgaccagacccagcgacgagggcgcccccgtgctgcccggcgcctaccagcagagccacagccagggctacggctacatgcaccagaccagcgtgagcagcatgagaagcatgcagcacagccccaacctgagaacctacagagccatgtacgactacagcgcccaggacgaggacgaggtgagcttcagagacggcgactacatcgtgaacgtgcagcccatcgacgacggctggatgtacggcaccgtgcagagaaccggcagaaccggcatgctgcccgccaactacatcgagttcgtgaactag

SEQ ID NO: 164560 - protein, 703 aa, Artificial Sequence
  derived and/or modified sequence
MAAATGDPGLSKLQFAPFSSALDVGFWHELTQKKLNEYRLDEAPKDIKGYYYNGDSAGLPARLTLEFSAFDMSAPTPARCCPAIGTLYNTNTLESFKTADKKLLLEQAANEIWESIKSGTALENPVLLNKFLLLTFADLKKYHFYYWFCYPALCLPESLPLIQGPVGLDQRFSLKQIEALECAYDNLCQTEGVTALPYFLIKYDENMVLVSLLKHYSDFFQGQRTKITIGVYDPCNLAQYPGWPLRNFLVLAAHRWSSSFQSVEVVCFRDRTMQGARDVAHSIIFEVKLPEMAFSPDCPKAVGWEKNQKGGMGPRMVNLSECMDPKRLAESSVDLNLKLMCWRLVPTLDLDKVVSVKCLLLGAGTLGCNVARTLMGWGVRHITFVDNAKISYSNPVRQPLYEFEDCLGGGKPKALAAADRLQKIFPGVNARGFNMSIPMPGHPVNFSSVTLEQARRDVEQLEQLIESHDVVFLLMDTRESRWLPAVIAASKRKLVINAALGFDTFVVMRHGLKKPKQQGAGDLCPNHPVASADLLGSSLFANIPGYKLGCYFCNDVVAPGDSTRDRTLDQQCTVSRPGLAVIAGALAVELMVSVLQHPEGGYAIASSSDDRMNEPPTSLGLVPHQIRGFLSRFDNVLPVSLAFDKCTACSSKVLDQYEREGFNFLAKVFNSSHSFLEDLTGLTLLHQETQAAEIWDMSDDETI

SEQ ID NO: 164561 - DNA, 2112 bp, Artificial Sequence
  derived and/or modified sequence
atggccgccgccaccggcgaccccggcctgagcaagctgcagttcgcccccttcagcagcgccctggacgtgggcttctggcacgagctgacccagaagaagctgaacgagtacagactggacgaggcccccaaggacatcaagggctactactacaacggcgacagcgccggcctgcccgccagactgaccctggagttcagcgccttcgacatgagcgcccccacccccgccagatgctgccccgccatcggcaccctgtacaacaccaacaccctggagagcttcaagaccgccgacaagaagctgctgctggagcaggccgccaacgagatctgggagagcatcaagagcggcaccgccctggagaaccccgtgctgctgaacaagttcctgctgctgaccttcgccgacctgaagaagtaccacttctactactggttctgctaccccgccctgtgcctgcccgagagcctgcccctgatccagggccccgtgggcctggaccagagattcagcctgaagcagatcgaggccctggagtgcgcctacgacaacctgtgccagaccgagggcgtgaccgccctgccctacttcctgatcaagtacgacgagaacatggtgctggtgagcctgctgaagcactacagcgacttcttccagggccagagaaccaagatcaccatcggcgtgtacgacccctgcaacctggcccagtaccccggctggcccctgagaaacttcctggtgctggccgcccacagatggagcagcagcttccagagcgtggaggtggtgtgcttcagagacagaaccatgcagggcgccagagacgtggcccacagcatcatcttcgaggtgaagctgcccgagatggccttcagccccgactgccccaaggccgtgggctgggagaagaaccagaagggcggcatgggccccagaatggtgaacctgagcgagtgcatggaccccaagagactggccgagagcagcgtggacctgaacctgaagctgatgtgctggagactggtgcccaccctggacctggacaaggtggtgagcgtgaagtgcctgctgctgggcgccggcaccctgggctgcaacgtggccagaaccctgatgggctggggcgtgagacacatcaccttcgtggacaacgccaagatcagctacagcaaccccgtgagacagcccctgtacgagttcgaggactgcctgggcggcggcaagcccaaggccctggccgccgccgacagactgcagaagatcttccccggcgtgaacgccagaggcttcaacatgagcatccccatgcccggccaccccgtgaacttcagcagcgtgaccctggagcaggccagaagagacgtggagcagctggagcagctgatcgagagccacgacgtggtgttcctgctgatggacaccagagagagcagatggctgcccgccgtgatcgccgccagcaagagaaagctggtgatcaacgccgccctgggcttcgacaccttcgtggtgatgagacacggcctgaagaagcccaagcagcagggcgccggcgacctgtgccccaaccaccccgtggccagcgccgacctgctgggcagcagcctgttcgccaacatccccggctacaagctgggctgctacttctgcaacgacgtggtggcccccggcgacagcaccagagacagaaccctggaccagcagtgcaccgtgagcagacccggcctggccgtgatcgccggcgccctggccgtggagctgatggtgagcgtgctgcagcaccccgagggcggctacgccatcgccagcagcagcgacgacagaatgaacgagccccccaccagcctgggcctggtgccccaccagatcagaggcttcctgagcagattcgacaacgtgctgcccgtgagcctggccttcgacaagtgcaccgcctgcagcagcaaggtgctggaccagtacgagagagagggcttcaacttcctggccaaggtgttcaacagcagccacagcttcctggaggacctgaccggcctgaccctgctgcaccaggagacccaggccgccgagatctgggacatgagcgacgacgagaccatctag

SEQ ID NO: 164562 - DNA, 4959 bp, Artificial Sequence
  derived and/or modified sequence
ggaagttgagcggcggcaagaaataatggcggcagctacgggggatcctggactctctaaactgcagtttgccccttttagtagtgccttggatgttgggttttggcatgagttgacccagaagaagctgaacgagtatcggctggatgaagctcccaaggacattaagggttattactacaatggtgactctgctgggctgccagctcgcttaacattggagttcagtgcttttgacatgagtgctcccaccccagcccgttgctgcccagctattggaacactgtataacaccaacacactcgagtctttcaagactgcagataagaagctccttttggaacaagcagcaaatgagatatgggaatccataaaatcaggcactgctcttgaaaaccctgtactcctcaacaagttcctcctcttgacatttgcagatctaaagaagtaccacttctactattggttttgctatcctgccctctgtcttccagagagtttacctctcattcaggggccagtgggtttggatcaaaggttttcactaaaacagattgaagcactagagtgtgcatatgataatctttgtcaaacagaaggagtcacagctcttccttacttcttaatcaagtatgatgagaacatggtgctggtttccttgcttaaacactacagtgatttcttccaaggtcaaaggacgaagataacaattggtgtatatgatccctgtaacttagcccagtaccctggatggcctttgaggaattttttggtcctagcagcccacagatggagtagcagtttccagtctgttgaagttgtttgcttccgtgaccgtaccatgcagggggcgagagacgttgcccacagcatcatcttcgaagtgaagcttccagaaatggcatttagcccagattgtcctaaagcagttggatgggaaaagaaccagaaaggaggcatgggaccaaggatggtgaacctcagtgaatgtatggaccctaaaaggttagctgagtcatcagtggatctaaatctcaaactgatgtgttggagattggttcctactttagacttggacaaggttgtgtctgtcaaatgtctgctgcttggagccggcaccttgggttgcaatgtagctaggacgttgatgggttggggcgtgagacacatcacatttgtggacaatgccaagatctcctactccaatcctgtgaggcagcctctctatgagtttgaagattgcctagggggtggtaagcccaaggctctggcagcagcggaccggctccagaaaatattccccggtgtgaatgccagaggattcaacatgagcatacctatgcctgggcatccagtgaacttctccagtgtcactctggagcaagcccgcagagatgtggagcaactggagcagctcatcgaaagccatgatgtcgtcttcctattgatggacaccagggagagccggtggcttcctgccgtcattgctgcaagcaagagaaagctggtcatcaatgctgctttgggatttgacacatttgttgtcatgagacatggtctgaagaaaccaaagcagcaaggagctggggacttgtgtccaaaccaccctgtggcatctgctgacctcctgggctcatcgctttttgccaacatccctggttacaagcttggctgctacttctgcaatgatgtggtggccccaggagattcaaccagagaccggaccttggaccagcagtgcactgtgagtcgtccaggactggccgtgattgcaggagccctggccgtggaattgatggtatctgttttgcagcatccagaagggggctatgccattgccagcagcagtgacgatcggatgaatgagcctccaacctctcttgggcttgtgcctcaccagatccggggatttctttcacggtttgataatgtccttcccgtcagcctggcatttgacaaatgtacagcttgttcttccaaagttcttgatcaatatgaacgagaaggatttaacttcctagccaaggtgtttaattcttcacattccttcttagaagacttgactggtcttacattgctgcatcaagaaacccaagctgctgagatctgggacatgagcgatgatgagaccatctgagatggccccgctgtggggctgacttctccccggccgcctgctgaggagctctccatcgccagagcaggactgctgaccccaggcctggtgattctgggcccctcctccataccccgaggtctgggattcccccctctgctgcccaggagtggccagtgttcggcgttgctcgggattcaagataccaccagttcagagctaaataataaccttggccttggccttgctattgacctgggacttggtcctccatgcagtttttatttcttgtcacagtgactgatagccatcccccaggatcctttccccttggccctgagggggtgacccaacacagaccaaatggggaaatgagcaaccagctcctgcccagagccactgcgggaggtggcaccctcatccccggaatgtgctgcccaccgcaccgcaggctcctcctgtgggggccctgggcatgggtgagggtgggaccccgtgagcgcactgcaccctggccctggtggagcgggaggaggaggagagccgagctgggtacgagactaaagggcccacatgacccagtgacgccagatttccaccaaggactgagtgagctgctcagacatggctttctgcctcccagcctgtcctccactgtgggcatagcatctgtgcctgcctgcctgcttgagggagaggagtttctgctgctgccttgagctggggggaagagcccaggggcagatcctggcagctgcctggatggggctcctccctgcccttatgagcaggccaggcccagaaaggccgagcctgggctgccttcctgccccagccgagggaggggtcagacggctctaccatgggtaactcaggcaagagctggttttcctctttattctgggtgtgtgcagctgtgaggccccaacccaggagaggccatggcctaggtacctgtgaccaccctgcccccgtgtagagggcatcgtctttcctgctattttattctttcagcttttgtcttaggcccagaatcaaagtgaaaattgagtcgagctgacccttacaacagtaggatttagtagggtagatttcaaatgaggcttcgcttctcccaaagtagccagtccaagttccagtggctgtcgttcagctcatgggagcttcatggggacacagccggcacaggtgcagggcccgagtccgcccacccagcctggcgctgaaactgcacacgtacactatgtggtttaagagcactttattattgttcttaaggctacttttaagtacaaaaaaagatggcctgccaaacctttttttttcttcttccaggaaaaacaggccacagagaatggtatattacagatttacacacatgaagagaaggtcagagcgcactgcaggcagcgcggctctgggaagaacttcacggagccccttcttagagcagggagggggctttctcagtgaaatgtttggttttctgctgcctcctctgccccaggcccccctccagggtactgcctatcccagataggtcagtgcaccagggacccggccgccagcaccgccgacccctcccagagtgacgcccttgttcactgacaaagagacctgtcccaggagtgtcctccaccgagccggtcagctgtgggtggttttcctgttacgacgctcagtagcctgtagcaataacaaactcgtggctatgaatgcagatgcagtgttctcatagaataactgttcctgcacttttacagacaaatctacgacaaaaaaaaagatcaactttttttttccgaacaacaaaaaaaatgaatgattacaataggaaagggaaaaattaaatagctacatatcattaacaaattaatgttcttcaaaaaatacctacaaatttctctgtacattctttacgcacagcgtaacgatggtctcaaaatcacccatatagaaaagtgttctcaacgatttttcctacagaaaatataggggcctgaatgccaaagcttggaagcccagtacagtgggagtgaaatgtgtgcggggcaaggagaagggcttttctttcctccacttttcaaaggcctgcagccactctgtgactacaagagccagtcctccgaccttttcacccagtgccaatttccaaaattcaacagctaaaaactgtaaaaccgggggtcatacggtgtgcagagtccacaaagccttgcaggtgaggtgaccacgcccacgtcacctggtcaggtgccatcgtcgtgagcctctggtgggccaggtgggacacagcacaccccagggggaggggatagaaacgctcattgaccaaaaaggagcagctgtgacctccacagctgtgtctgtcatgcttgcttcatctaatttctagttagtagctattaatatagcaaataataaatgcagtaataacagtataaagtcagaggaatgtatactgccttggccccagcgtacgaggaagcgtataaaacaccatatcacagattgtctgtcagtaatctgctgttcagccaagagagttcaaagggagcagtttctgcatgtagggaagttggaagacacaaaccccacctcccctgggagcttgtaacaaagcagacagggatgcaaaaataaatgatgtcagcctgcagccaaactccagcatcccacaccgcagctgacccactgctcatcgcgagggcctgccaggagctggcctcccgcactacttgtgagtaaagtgaatatcaaataccaatcttagagtacaactgtaccagcagtaagtatatctaggactgtaactgacaaaaataaactaattctgaaaagaa

SEQ ID NO: 164563 - DNA, 2112 bp, Artificial Sequence
  derived and/or modified sequence
atggccgccgccacgggagatcccggactgtccaagctccagttcgcccccttcagctctgcactggatgttggcttttggcacgaactaacacagaagaagctgaatgagtacaggctggacgaagcgccaaaagatattaagggatactattacaatggtgatagcgccggattacctgcccggctcaccctggaattttctgcatttgatatgagtgcgccaactcccgctcggtgctgtcccgcaatcggcactctctacaatactaataccctcgagtcatttaagacagccgacaaaaagctcctgctggagcaggcagccaatgagatctgggagtctattaagagcggtacggcactagagaatccagtcctgctcaacaaatttctgttactgaccttcgccgacctgaaaaagtaccacttctactactggttctgttatccggcactgtgcttgcctgaatccttgccacttattcagggacctgtgggtttggaccagcggttctctctaaagcaaattgaagccttggagtgcgcatacgataacttgtgtcagacagagggtgtgaccgcgctgccttatttccttattaaatacgacgaaaacatggtcctggtgtcgttactgaaacactatagcgacttctttcaggggcaacgcactaaaataacaattggcgtctacgacccctgcaatctggctcagtaccctggctggcccttaaggaactttctcgtgctagccgcccaccggtggtcctcttctttccagagtgtggaggtcgtgtgtttcagagaccgtaccatgcagggtgcccgcgacgttgcccactctataatttttgaagtgaaattgcccgagatggcatttagcccagattgtcctaaggccgttggttgggaaaagaatcagaagggcggaatggggccacggatggtgaacctgagtgaatgcatggaccccaagcgacttgccgaatctagtgtggatctgaatctcaagttaatgtgctggagacttgtgcccaccctggatcttgacaaggtagtgtcagtgaagtgtctgttactcggtgcaggtaccctgggctgcaatgtagccaggacgcttatgggatggggcgtcagacacatcacatttgtggataacgccaaaatctcttatagcaaccccgtgcgccagcccttatatgagttcgaggattgccttggtggcggaaagcctaaagccttagccgccgcagacagattgcagaagattttccctggagtgaatgccagaggatttaacatgtccatccctatgccaggacaccctgtgaatttttcgtcggtgaccctcgagcaggctagaagggacgttgagcagctggagcagctgatcgagtcccacgatgtcgtgttcttactgatggatactagggaatctcgttggctgcctgccgtcatcgccgccagtaagcgcaagctggtcatcaatgcggcgttaggattcgatacttttgtcgtaatgagacacggcctaaagaagccaaagcaacagggggccggcgacctatgccctaatcatcccgtcgcttccgctgacctattgggtagcagcttgtttgccaacatcccggggtacaaattagggtgttatttttgcaatgatgtggttgcaccaggagactcaactagggatcgtaccctggatcagcagtgcacagttagtagaccaggcctggcggtaatagctggggccctggcagttgagctcatggtgtcagtcctgcagcaccccgaaggaggctacgctatagccagtagttccgacgatcgcatgaatgagcctcccacatctctggggctggtgcctcaccagatccggggtttcctgagcagattcgacaacgtgctgccggtttctctcgcgtttgataaatgcacagcttgcagcagcaaagtcctcgatcagtatgagcgcgaagggttcaactttctggctaaggttttcaattcctcccatagtttcctggaagatctgaccgggcttacactgttgcatcaggaaactcaagctgcggaaatctgggatatgtcagacgacgagacgatctag

SEQ ID NO: 164564 - DNA, 2112 bp, Artificial Sequence
  derived and/or modified sequence
atggctgctgccactggagaccccggcctgagcaagctgcagtttgcccccttcagcagcgccctggatgtgggcttctggcatgagctgacccagaagaagctgaatgagtaccgcctggatgaggcccccaaggacatcaagggctactactacaatggagacagcgctggcctgcctgcccggctgaccctggagttcagcgcctttgacatgtctgcccccaccccagcccgctgctgcccagccatcggcaccctgtacaacaccaacaccctggagagcttcaagacagctgacaagaagctgctgctggagcaggccgccaatgagatctgggagagcatcaagagcggcacagccctggagaaccctgtgctgctgaacaagttcctgctgctgacctttgctgacctgaagaagtaccacttctactactggttctgctacccagccctgtgcctgcctgagagcctgcccctcatccagggccctgtgggcctggaccagcgcttcagcctgaagcagatcgaggccctggagtgtgcctatgacaacctgtgccagacagagggcgtgacagccctgccctacttcctgatcaagtatgatgagaacatggtgctggtgtccctgctgaagcactacagcgacttcttccagggccagaggaccaagatcaccatcggcgtgtatgacccctgcaacctggcccagtacccaggctggcccctgaggaacttcctggtgctggccgcccaccgctggagcagcagcttccagagcgtggaggtggtgtgcttccgggacaggaccatgcagggcgccagagatgtggcccacagcatcatctttgaggtgaagctgcctgagatggccttctccccagactgccccaaggctgtgggctgggagaagaaccagaagggcggcatgggccccaggatggtgaacctgtctgagtgcatggaccccaagaggctggccgagagctctgtggacctgaacctgaagctgatgtgctggaggctggtgcccaccctggacctggacaaggtggtgtctgtgaagtgcctgctgctgggcgccggcaccctgggctgcaatgtggcccggaccctgatgggctggggcgtgcgccacatcacctttgtggacaatgccaagatctcctacagcaaccctgtgcggcagcccctgtatgaatttgaggactgcctgggcggcggcaagcccaaggccctggccgctgctgaccggctgcagaagatcttccctggggtgaatgcccggggcttcaacatgagcatccccatgcctggccaccctgtgaacttcagctctgtgaccctggagcaggccaggagagatgtggagcagctggagcagctgattgagagccatgatgtggtgttcctgctgatggacacccgggagagccgctggctgcctgctgtgattgctgccagcaagaggaagctggtgatcaatgctgccctgggctttgacacctttgtggtgatgagacatggcctgaagaagcccaagcagcagggcgctggggacctgtgccccaaccaccctgtggccagcgctgacctgctgggcagcagcctgtttgccaacatccctggctacaagctgggctgctacttctgcaatgatgtggtggcccctggggacagcacccgggacaggaccctggaccagcagtgcaccgtgtccaggcctggcctggccgtgattgctggggccctggccgtggagctgatggtgtctgtgctgcagcaccctgagggcggctacgccatcgccagcagcagtgatgacaggatgaatgaaccacccaccagcctgggcctggtgccccaccagatccggggcttcctgagcagatttgacaacgtgctgcctgtgtccctggcctttgataaatgtacagcctgcagcagcaaggtgctggaccagtatgagcgggagggcttcaacttcctggccaaggtgttcaacagcagccacagcttcctggaggacctgaccggcctgaccctgctgcaccaggagacccaggccgctgagatctgggacatgtctgatgatgagaccatctag

SEQ ID NO: 164565 - DNA, 2112 bp, Artificial Sequence
  derived and/or modified sequence
atggccgccgccaccggcgaccccggcctgagcaagctgcagttcgccccattcagctccgccctggatgtgggattttggcatgaacttacgcagaagaaactaaacgaatatcggttggatgaggcccccaaggacatcaaggggtattattacaatggagattccgcgggattacccgcacgactgacactggaattttccgcttttgacatgtctgcccctacacccgcgcggtgttgccccgctatcggcacactgtacaacactaacaccctggagtcctttaagacagccgacaaaaagctgttactcgagcaggcagccaatgagatttgggagtcaatcaagagtggaactgccctggagaaccccgtgctactgaacaagttcctgctgttgacctttgcagatctaaagaaataccacttttattattggttttgttaccccgcgctctgccttccagagagcctgccactgatccagggcccagttggcttggatcagcgcttctccttgaaacaaattgaagcccttgagtgcgcttatgataatctgtgtcagacagaaggggttaccgccttgccgtattttcttattaagtacgatgagaacatggtgctagtgtccctactgaaacactactcagactttttccaggggcagaggaccaagattaccatcggggtttatgacccatgcaatctggctcagtacccagggtggccactaaggaatttcctagtgctggcggcgcataggtggtcctcctcatttcagtcagttgaagtggtgtgttttagggatagaaccatgcagggggcccgagacgtggcacacagcattatctttgaagtcaagctgcctgaaatggctttttcacccgattgccctaaggccgttggatgggaaaagaaccagaagggcggcatgggcccacggatggtaaacctgagtgagtgtatggaccctaaaagattagccgagagttccgtagacctaaatctgaaactgatgtgttggcgtctggttcccactctggacctggataaggtggtgtccgtcaagtgtctcctcctgggagccggcacgttagggtgcaacgtggcccgcaccctcatgggatggggagtgagacacataacctttgtcgacaatgcgaaaatcagttacagcaacccagtaagacagccactttacgaattcgaagactgcctgggagggggcaagcctaaagctctcgctgcggcagaccggctgcagaagattttccccggcgttaacgccagaggattcaacatgagtataccgatgccaggtcatccggtgaatttcagcagcgtcacgctcgaacaggccaggagagacgtggagcagctggagcagcttattgagtcccacgacgtcgtatttctcttgatggatacccgggaatcaaggtggctgccagccgtgatcgctgccagcaagcgcaaacttgttattaatgctgccctgggtttcgacacctttgtggtgatgcgccacgggctcaagaaacccaaacagcagggggccggagacctctgccctaaccaccccgtcgcctccgcagacctacttggcagttccttgtttgccaatataccaggatacaaacttggatgctacttttgtaacgatgtggtagctccgggggactccacaagggacagaaccttagatcagcaatgtacagtgtcaagacccggccttgcagtgatcgccggtgcactggcagtcgagctaatggtgtctgtgcttcagcacccagaaggagggtacgccatagcttcctcctccgatgatcgaatgaatgaaccccctacttcactgggactcgtgcctcaccagattaggggcttcctctcccggtttgataacgtgctgccggtcagtttggccttcgacaagtgtacggcttgtagttctaaggtgctcgaccagtatgaaagggaagggtttaatttccttgcaaaggttttcaattcttctcacagctttctggaggacttaactggcttgacattgctccatcaggaaacgcaggctgctgaaatttgggacatgagcgatgacgagaccatctag

SEQ ID NO: 164566 - DNA, 2112 bp, Artificial Sequence
  derived and/or modified sequence
atggcggcagcaaccggggaccccggactctctaaactacagtttgccccattttcaagcgccctcgacgtaggtttttggcatgagcttacacagaagaagctgaatgaatatcgcctcgacgaggccccaaaagacataaagggatactactataacggcgacagtgctggtttgcccgctcgactcaccctggaattctccgcgtttgacatgagcgccccaactcctgccaggtgttgcccagcaattgggactctctacaatacaaatacgctcgagtccttcaagacagctgacaagaaactactgcttgagcaagccgcaaacgagatttgggagagtataaagtccggaaccgccctcgagaaccccgtcctgctgaataaatttctcttgctcacttttgcagacttgaaaaaataccacttctactactggttttgctatcccgctttatgcctgccagaatccctgcctctgattcaggggccagttggactggatcagcgtttttcactcaagcagattgaagcccttgagtgtgcctatgacaacctatgtcaaactgagggagtgacagcactaccttattttcttattaagtatgacgaaaacatggtgctggtatccctactgaagcattactcagacttctttcagggacagcgcaccaaaattaccatcggtgtgtatgatccatgtaacctagcccagtatcccggatggcccttgaggaacttcctcgtgctggccgcacataggtggtcgtcttccttccagagcgttgaagtggtttgttttcgcgataggactatgcaaggcgcaagggacgtcgcacactccattattttcgaggtcaagcttcctgaaatggcgttctcacccgattgccctaaggccgtgggatgggaaaaaaatcaaaaaggcggaatgggcccacgcatggtgaacctgtctgagtgtatggatcctaaacgattggccgaaagctctgtggatttgaatttgaaactgatgtgttggcggctggtgccaacactcgacctggacaaggtggtcagtgtgaaatgcctgttactgggtgccggaacccttggctgcaacgtcgcaaggacactcatgggttggggagtgcgtcacattacgtttgttgataacgcaaagattagttacagcaatcctgtgcgccaacccttatatgagtttgaggactgtctggggggagggaaaccaaaggcgcttgccgcagcagatcggctgcagaagattttccccggagtcaacgccaggggtttcaatatgagtatcccgatgcccggacatcctgtcaatttttccagcgtcactctggagcaggctcggcgagacgtcgagcaacttgagcagctcatagaaagtcatgacgtggtattcctactcatggatacacgggaaagccgctggcttccagcggtgatcgccgcttccaaacgcaaattagtcatcaatgcggctctgggctttgatacttttgtagtgatgcgacatgggttgaaaaaaccaaaacagcagggggcaggagatctgtgtcctaatcaccccgtcgcctctgctgatttgttaggaagctccctcttcgcaaacattccagggtacaagttaggttgttacttctgcaatgatgtagttgcccctggcgattccacgcgagatcgtacccttgatcagcagtgcactgtatctagacccggacttgcggtaattgccggagcattagctgtcgagttgatggtttccgttttgcagcaccctgaaggagggtacgccatcgcatcctcatccgacgatcgcatgaatgagccacccacctctctgggccttgtgccccaccaaatccgcggatttctgagcaggttcgataatgtcctgccggtttcgctcgcattcgataagtgcacagcttgcagctccaaagtactggatcagtatgagagggaaggttttaacttcctggccaaggtgtttaactccagccacagctttctcgaggatttgaccgggctgaccctgctccaccaggagacccaggccgctgaaatctgggacatgtccgatgatgaaaccatctag

SEQ ID NO: 164567 - protein, 199 aa, Artificial Sequence
  derived and/or modified sequence
MALNGAEVDDFSWEPPTEAETKVLQARRERQDRISRLMGDYLLRGYRMLGETCADCGTILLQDKQRKIYCVACQELDSDVDKDNPALNAQAALSQAREHQLASASELPLGSRPAPQPPVPRPEHCEGAAAGLKAAQGPPAPAVPPNTDVMACTQTALLQKLTWASAELGSSTSLETSIQLCGLIRACAEALRSLQQLQH

SEQ ID NO: 164568 - DNA, 600 bp, Artificial Sequence
  derived and/or modified sequence
atggctcttaatggcgcagaggttgacgacttctcctgggaaccccctacagaagctgagacaaaggtactccaggcccgacgggagcgccaggacaggatctcaagactgatgggtgattatcttctgaggggataccgcatgctgggcgagacctgcgccgattgcggaacgatactcttgcaggacaaacaaagaaagatatattgcgtggcatgtcaggagctggattcagatgttgataaggacaaccccgcactgaatgcccaagctgccctttcacaagccagagagcaccagctggccagcgcttccgaacttcccctgggaagtaggccagcccctcagcctccggtgcctaggccagagcactgcgagggtgctgccgctggtcttaaggctgcccagggtccacctgccccagcagtccctcctaatactgacgtcatggcctgcactcagacggcactactgcagaagttaacctgggcctccgctgaactgggtagtagtacctctctggagaccagcatacagctgtgtggtctgatccgagcctgcgctgaagcgttaaggtctttacaacaactgcagcattag

SEQ ID NO: 164569 - DNA, 600 bp, Artificial Sequence
  derived and/or modified sequence
atggcgctgaacggggcagaagtggacgacttttcctgggaacctccgacagaagctgagactaaggtgttacaggccagaagagagcgccaggacagaatatctcgactaatgggggattacctcctgcgcgggtatcgaatgctcggggagacatgtgcagattgtggcacgatcctcttacaggataagcagcgcaagatatactgtgttgcttgtcaggagttagattcagacgtggataaggataacccagcacttaacgcacaagccgcgctgagccaagcccgcgaacaccagctggcaagcgccagcgaactgccactcggcagtcgacccgccccacagccccccgtccctaggcccgagcattgtgaaggagcagcggctggcctgaaagcagctcaaggacccccagctcccgccgtgccacccaatacggatgtcatggcttgtactcaaactgccctattgcaaaagttgacatgggcgtctgccgaactcggaagctctacctctctcgaaacctccatacagctttgtggcctgataagggcctgcgccgaagccttgcgctccctccagcagctgcaacactag

SEQ ID NO: 164570 - DNA, 600 bp, Artificial Sequence
  derived and/or modified sequence
atggccctcaacggcgcagaagtggatgatttttcatgggagccacctacagaggctgaaacaaaggtactgcaggcccgcagagaacgacaggatcggatttcccgcctcatgggcgattatttgctcaggggatatcgaatgctgggtgaaacctgtgcggactgcggcacaatactcctgcaggacaaacagagaaaaatttattgcgtcgcctgccaagaacttgactctgacgtggacaaagataatcctgccctcaatgcccaagctgccctttcccaggcccgagaacatcagctggcaagcgccagcgaactgccactcggcagtcgacccgccccacagccccccgtccctaggcccgagcattgtgaaggagcagcggctggcctgaaagcagctcaaggacccccagctcccgccgtgccacccaatacggatgtcatggcttgtactcaaactgccctattgcaaaagttgacatgggcgtctgccgaactcggaagctctacctctctcgaaacctccatacagctttgtggcctgataagggcctgcgccgaagccttgcgctccctccagcagctgcaacactag

SEQ ID NO: 164571 - DNA, 600 bp, Artificial Sequence
  derived and/or modified sequence
atggccctgaacggcgccgaggtggacgacttcagctgggagccccccaccgaggccgagaccaaggtgctgcaggccagaagagagagacaggacagaatcagcagactgatgggcgactacctgctgagaggctacagaatgctgggcgagacctgcgccgactgcggcaccatcctgctgcaggacaagcagagaaagatctactgcgtggcctgccaggagctggacagcgacgtggacaaggacaaccccgccctgaacgcccaggccgccctgagccaggccagagagcaccagctggccagcgccagcgagctgcccctgggcagcagacccgccccccagccccccgtgcccagacccgagcactgcgagggcgccgccgccggcctgaaggccgcccagggcccccccgcccccgccgtgccccccaacaccgacgtgatggcctgcacccagaccgccctgctgcagaagctgacctgggccagcgccgagctgggcagcagcaccagcctggagaccagcatccagctgtgcggcctgatcagagcctgcgccgaggccctgagaagcctgcagcagctgcagcactag

SEQ ID NO: 164572 - DNA, 698 bp, Artificial Sequence
  derived and/or modified sequence
cgcagcggagggcgctccgctttgacgtcacttcctgtgagcccggcggtgacaacggcaacatggccctgaacggagctgaagtcgacgacttctcctgggagcccccgactgaggcggagacgaaggtgctgcaggcgcgacgggagcggcaagatcgcatctcccggctcatgggcgactatctgctgcgcggttaccgcatgctgggcgagacgtgtgcggactgcgggacgatcctcctccaagacaaacagcggaaaatctactgcgtggcttgtcaggaactcgactcagacgtggataaagataatcccgctctgaatgcccaggctgccctctcccaagctcgggagcaccagctggcctcagcctcagagctccccctgggctctcgacctgcgccccagcccccagtacctcgtccggagcactgtgagggagctgcagcaggactcaaggcagcccaggggccacctgctcctgctgtgcctccaaatacagatgtcatggcctgcacacagacagccctcttgcagaagctgacctgggcctctgctgaactgggctctagcacctccctggagactagcatccagctgtgtggccttatccgcgcatgtgcggaggccctgcgcagcctgcagcagctacagcactaagagaagcccctgagaaaaaccctctagaaaaacagc

SEQ ID NO: 164573 - DNA, 600 bp, Artificial Sequence
  derived and/or modified sequence
atggccctgaatggcgccgaagtggatgacttctcatgggaacctcctaccgaggctgagaccaaagtgctgcaggctcgccgagagcgccaggatcgcatttctaggctcatgggggactacctgttgagagggtatcgtatgttaggagagacatgcgccgattgcggtactatattgctacaggacaaacagaggaagatctactgtgtcgcctgccaggagctggactctgacgtggataaagataatccagccttaaatgctcaggccgcactgtcacaggcacgggaacatcaactcgcgtccgccagcgaactgcctttgggctcaagacccgctccgcagcccccggtgccaagacctgaacactgcgagggtgcagctgcaggattgaaggcagcccaggggccgcccgcccccgcggttccaccaaataccgacgtgatggcgtgcacgcagacggccctcctgcagaaactcacctgggcatccgccgaactggggagctcaacaagcctggagacatctattcaattgtgtgggctcatccgggcctgtgcagaggctctgcgtagcttgcagcagctgcagcattag

SEQ ID NO: 164574 - DNA, 600 bp, Artificial Sequence
  derived and/or modified sequence
atggccctgaatggagctgaggtggatgacttctcctgggagcccccaacagaagctgagaccaaggtgctgcaggcccggcgggagcggcaggaccgcatcagccggctgatgggagactacctgctgcggggctacaggatgctgggggagacctgtgccgactgtggcaccatcctgctgcaggacaagcagaggaagatctactgtgtggcctgccaggagctggacagtgatgtggacaaggacaacccagccctgaatgcccaggccgccctgagccaggcccgggagcaccagctggccagcgccagcgagctgcccctgggcagcaggcctgccccccagccccctgtgcccaggcctgagcactgtgagggcgctgctgctggcctgaaggccgcccagggccccccagccccagctgtgccccccaacacagatgtgatggcctgcacccagacagccctgctgcagaagctgacctgggccagcgctgagctgggcagcagcaccagcctggagaccagcatccagctgtgtggcctcatccgggcctgtgccgaggccctgcggagcctgcagcagctgcagcactag

SEQ ID NO: 164575 - DNA, 600 bp, Artificial Sequence
  derived and/or modified sequence
atggccctgaacggcgccgaggtggacgacttcagctgggagccccccaccgaagctgagactaaggtcctgcaggccagaagggagagacaggacaggatcagcagattaatgggggattacttactgcggggctatagaatgctcggcgaaacatgcgccgactgcggcactattctcttgcaagataagcagagaaaaatctattgcgtcgcctgtcaggaacttgattcggacgtggataaggataatcctgcccttaatgctcaggcggcacttagccaagcccgggagcaccagttggccagtgccagtgaactccctttgggatcaaggccagcaccgcagccacccgttcctagacccgaacattgcgaaggcgctgcagcgggacttaaggcagcccaggggccacccgcccctgctgttccaccaaatacagacgtgatggcatgtacccagaccgctctgctccagaagttgacatgggcttccgcagaattaggctcttccactagcctggaaaccagtattcagctgtgcggattgatccgggcttgcgccgaagctttgcggtcactacagcaactgcaacactag

SEQ ID NO: 164576 - RNA, 600 nt, Artificial Sequence
  derived and/or modified sequence
auggcgcugaacggggcagaaguggacgacuuuuccugggaaccuccgacagaagcugagacuaagguguuacaggccagaagagagcgccaggacagaauaucucgacuaaugggggauuaccuccugcgcggguaucgaaugcucggggagacaugugcagauuguggcacgauccucuuacaggauaagcagcgcaagauauacuguguugcuugucaggaguuagauucagacguggauaaggauaacccagcacuuaacgcacaagccgcgcugagccaagcccgcgaacaccagcuggcaagcgccagcgaacugccacucggcagucgacccgccccacagccccccgucccuaggcccgagcauugugaaggagcagcggcuggccugaaagcagcucaaggacccccagcucccgccgugccacccaauacggaugucauggcuuguacucaaacugcccuauugcaaaaguugacaugggcgucugccgaacucggaagcucuaccucucucgaaaccuccauacagcuuuguggccugauaagggccugcgccgaagccuugcgcucccuccagcagcugcaacacuag

SEQ ID NO: 164577 - RNA, 600 nt, Artificial Sequence
  derived and/or modified sequence
auggcccucaacggcgcagaaguggaugauuuuucaugggagccaccuacagaggcugaaacaaagguacugcaggcccgcagagaacgacaggaucggauuucccgccucaugggcgauuauuugcucaggggauaucgaaugcugggugaaaccugugcggacugcggcacaauacuccugcaggacaaacagagaaaaauuuauugcgucgccugccaagaacuugacucugacguggacaaagauaauccugcccucaaugcccaagcugcccuuucccaggcccgagaacaucagcuggcaagcgccagcgaacugccacucggcagucgacccgccccacagccccccgucccuaggcccgagcauugugaaggagcagcggcuggccugaaagcagcucaaggacccccagcucccgccgugccacccaauacggaugucauggcuuguacucaaacugcccuauugcaaaaguugacaugggcgucugccgaacucggaagcucuaccucucucgaaaccuccauacagcuuuguggccugauaagggccugcgccgaagccuugcgcucccuccagcagcugcaacacuag

SEQ ID NO: 164578 - protein, 299 aa, Artificial Sequence
  derived and/or modified sequence
MDLSELERDNTGRCRLSSPVPAVCRKEPCVLGVDEAGRGPVLGPMVYAICYCPLPRLADLEALKVADSKTLLESERERLFAKMEDTDFVGWALDVLSPNLISTSMLGRVKYNLNSLSHDTATGLIQYALDQGVNVTQVFVDTVGMPETYQARLQQSFPGIEVTVKAKADALYPVVSAASICAKVARDQAVKKWQFVEKLQDLDTDYGSGYPNDPKTKAWLKEHVEPVFGFPQFVRFSWRTAQTILEKEAEDVIWEDSASENQEGLRKITSYFLNEGSQARPRSSHRYFLERGLESATSL

SEQ ID NO: 164579 - DNA, 900 bp, Artificial Sequence
  derived and/or modified sequence
atggacctgagcgagctggagagagacaacaccggcagatgcagactgagcagccccgtgcccgccgtgtgcagaaaggagccctgcgtgctgggcgtggacgaggccggcagaggccccgtgctgggccccatggtgtacgccatctgctactgccccctgcccagactggccgacctggaggccctgaaggtggccgacagcaagaccctgctggagagcgagagagagagactgttcgccaagatggaggacaccgacttcgtgggctgggccctggacgtgctgagccccaacctgatcagcaccagcatgctgggcagagtgaagtacaacctgaacagcctgagccacgacaccgccaccggcctgatccagtacgccctggaccagggcgtgaacgtgacccaggtgttcgtggacaccgtgggcatgcccgagacctaccaggccagactgcagcagagcttccccggcatcgaggtgaccgtgaaggccaaggccgacgccctgtaccccgtggtgagcgccgccagcatctgcgccaaggtggccagagaccaggccgtgaagaagtggcagttcgtggagaagctgcaggacctggacaccgactacggcagcggctaccccaacgaccccaagaccaaggcctggctgaaggagcacgtggagcccgtgttcggcttcccccagttcgtgagattcagctggagaaccgcccagaccatcctggagaaggaggccgaggacgtgatctgggaggacagcgccagcgagaaccaggagggcctgagaaagatcaccagctacttcctgaacgagggcagccaggccagacccagaagcagccacagatacttcctggagagaggcctggagagcgccaccagcctgtag

SEQ ID NO: 164580 - DNA, 900 bp, Artificial Sequence
  derived and/or modified sequence
atggacctgtctgagttggagcgggataatacggggcgctgccgactgtcctcacctgtgccggcggtgtgccgcaaagagccctgcgtgttgggtgtcgacgaggctggtcgtggccccgttctcggacctatggtgtatgccatttgttactgccctctacccaggctggcagatttagaggcactgaaagtcgctgatagtaaaacattgctggaaagcgagagagagcggctgttcgctaagatggaagacaccgacttcgtggggtgggccctcgatgtgctttccccaaatctcatcagcacctctatgctgggcagggtgaaatacaatcttaacagcctgagtcacgatactgccaccggtctcatccagtatgcccttgatcagggagtgaatgtaactcaagttttcgtggacacagtgggcatgcccgaaacgtatcaggcccgactgcagcaatcttttcctggcatcgaggtgaccgtgaaggcaaaggcagatgccctgtatcccgtggtaagcgccgcaagtatttgcgccaaggttgcccgggaccaggccgtgaaaaaatggcagttcgtggaaaagctccaggatctcgataccgattatgggtcaggctatccaaacgatccgaaaaccaaagcctggctaaaggagcacgtggagcccgtctttggatttcctcagttcgttcggttctcctggcgaactgctcagactattctcgagaaggaggctgaagatgtgatttgggaagattctgcgtctgagaaccaggaaggactgcggaaaattaccagctacttcctgaatgagggttcacaggctaggccaaggagtagtcacaggtactttctggaacgtggtttggaaagcgcaaccagcctttag

SEQ ID NO: 164581 - DNA, 900 bp, Artificial Sequence
  derived and/or modified sequence
atggacctgtctgagctggagcgggacaacacaggccgctgccgcctgagcagccctgtgcctgctgtgtgcaggaaggagccctgtgtgctgggcgtggatgaggccggccggggccctgtgctgggccccatggtgtatgccatctgctactgccccctgccccggctggccgacctggaggccctgaaggtggccgacagcaagaccctgctggagagcgagcgggagcggctgtttgccaagatggaggacacagactttgtgggctgggccctggatgtgctgagccccaacctgatcagcacctccatgctgggccgggtgaagtacaacctgaacagcctgagccatgacacagccaccggcctcatccagtatgccctggaccagggcgtgaatgtgacccaggtgtttgtggacacagtgggcatgcctgagacctaccaggcccggctgcagcagagcttccctggcatcgaggtgacagtgaaggccaaggcagatgccctgtaccctgtggtgtctgctgccagcatctgtgccaaggtggcccgggaccaggccgtgaagaagtggcagtttgtggagaagctgcaggacctggacacagattatggcagcggctacccaaatgaccccaagaccaaggcctggctgaaggagcacgtggagcctgtgtttggcttcccccagtttgtgcgcttctcctggaggacagcccagaccatcctggagaaggaggccgaggatgtgatctgggaggacagcgccagcgagaaccaggagggcctgaggaagatcaccagctacttcctgaatgaaggcagccaggcccggcccaggagcagccaccgctacttcctggagcggggcctggagagcgccaccagcctgtag

SEQ ID NO: 164582 - DNA, 900 bp, Artificial Sequence
  derived and/or modified sequence
atggacctgagcgagctggagcgggacaacaccggccggtgccggctttcttcaccagtccctgccgtctgccgaaaggaaccctgcgtgttgggagtggatgaggcgggcagaggacctgttctggggcccatggtgtatgcaatctgttactgcccccttcctcgcctggctgacctcgaagctctgaaggtcgctgacagcaaaacgctcctggagagcgagagggagagacttttcgccaagatggaggacacagacttcgtagggtgggcactggacgtactgagccccaacttgatctctacatccatgctaggccgggtgaaatacaacctcaacagcctgagccacgacaccgccaccggccttatacagtatgctctcgatcaaggagtaaacgttactcaggtgttcgttgataccgtcggaatgcctgaaacctatcaggcgaggctgcagcagtccttccctgggattgaggttaccgtgaaagcaaaggcagacgctctctacccagtggtgtctgccgcctcgatttgcgccaaagtggcccgggatcaggcagtaaaaaagtggcagttcgtcgagaaactccaggaccttgacacagactatggatcaggttaccctaacgacccaaagactaaggcctggctaaaggaacatgttgaacccgtctttgggtttccccagtttgtgagattttcatggcgtaccgctcagactatcttagaaaaggaggcggaggatgttatctgggaagattcagcttctgagaatcaggaaggcctgcggaagatcacatcttactttctcaacgagggctctcaagcaagaccgagatcttctcaccggtatttcctggaacgcggattggagtcagcgacaagcctctag

SEQ ID NO: 164583 - DNA, 900 bp, Artificial Sequence
  derived and/or modified sequence
atggacctctcagagctggaacgtgataacaccggccgttgtaggctgtcctcaccagtgcccgcagtgtgccgtaaagagccttgtgtcctgggagttgatgaagctggccgagggcctgtgctcgggcctatggtctacgctatctgctactgcccactgcctagactggctgacttagaagcccttaaggtggcagattctaaaaccttgctcgaaagtgagcgcgagagattgttcgcgaaaatggaagacacagattttgtaggatgggcccttgatgttctgtctcccaatttaatctccacttcaatgctgggacgggtcaaatacaaccttaactctctctctcatgacactgccactggccttatccagtatgccctagatcagggggtgaacgtcacacaggtgtttgtcgatacggtgggcatgcccgagacgtatcaggcacgtctccagcaatcttttcccggaatcgaggtgacagtgaaggctaaagccgacgctctctatccagtggttagcgcggcaagcatttgcgctaaggtggctcgggatcaagccgtgaagaagtggcaatttgttgagaagttgcaggatttggatactgattacgggtcaggctaccccaacgaccccaaaacgaaggcctggctgaaagaacatgtggaacctgtctttgggtttccccagtttgtgaggttctcctggaggactgctcagactatcctggagaaggaagccgaagatgtcatctgggaggattctgcttcagagaaccaggagggcctccgtaagattacgtcttatttcctgaacgaggggagccaagccaggccacgttcctcccacagatacttcctggagagaggactagaaagcgctactagtctctag

SEQ ID NO: 164584 - DNA, 1142 bp, Artificial Sequence
  derived and/or modified sequence
gcgccgagacccgctcctgcagtattagttcttgcagctggtggtggcggctgaggcggcatggatctcagcgagctggagagagacaatacaggccgctgtcgcctgagttcgcctgtgcccgcggtgtgccgcaaggagccttgcgtcctgggcgtcgatgaggcgggcaggggccccgtgctgggccccatggtctacgccatctgttattgtcccctgcctcgcctggcagatctggaggcgctgaaagtggcagactcaaagaccctattggagagcgagcgggaaaggctgtttgcgaaaatggaggacacggactttgtcggctgggcgctggatgtgctgtctccaaacctcatctctaccagcatgcttgggcgggtcaaatacaacctgaactccctgtcacatgatacagccactgggcttatacagtatgcattggaccagggcgtgaacgtcacccaggtattcgtggacaccgtagggatgccagagacataccaggcgcggctgcagcaaagttttcccgggattgaggtgacggtcaaggccaaagcagatgccctctacccggtggttagtgctgccagcatctgtgccaaggtggcccgggaccaggccgtgaagaaatggcagttcgtggagaaactgcaggacttggatactgattatggctcaggctaccccaatgatcccaagacaaaagcgtggttgaaggagcacgtggagcctgtgttcggcttcccccagtttgtccggttcagctggcgcacggcccagaccatcctggagaaagaggcggaagatgttatatgggaggactcagcatccgagaatcaggagggactcaggaagatcacatcctacttcctcaatgaagggtcccaagcccgtccccgttcttcccaccgatatttcctggaacgcggcctggagtcagcaaccagcctctagcagctgcctctacgcgctctacctgcttccccaacccagacattaaaattgtttaaggagaaccacacgtaggggatgtacttttgggacagaagcaaggtgggagtgtgctctgcagccgggtccagctacttccttttggaaccttaaatagaatgggtgttggttgattaattttattt

SEQ ID NO: 164585 - protein, 165 aa, Artificial Sequence
  derived and/or modified sequence
MAPNASCLCVHVRSEEWDLMTFDANPYDSVKKIKEHVRSKTKVPVQDQVLLLGSKILKPRRSLSSYGIDKEKTIHLTLKVVKPSDEELPLFLVESGDEAKRHLLQVRRSSSVAQVKAMIETKTGIIPETQIVTCNGKRLEDGKMMADYGIRKGNLLFLACYCIGG

SEQ ID NO: 164586 - protein, 165 aa, Artificial Sequence
  derived and/or modified sequence
MAPNASCLCVHVRSEEWDLMTFDANPYDSVKKIKEHVRSKTKVPVQDQVLLLGSKILKPRRSLSSYGIDKEKTIHLTLKVVKPSDEELPLFLVESGDEAKRHLLQVRRSSSVAQVKAMIETKTGIIPETQIVTCNGKRLEDGKMMADYGIRKGNLLFLASYCIGG

SEQ ID NO: 164587 - protein, 165 aa, Artificial Sequence
  derived and/or modified sequence
MAPNASCLCVHVRSEEWDLMTFDANPYDSVKKIKEHVRSKTKVPVQDQVLLLGSKILKPRRSLSSYGTDKEKTIHLTLKVVKPSDEELPLFLVESGDEAKRHLLQVRRSSSVAQVKAMIETKTGIIPETQIVTCNGKRLEDGKMMADYGIRKGNLLFLASYCIGG

SEQ ID NO: 164588 - DNA, 498 bp, Artificial Sequence
  derived and/or modified sequence
atggcccccaacgccagctgcctgtgcgtgcacgtgagaagcgaggagtgggacctgatgaccttcgacgccaacccctacgacagcgtgaagaagatcaaggagcacgtgagaagcaagaccaaggtgcccgtgcaggaccaggtgctgctgctgggcagcaagatcctgaagcccagaagaagcctgagcagctacggcatcgacaaggagaagaccatccacctgaccctgaaggtggtgaagcccagcgacgaggagctgcccctgttcctggtggagagcggcgacgaggccaagagacacctgctgcaggtgagaagaagcagcagcgtggcccaggtgaaggccatgatcgagaccaagaccggcatcatccccgagacccagatcgtgacctgcaacggcaagagactggaggacggcaagatgatggccgactacggcatcagaaagggcaacctgctgttcctggcctgctactgcatcggcggctag

SEQ ID NO: 164589 - DNA, 498 bp, Artificial Sequence
  derived and/or modified sequence
atggcccccaacgccagctgcctgtgcgtgcacgtgagaagcgaggagtgggacctgatgaccttcgacgccaacccctacgacagcgtgaagaagatcaaggagcacgtgagaagcaagaccaaggtgcccgtgcaggaccaggtgctgctgctgggcagcaagatcctgaagcccagaagaagcctgagcagctacggcatcgacaaggagaagaccatccacctgaccctgaaggtggtgaagcccagcgacgaggagctgcccctgttcctggtggagagcggcgacgaggccaagagacacctgctgcaggtgagaagaagcagcagcgtggcccaggtgaaggccatgatcgagaccaagaccggcatcatccccgagacccagatcgtgacctgcaacggcaagagactggaggacggcaagatgatggccgactacggcatcagaaagggcaacctgctgttcctggccagctactgcatcggcggctag

SEQ ID NO: 164590 - DNA, 498 bp, Artificial Sequence
  derived and/or modified sequence
atggcccccaacgccagctgcctgtgcgtgcacgtgagaagcgaggagtgggacctgatgaccttcgacgccaacccctacgacagcgtgaagaagatcaaggagcacgtgagaagcaagaccaaggtgcccgtgcaggaccaggtgctgctgctgggcagcaagatcctgaagcccagaagaagcctgagcagctacggcaccgacaaggagaagaccatccacctgaccctgaaggtggtgaagcccagcgacgaggagctgcccctgttcctggtggagagcggcgacgaggccaagagacacctgctgcaggtgagaagaagcagcagcgtggcccaggtgaaggccatgatcgagaccaagaccggcatcatccccgagacccagatcgtgacctgcaacggcaagagactggaggacggcaagatgatggccgactacggcatcagaaagggcaacctgctgttcctggccagctactgcatcggcggctag

SEQ ID NO: 164591 - DNA, 498 bp, Artificial Sequence
  derived and/or modified sequence
atggcacccaatgctagttgcctctgtgtgcatgtgaggtcagaagaatgggaccttatgacctttgacgcaaatccctatgattcggtgaagaagatcaaggaacacgttagatctaaaaccaaagtgccagtccaggaccaggtgctgctacttggcagcaagatccttaaacctagacggagcctctcaagttacggaatcgacaaagagaagaccattcatttgacccttaaagttgtcaagccatccgatgaagagttaccattatttctggtggaatccggggacgaggccaaaagacacctcttgcaggtccgcaggtcatctagcgtagcgcaagtgaaagctatgatcgaaacgaagacaggaatcatacccgagacacaaattgtgacttgtaacgggaagcgactagaggacgggaagatgatggctgattacggaatccggaaaggcaatctgctgtttctggcctgctattgcattggcggatag

SEQ ID NO: 164592 - DNA, 498 bp, Artificial Sequence
  derived and/or modified sequence
atggcgccaaatgcaagttgcctgtgtgtccacgtgcgatccgaggagtgggacctgatgacttttgacgccaacccatacgactccgtgaaaaagattaaagagcatgtcaggagcaagaccaaggtgccagtgcaggaccaggtgttactgctggggtccaagatattaaagccccggagaagcctaagctcctatggtatagacaaggagaaaacaatccacttgactttaaaggtcgtcaaaccctctgatgaggagctccccctttttctggtggagtccggcgacgaagccaagcggcacctgctacaggtaaggaggtccagctccgtggctcaggtaaaagccatgattgagaccaagaccggtattatcccagagacacaaatcgtgacctgtaatgggaagcgacttgaggatggaaagatgatggccgactacggtatcaggaaggggaatctgctcttccttgccagctattgcattgggggctag

SEQ ID NO: 164593 - DNA, 498 bp, Artificial Sequence
  derived and/or modified sequence
atggcaccgaatgcgtcttgcttgtgcgttcatgtgaggtccgaagaatgggacttgatgacgttcgacgccaacccatacgatagcgtgaaaaagatcaaagaacacgtccgctctaaaactaaggtgccagtccaggaccaagtgctcctgctggggagcaagatactcaagcctagacggtccctgagctcttatggcaccgataaggagaaaacaattcacctgaccctgaaagtcgtgaaaccgtctgacgaggaattgcctctgtttctggtcgaaagcggcgatgaagcgaaacggcaccttttgcaagtgcggcgatctagttcagtggcgcaagtaaaagctatgattgaaactaagacaggcattattcccgaaacacagattgtcacttgtaacggaaagcgcctggaggacgggaaaatgatggccgactacggcattcggaagggaaatctgttatttctcgcctcctattgcattggaggatag

SEQ ID NO: 164594 - DNA, 498 bp, Artificial Sequence
  derived and/or modified sequence
atggctcccaacgcctcctgcctgtgtgtccacgtcagatctgaggagtgggacctcatgacttttgacgcaaacccttacgattcagtgaagaagatcaaggagcacgtccggtcaaaaacaaaggtgccggtccaagatcaggtgctattactgggaagtaagattctgaaaccacggagatccctgagttcatacggtacagacaaggagaagaccattcaccttacactcaaggtggtcaagccctcagacgaagagctgcctctcttcctggtcgaatcaggagatgaagccaagcggcacctgttacaggtcagacgcagttctagcgtcgctcaggtgaaagccatgatagagaccaaaactggtatcattccagagacccagattgtgacatgtaacggcaagagacttgaagacgggaagatgatggctgactacggcatccggaagggtaacctgttattcttagcctcctattgcattgggggctag

SEQ ID NO: 164595 - DNA, 498 bp, Artificial Sequence
  derived and/or modified sequence
atggcgcctaacgcttcatgtttgtgtgtgcatgtcagatctgaggagtgggatcttatgaccttcgacgccaacccatacgatagtgtgaagaagatcaaggagcatgtccgatcaaagacgaaagtccccgtgcaagaccaggtgttgctcctgggatcaaagattctcaagcctagaagatccctctcctcttatgggattgacaaagagaagacaatccacctgactctgaaggtggttaagccgtctgacgaagagctgccgctttttctggtcgaatcaggagatgaggccaaacgacacctgcttcaggtgcggagaagttcatcagtcgctcaggtgaaggcaatgattgaaaccaaaactgggatcatcccagagacacagattgtcacctgcaacgggaagagattggaagatgggaaaatgatggctgattatgggatccggaaagggaatctgctcttcctggcatgttactgcattggcggctag

SEQ ID NO: 164596 - DNA, 498 bp, Artificial Sequence
  derived and/or modified sequence
atggcacctaatgcatcatgtttgtgtgtgcacgtcaggtcagaggaatgggacctcatgactttcgacgcaaacccatatgattcggtcaagaaaattaaggagcacgttaggtcaaaaacgaaggtcccagttcaggatcaggtgctgctgttggggtcgaaaatcctgaaaccaaggcgatcattgtcatcttacggaactgacaaagagaaaaccatccatttgacccttaaagtggtaaagccaagtgatgaggagctccccctctttctggtggaaagcggcgatgaagctaaacgtcaccttctacaagtacggagatcttctagtgttgcacaggtcaaggctatgattgaaactaagaccgggataatcccggagacccagattgtgacttgcaacgggaagaggttggaggatggcaagatgatggccgattacggcatccggaagggaaaccttctctttctggcatcatactgcatagggggctag

SEQ ID NO: 164597 - DNA, 498 bp, Artificial Sequence
  derived and/or modified sequence
atggccccaaacgcttcctgtctgtgcgtacatgtgaggagtgaggagtgggacctgatgacattcgacgccaatccatacgacagcgttaagaagatcaaggaacacgtgcggtcaaagactaaagtcccagttcaggatcaggtgttactgctgggatccaagatactaaagccaagacgttctttgtcctcctacggaatcgataaggaaaagaccattcatcttaccctcaaggtggtcaaaccaagtgacgaagaactgccactgttccttgtggagtccggagacgaagctaagcgtcacctgctgcaggttaggagaagctccagcgtcgcccaagtgaaggcgatgatcgaaacaaaaacggggataattcccgagacccagatagtaacatgcaatggcaagagactggaagacggtaaaatgatggccgactacggcatccgcaaaggcaatttattgtttctggccagttactgtatcggcgggtag

SEQ ID NO: 164598 - DNA, 498 bp, Artificial Sequence
  derived and/or modified sequence
atggccccaaatgccagctgcctgtgtgtgcacgtgcgctctgaggagtgggacctgatgacctttgatgccaacccctatgattctgtgaagaagatcaaggagcacgtgcgcagcaagaccaaggtgcctgtgcaggaccaggtgctgctgctgggcagcaagatcctgaagccccggcgcagcctgagcagctatggcatcgacaaggagaagaccatccacctgaccctgaaggtggtgaagcccagtgatgaggagctgcccctcttcctggtggagagcggagatgaggccaagaggcacctgctgcaggtgagaagaagcagctctgtggcccaggtgaaggccatgattgagaccaagacaggcatcatccctgagacccagatcgtgacctgcaatggcaagaggctggaggatggcaagatgatggctgactatggcatcaggaagggcaacctgctcttcctggcctgctactgcattggaggatag

SEQ ID NO: 164599 - DNA, 498 bp, Artificial Sequence
  derived and/or modified sequence
atggccccaaatgccagctgcctgtgtgtgcacgtgcgctctgaggagtgggacctgatgacctttgatgccaacccctatgattctgtgaagaagatcaaggagcacgtgcgcagcaagaccaaggtgcctgtgcaggaccaggtgctgctgctgggcagcaagatcctgaagccccggcgcagcctgagcagctatggcatcgacaaggagaagaccatccacctgaccctgaaggtggtgaagcccagtgatgaggagctgcccctcttcctggtggagagcggagatgaggccaagaggcacctgctgcaggtgagaagaagcagctctgtggcccaggtgaaggccatgattgagaccaagacaggcatcatccctgagacccagatcgtgacctgcaatggcaagaggctggaggatggcaagatgatggctgactatggcatcaggaagggcaacctgctcttcctggccagctactgcattggaggatag

SEQ ID NO: 164600 - DNA, 498 bp, Artificial Sequence
  derived and/or modified sequence
atggccccaaatgccagctgcctgtgtgtgcacgtgcgctctgaggagtgggacctgatgacctttgatgccaacccctatgattctgtgaagaagatcaaggagcacgtgcgcagcaagaccaaggtgcctgtgcaggaccaggtgctgctgctgggcagcaagatcctgaagccccggcgcagcctgagcagctatggaacagacaaggagaagaccatccacctgaccctgaaggtggtgaagcccagtgatgaggagctgcccctcttcctggtggagagcggagatgaggccaagaggcacctgctgcaggtgagaagaagcagctctgtggcccaggtgaaggccatgattgagaccaagacaggcatcatccctgagacccagatcgtgacctgcaatggcaagaggctggaggatggcaagatgatggctgactatggcatcaggaagggcaacctgctcttcctggccagctactgcattggaggatag

SEQ ID NO: 164601 - DNA, 498 bp, Artificial Sequence
  derived and/or modified sequence
atggcccccaacgccagctgcctgtgcgtgcacgtgcggagcgaggagtgggacctgatgactttcgacgcaaacccatatgatagcgtgaagaaaataaaggagcatgtacgttcaaagactaaagtaccagtgcaagatcaggtgctcttgctgggttccaagatccttaagcctcgtcgctccttgtcctcctacggaatcgacaaggaaaagacaattcatctgactttgaaagtcgtaaaaccatccgatgaagagctccctttgtttctagtcgagagcggcgatgaggccaagcgccacctcctgcaagttaggcggtcctctagcgtcgcccaggtgaaggctatgatcgaaacaaaaacaggcattatccctgagacccagatagtgacatgtaatggcaaaagactagaggatgggaaaatgatggccgactacgggattcgtaagggcaaccttctgttcctcgcatgttactgcattggcgggtag

SEQ ID NO: 164602 - DNA, 498 bp, Artificial Sequence
  derived and/or modified sequence
atggcccccaacgccagctgcctgtgcgtgcacgtgcggagcgaggagtgggacctgatgaccttcgatgcaaatccgtacgattcagttaagaagattaaagagcatgtgagaagcaaaacgaaagtgcccgtccaggatcaggtgttgctgctgggcagtaaaatcttgaagccacgccgctctctaagctcatacggaatcgacaaggagaagactatacaccttactttaaaagtcgtaaagcctagtgatgaagagctacccctgtttctagtggagtcaggagacgaggccaagcggcatttgctgcaggttagaagaagctcatctgtggcccaggtaaaggcaatgattgagactaaaacaggaattattccagagacccagatagtgacatgtaacgggaaaaggctagaagacggcaagatgatggccgactacggcatccggaagggtaacctgctctttctggcatcatactgcatcggcggctag

SEQ ID NO: 164603 - DNA, 498 bp, Artificial Sequence
  derived and/or modified sequence
atggcccccaacgccagctgcctgtgcgtgcacgtgcggagcgaggagtgggatttaatgacttttgatgctaatccttatgattctgtgaaaaaaatcaaagaacatgtacgttccaaaaccaaggtccctgtgcaggatcaggtactgctgctgggttcaaaaattctgaaacctcgaagaagtttaagctcatacggaaccgataaagagaagactatccatctaaccctcaaagtggtgaagcctagtgacgaggaactgccgctgttcctcgtggagtctggagatgaggccaaaaggcatctgttgcaggtccgccggtcctcctctgtggcgcaggtgaaagcgatgatcgaaacgaaaacaggaattatccccgagacgcaaattgtcacctgtaacggcaagcggttggaagacggcaagatgatggcagactacggcattcgcaaaggcaatctgctcttccttgcctcctattgtatcgggggttag

SEQ ID NO: 164604 - DNA, 498 bp, Artificial Sequence
  derived and/or modified sequence
atggcccccaacgccagctgcctgtgcgtgcacgtgcggagcgaggagtgggacctgatgaccttcgacgcaaacccatacgattctgtgaaaaagattaaagaacacgtgcgctcaaagactaaggtgccagtccaggaccaagtgttgctcttgggcagtaaaatcttaaagcctagacgctcattaagcagctacgggacagataaggaaaaaacaatccatctaacactaaaggtggtgaagccttcagatgaagagttgccactgttcctggtcgaaagtggcgatgaggctaagcggcatctgctacaggtgcggagatcatcttccgtggcccaggtgaaggcaatgattgagactaagactgggatcataccagagacccagattgttacctgtaatggcaaaaggctcgaggacgggaaaatgatggccgattatggaatcaggaagggaaacctgctgttccttgcctcctactgtattggagggtag

SEQ ID NO: 164605 - DNA, 498 bp, Artificial Sequence
  derived and/or modified sequence
atggcccccaacgccagctgcctgtgcgtgcacgtgcggagcgaggaatgggacttgatgacattcgacgcaaatccctacgattcagtgaagaagattaaagagcacgtccgctcaaaaactaaagtacccgtccaggatcaggttttgctgctcggctcaaaaatcttgaaaccccgaaggtcgttatcatcttacgggattgataaggagaagactatccatctgacactgaaggtagtaaagcccagtgatgaggagctgccccttttcctggttgaaagtggtgacgaagctaagagacaccttctccaggttaggagatcgtcaagcgtcgcgcaggtcaaggccatgatagagacaaagacaggtatcatccccgagacccagattgttacctgtaacggtaagcggctagaagatggcaaaatgatggcggattacggcataagaaagggcaatcttttattcctagcttgttactgcatcgggggctag

SEQ ID NO: 164606 - DNA, 498 bp, Artificial Sequence
  derived and/or modified sequence
atggcccccaacgccagctgcctgtgcgtgcacgtgcggagcgaggagtgggatcttatgacattcgatgccaacccatacgacagcgttaaaaagatcaaagaacacgtccgcagcaaaactaaggtccccgtccaggaccaagttttactgctaggttccaaaattcttaagccacggagaagcctgtcatcttacggaaccgataaggagaagactatccatttgaccctgaaggtggtcaaaccttccgatgaagagctgcccctgttcttggtggagtcgggggacgaagcgaagcggcacctgctccaggtgagacgatcatctagtgtggcccaggtgaaggcaatgatcgagaccaaaaccgggattatacctgaaactcagatcgtgacatgtaacggcaagagactcgaggacggcaaaatgatggcagactatggaatccgcaagggcaatctgctgtttctggcatcatactgcatcggtggctag

SEQ ID NO: 164607 - DNA, 498 bp, Artificial Sequence
  derived and/or modified sequence
atggcccccaacgccagctgcctgtgcgtgcacgtgcggagcgaggagtgggacctgatgaccttcgatgccaatccatacgactccgtgaagaaaattaaagaacacgtgcggagcaagacaaaggtaccggtccaggaccaagttctgctgctcgggagcaagatcctgaaaccacgccgaagtttgtcctcttatggcatcgataaggagaagaccatccacctgacacttaaggttgttaagcctagcgacgaagagctccccctctttctcgtggagtccggagacgaggctaaaaggcacttactccaggtgagaaggtcatccagtgtcgcgcaagttaaagcaatgattgagacgaaaactgggattatccccgagacacagatagtcacgtgcaacggtaagaggctggaagacggaaagatgatggccgactatggcataagaaagggcaacctgctcttccttgcatcatattgcatcggcggctag

SEQ ID NO: 164608 - DNA, 498 bp, Artificial Sequence
  derived and/or modified sequence
atggccccaaacgcaagctgcctttgtgtgcatgtgagaagtgaggaatgggacctgatgacattcgacgcaaatccgtacgattccgtgaagaaaattaaggaacacgtgaggtcaaaaacgaaggtgccagtacaggaccaggtcctgctactgggaagcaaaatcctcaagcctcggcgttcactgtcttcatacggcatcgacaaggaaaagactatccacctgactttaaaggtggtgaagccaagcgacgaagagttgcccctgtttctggttgaatcaggcgacgaggccaagcggcatcttctgcaggtcaggcgttcaagttctgtggctcaggtcaaggcaatgatcgagaccaagactgggatcattcctgaaacccagatcgtgacttgcaacgggaaacggctcgaagacggcaagatgatggccgattatggtatccgcaaagggaatctcctctttttggcgtgctactgtattggcggatag

SEQ ID NO: 164609 - DNA, 498 bp, Artificial Sequence
  derived and/or modified sequence
atggcacccaatgccagttgtctttgtgtgcacgtgaggtctgaagaatgggacctaatgacgttcgatgctaatccctatgactccgtcaagaaaatcaaagaacatgtgagaagtaagaccaaagtcccggtgcaggaccaggtcctgcttctgggatccaaaatccttaagcctcggaggtcactgtcatcatatggaatcgacaaggagaaaaccatccatctaactctgaaagtcgttaaaccgagcgatgaggaactgccattgttcctcgtggaatcaggggacgaggccaagcggcacctgctccaggttaggcgatcttcttctgtggcgcaagtcaaggcaatgattgagacaaaaactgggatcatccctgaaacacagatcgttacctgtaacggcaagcggttagaagatggaaaaatgatggccgactatggaatcagaaaggggaacttactatttctcgctagctactgtattgggggatag

SEQ ID NO: 164610 - DNA, 498 bp, Artificial Sequence
  derived and/or modified sequence
atggctccaaatgcctcgtgcctgtgcgtccatgtacggtcagaagagtgggatctgatgacctttgatgctaacccctacgattctgtgaaaaagatcaaggaacatgtgcggtcaaagaccaaagtccccgtgcaagaccaggtccttctcctgggctccaagatcctaaaacccagacgctcactgagctcatatggcacagacaaagaaaagactattcacctgactctcaaggtggtgaagccttctgacgaggaattgcccctctttcttgtggagagcggagatgaagcgaagcggcatctgctgcaagtgcggaggtcttcttctgtcgcccaagtgaaagctatgatcgaaacaaagacagggattatccctgagacccagatcgtcacttgcaacggtaaaagacttgaagatgggaagatgatggccgattatggtatccggaaaggaaacctgctcttcctggcatcctactgcatcgggggatag

SEQ ID NO: 164611 - DNA, 498 bp, Artificial Sequence
  derived and/or modified sequence
atggcgcctaatgcgagctgcctgtgtgtccacgttcggtctgaggaatgggatctgatgacctttgatgcaaacccctacgactcagtcaaaaagatcaaggagcacgtaaggagtaagaccaaagtaccagtgcaggaccaggtccttctactcgggtccaagattctgaagccccgaagatctctctcgtcctacggaactgataaagagaagacgatccacctgaccctgaaggtagtaaagcccagcgacgaggaattgcccttgtttctcgtagagagcggggatgaagccaagcgccacctcttacaggtgcggagatcttctagtgtagcgcaggtaaaagccatgatagagactaaaaccggtattatcccagaaacccagatagttacttgtaacggaaagcggctggaggatggcaagatgatggccgattacggcatcagaaagggtaatctactttttctcgcctcctactgcatcggcggatag

SEQ ID NO: 164612 - DNA, 498 bp, Artificial Sequence
  derived and/or modified sequence
atggcaccaaacgcaagctgtctctgtgtacacgtacgaagtgaggaatgggatctaatgacattcgacgctaacccatacgactccgttaaaaagatcaaggagcacgtccggtccaagacaaaggtgcccgttcaggaccaagtgttgctcctaggcagtaagattttgaaacccaggcgtagtctgagttcctacggcattgacaaggaaaagacaattcatcttacactgaaagtggttaagccttctgatgaagaactgcccttgttcctcgtcgaatcaggagatgaagctaaaaggcatctgctgcaggtgcggagatcttcctccgtggcgcaggttaaggcaatgatcgaaactaagacaggcattatacccgagactcaaattgtgacttgcaacggcaaaaggctcgaagatgggaagatgatggccgactatggaattaggaagggcaacctgctgttcttagcgtgttactgcattgggggatag

SEQ ID NO: 164613 - DNA, 498 bp, Artificial Sequence
  derived and/or modified sequence
atggcacccaatgcatcctgcctgtgtgtacatgtgcgcagcgaagaatgggatctgatgacatttgatgctaacccttatgattctgtcaagaaaattaaagaacatgtcaggagtaagaccaaggtgccggtccaggaccaggtgctcctccttgggtccaagatactaaaacccagacgaagcctgtcctcatacggtactgacaaggaaaagaccatccacctcacgctcaaagttgtgaagcccagcgacgaggagctgccactcttcctcgtggagtctggagacgaggccaagcgccatttactccaggttagacgctcatcttcagttgctcaggtgaaggcgatgatcgagaccaagacaggcattatccccgaaacccagatagtcacatgtaatgggaagcgcctggaagatggaaaaatgatggctgactacggtatccgcaaaggtaacctacttttcctcgcatcctactgcataggcggatag

SEQ ID NO: 164614 - DNA, 498 bp, Artificial Sequence
  derived and/or modified sequence
atggctcctaacgcaagctgcctttgcgtccatgtacgcagtgaggaatgggacctcatgactttcgatgctaacccctacgatagtgttaagaagattaaagaacatgtgagaagcaagacaaaagtgcccgtgcaggatcaggtgctactgttgggctccaagatcttaaagccacggagatcactgtctagttacggaattgacaaagagaaaacaatccacctgaccctgaaggtggtcaaacccagtgacgaggagctccccctcttccttgtggagagtggagatgaggccaaaagacatctgctccaggttaggagatcaagctcagtggctcaggttaaggccatgattgaaaccaagacgggcattattcccgaaacacagattgtgacttgtaacggcaagcgcctcgaggatgggaaaatgatggcggactatggaatcagaaaaggcaacctgttatttctggcttcttactgcattggtggctag

SEQ ID NO: 164615 - DNA, 1087 bp, Artificial Sequence
  derived and/or modified sequence
gattgcttgaggagagaagtatgtgatcagaaagcattctttgtctattaactcctgcccagcaaaagtgaaagaaaattcatgggagcatgcaagaacaaagagcacagcaaagctggacaaacacagcaatccaggcaggggatttccaactcaactctggtatataagctgcatgcaaagtcctttttctgtctctggtttctggccccttgtctgcagagatggctcccaatgcttcctgcctctgtgtgcatgtccgttccgaggaatgggatttaatgacctttgatgccaacccatatgacagcgtgaaaaaaatcaaagaacatgtccggtctaagaccaaggttcctgtgcaggaccaggttcttttgctgggctccaagatcttaaagccacggagaagcctctcatcttatggcattgacaaagagaagaccatccaccttaccctgaaagtggtgaagcccagtgatgaggagctgcccttgtttcttgtggagtcaggtgatgaggcaaagaggcacctcctccaggtgcgaaggtccagctcagtggcacaagtgaaagcaatgatcgagactaagacgggtataatccctgagacccagattgtgacttgcaatggaaagagactggaagatgggaagatgatggcagattacggcatcagaaagggcaacttactcttcctggcatgttattgtattggagggtgaccaccctgggcatggggtgttggcaggggtcaaaaagcttatttcttttaatctcttactcaacgaacacatcttctgatgatttcccaaaattaatgagaatgagatgagtagagtaagatttgggtgggatgggtaggatgaagtatattgcccaactctatgtttctttgattctaacacaattaattaagtgacatgatttttactaatgtattactgagactagtaaataaatttttaaggcaaaatagagcattcaaagccagcttggaatttaattctgtcttgataccttgttatttatgcaaaaactcctatctcctttcctttatgacaagagagtaagttttaggttgggatcc

SEQ ID NO: 164616 - DNA, 990 bp, Artificial Sequence
  derived and/or modified sequence
gattgcttgaggagagaagtatgtgatcagaaagcattctttgtctattaactcctgcccagcaaaagtgaaagaaaattcatgggagcatgcaagaacaaagagcacagcaaagctggacaaacacagcaatccaggcaggggatttccaactcaactctggtatataagctgcatgcaaagtcctttttctgtctctggtttctggccccttgtctgcagagatggctcccaatgcttcctgcctctgtgtgcatgtccgttccgaggaatgggatttaatgacctttgatgccaacccatatgacagcgtgaaaaaaatcaaagaacatgtccggtctaagaccaaggttcctgtgcaggaccaggttcttttgctgggctccaagatcttaaagccacggagaagcctctcatcttatggcattgacaaagagaagaccatccaccttaccctgaaagtggtgaagcccagtgatgaggagctgcccttgtttcttgtggagtcaggtgatgaggcaaagaggcacctcctccaggtgcgaaggtccagctcagtggcacaagtgaaagcaatgatcgagactaagacgggtataatccctgagacccagattgtgacttgcaatggaaagagactggaagatgggaagatgatggcagattacggcatcagaaagggcaacttactcttcctggcatcttattgtattggagggtgaccaccctggggatggggtgttggcaggggtcaaaaagcttatttcttttaatctcttactcaacgaacacatcttctgatgatttcccaaaattaatgagaatgagatgagtagagtaagatttgggtgggatgggtaggatgaagtatattgcccaactctatgtttctttgattctaacacaattaattaagtgacatgatttttactaatgtattactgagactagtaaataaatttttaaggcaaaatagagcattcaaagcca

SEQ ID NO: 164617 - DNA, 990 bp, Artificial Sequence
  derived and/or modified sequence
gattgcttgaggagagaagtatgtgatcagaaagcattctttgtctattaactcctgcccagcaaaagtgaaagaaaattcatgggagcatgcaagaacaaagagcacagcaaagctggacaaacacagcaatccaggcaggggatttccaactcaactctggtatataagctgcatgcaaagtcctttttctgtctctggtttctggccccttgtctgcagagatggctcccaatgcttcctgcctctgtgtgcatgtccgttccgaggaatgggatttaatgacctttgatgccaacccatatgacagcgtgaaaaaaatcaaagaacatgtccggtctaagaccaaggttcctgtgcaggaccaggttcttttgctgggctccaagatcttaaagccacggagaagcctctcatcttatggcactgacaaagagaagaccatccaccttaccctgaaagtggtgaagcccagtgatgaggagctgcccttgtttcttgtggagtcaggtgatgaggcaaagaggcacctcctccaggtgcgaaggtccagctcagtggcacaagtgaaagcaatgatcgagactaagacgggtataatccctgagacccagattgtgacttgcaatggaaagagactggaagatgggaagatgatggcagattacggcatcagaaagggcaacttactcttcctggcatcttattgtattggagggtgaccaccctggggatggggtgttggcaggggtcaaaaagcttatttcttttaatctcttactcaacgaacacatcttctgatgatttcccaaaattaatgagaatgagatgagtagagtaagatttgggtgggatgggtaggatgaagtatattgcccaactctatgtttctttgattctaacacaattaattaagtgacatgatttttactaatgtattactgagactagtaaataaatttttaaggcaaaatagagcattcaaagcca

SEQ ID NO: 164618 - DNA, 990 bp, Artificial Sequence
  derived and/or modified sequence
gattgcttgaggagagaagtatgtgatcagaaagcattctttgtctattaactcctgcccagcaaaagtgaaagaaaattcatgggagcatgcaagaacaaagagcacagcaaagctggacaaacacagcaatccaggcaggggatttccaactcaactctggtatataagctgcatgcaaagtcctttttctgtctctggtttctggccccttgtctgcagagatggctcccaatgcttcctgcctctgtgtgcatgtccgttccgaggaatgggatttaatgacctttgatgccaacccatatgacagcgtgaaaaaaatcaaagaacatgtccggtctaagaccaaggttcctgtgcaggaccaggttcttttgctgggctccaagatcttaaagccacggagaagcctctcatcttatggcattgacaaagagaagaccatccaccttaccctgaaagtggtgaagcccagtgatgaggagctgcccttgtttcttgtggagtcaggtgatgaggcaaagaggcacctcctccaggtgcgaaggtccagctcagtggcacaagtgaaagcaatgatcgagactaagacgggtataatccctgagacccagattgtgacttgcaatggaaagagactggaagatgggaagatgatggcagattacggcatcagaaagggcaacttactcttcctggcatgttattgtattggagggtgaccaccctgggcatggggtgttggcaggggtcaaaaagcttatttcttttaatctcttactcaacgaacacatcttctgatgatttcccaaaattaatgagaatgagatgagtagagtaagatttgggtgggatgggtaggatgaagtatattgcccaactctatgtttctttgattctaacacaattaattaagtgacatgatttttactaatgtattactgagactagtaaataaatttttaaggcaaaatagagcattcaaagcca

SEQ ID NO: 164619 - DNA, 990 bp, Artificial Sequence
  derived and/or modified sequence
gattgcttgaggagagaagtatgtgatcagaaagcattctttgtctattaactcctgcccagcaaaagtgaaagaaaattcatgggagcatgcaagaacaaagagcacagcaaagctggacaaacacagcaatccaggcaggggatttccaactcaactctggtatataagctgcatgcaaagtcctttttctgtctctggtttctggccccttgtctgcagagatggctcccaatgcttcctgcctctgtgtgcatgtccgttccgaggaatgggatttaatgacctttgatgccaacccatatgacagcgtgaaaaaaatcaaagaacatgtccggtctaagaccaaggttcctgtgcaggaccaggttcttttgctgggctccaagatcttaaagccacggagaagcctctcatcttacggcattgacaaagagaagaccatccaccttaccctgaaagtggtgaagcccagtgatgaggagctgcccttgtttcttgtggagtcaggtgatgaggcaaagaggcacctcctccaggtgcgaaggtccagctcagtggcacaagtgaaagcaatgatcgagactaagacgggtataatccctgagacccagattgtgacttgcaatggaaagagactggaagatgggaagatgatggcagattacggcatcagaaagggcaacttactcttcctggcatcttattgtattggagggtgaccaccctgggcatggggtgttggcaggggtcaaaaagcttatttcttttaatctcttactcaacgaacacatcttctgatgatttcccaaaattaatgagaatgagatgagtagagtaagatttgggtgggatgggtaggatgaagtatattgcccaactctatgtttctttgattctaacacaattaattaagtgacatgatttttactaatgtattactgagactagtaaataaatttttaaggcaaaatagagcattcaaagcca

SEQ ID NO: 164620 - protein, 125 aa, Artificial Sequence
  derived and/or modified sequence
MPHSSDSSDSSFSRSPPPGKQDSSDDVRRVQRREKNRIAAQKSRQRQTQKADTLHLESEDLEKQNAALRKEIKQLTEELKYFTSVLNSHEPLCSVLAASTPSPPEVVYSAHAFHQPHVSSPRFQP

SEQ ID NO: 164621 - DNA, 953 bp, Artificial Sequence
  derived and/or modified sequence
caagagagagagagagcgtgcaagccccaaagcgagcgacatgtccctttggggagcagtccctctgcaccccagagtgaggaggacgcaggggtcagaggtggctacagggcaggcagaggaggcacctgtagggggtggtgggctggtggcccaggagaagtcaggaagggagcccagctggtgacaagagagcccagaggtgcctggggctgagtgtgagagcccggaagatttcagccatgcctcacagctccgacagcagtgactccagcttcagccgctctcctccccctggcaaacaggactcatctgatgatgtgagaagagttcagaggagggagaaaaatcgtattgccgcccagaagagccgacagaggcagacacagaaggccgacaccctgcacctggagagcgaagacctggagaaacagaacgcggctctacgcaaggagatcaagcagctcacagaggaactgaagtacttcacgtcggtgctgaacagccacgagcccctgtgctcggtgctggccgccagcacgccctcgccccccgaggtggtgtacagcgcccacgcattccaccaacctcatgtcagctccccgcgcttccagccctgagcttccgatgcggggagagcagagcctcgggaggggcacacagactgtggcagagctgcgcccatcccgcagaggcccctgtccacctggagacccggagacagaggcctggacaaggagtgaacacgggaactgtcacgactggaagggcgtgaggcctcccagcagtgccgcagcgtttcgaggggcgtgtgctggaccccaccactgtgggttgcaggcccaatgcagaagagtattaagaaagatgctcaagtcccatggcacagagcaaggcgggcagggaacggttatttttctaaataaatgctttaaaagaaaaaaaaaaaaaaa

SEQ ID NO: 164622 - DNA, 378 bp, Artificial Sequence
  derived and/or modified sequence
atgcctcattcttcagacagtagcgattcatctttttcgaggagtcccccacctggaaagcaagattcgagcgacgatgtcagaagagtacagagaagggaaaaaaatcggatcgccgcacagaaaagtagacagcggcagacgcaaaaagcggatacactacacctagaaagcgaggatctggagaaacagaatgcagctctcaggaaagaaatcaagcagctcactgaagaactgaagtactttacatccgtgctgaactcacatgagccactctgcagcgtgctggctgcaagtactccatcacccccagaggtcgtgtatagcgcccacgcatttcaccagccccacgttagcagtcctcggttccagccatag

SEQ ID NO: 164623 - DNA, 378 bp, Artificial Sequence
  derived and/or modified sequence
atgccccacagcagtgacagcagtgacagcagcttcagccgcagccccccacctgggaagcaggacagcagtgatgatgtgcggcgggtgcagaggcgggagaagaacagaattgctgcccagaagagccggcagaggcagacccagaaggctgacaccctgcacctggagagcgaggacctggagaagcagaatgctgccctgaggaaggagatcaagcagctgacagaggagctgaagtacttcacctctgtgctgaacagccatgagcccctgtgcagcgtgctggccgccagcacccccagccccccagaggtggtgtacagcgcccacgccttccaccagccccacgtgagcagcccccgcttccagccctag

SEQ ID NO: 164624 - DNA, 378 bp, Artificial Sequence
  derived and/or modified sequence
atgccccacagcagcgacagcagcgacagcagcttcagccggagccccccacctggaaagcaggactcaagcgatgacgtcagacgcgtccagagacgggagaaaaacaggattgccgcccagaaatctagacagcggcaaacgcagaaggctgacacgcttcaccttgagtcggaagatttagagaagcagaacgctgcattgagaaaggagataaagcagctgactgaggagctaaagtatttcacatccgtgctgaattctcacgaaccactatgctccgtgttggccgcttctaccccaagccctccagaagttgtatactctgcccatgcttttcaccagccccatgtgagtagcccacgttttcagccatag

SEQ ID NO: 164625 - DNA, 378 bp, Artificial Sequence
  derived and/or modified sequence
atgcctcattcttcagactcttctgattcaagcttcagccgttcgcctcccccaggaaaacaggacagttcggacgacgtgcggagggttcagcggagggagaagaacagaatcgccgctcaaaaatcgcgccagagacagacccagaaggccgacacactccacttagaaagtgaggatctcgaaaagcagaatgcggcacttaggaaggaaatcaaacaactaacagaagaactcaagtactttactagcgtgcttaattcccatgagccactgtgtagcgtgcttgctgcatccaccccttcaccccctgaagtggtgtatagtgcgcatgcgttccaccagccccatgtcagctcaccaaggttccagccgtag

SEQ ID NO: 164626 - DNA, 980 bp, Artificial Sequence
  derived and/or modified sequence
gagttaccagaaaccacaagagagagagagagcgtgcaagccccaaagcgagcgacatgtccctttggggagcagtccctctgcaccccagagtgaggaggacgcaggggtcagaggtggctacagggcaggcagaggaggcacctgtagggggtggtgggctggtggcccaggagaagtcaggaagggagcccagctggtgacaagagagcccagaggtgcctggggctgagtgtgagagcccggaagatttcagccatgcctcacagctccgacagcagtgactccagcttcagccgctctcctccccctggcaaacaggactcatctgatgatgtgagaagagttcagaggagggagaaaaatcgtattgccgcccagaagagccgacagaggcagacacagaaggccgacaccctgcacctggagagcgaagacctggagaaacagaacgcggctctacgcaaggagatcaagcagctcacagaggaactgaagtacttcacgtcggtgctgaacagccacgagcccctgtgctcggtgctggccgccagcacgccctcgccccccgaggtggtgtacagcgcccacgcattccaccaacctcatgtcagctccccgcgcttccagccctgagcttccgatgcggggagagcagagcctcgggaggggcacacagactgtggcagagctgcgcccatcccgcagaggcccctgtccacctggagacccggagacagaggcctggacaaggagtgaacacgggaactgtcacgactggaagggcgtgaggcctcccagcagtgccgcagcgtttcgaggggcgtgtgctggaccccaccactgtgggttgcaggcccaatgcagaagagtattaagaaagatgctcaagtcccatggcacagagcaaggcgggcagggaacggttatttttctaaataaatgctttaaaagaaaccagtctgacaaggcagtttctc

SEQ ID NO: 164627 - DNA, 378 bp, Artificial Sequence
  derived and/or modified sequence
atgccccacagcagcgacagcagcgacagcagcttcagcagaagccccccccccggcaagcaggacagcagcgacgacgtgagaagagtgcagagaagagagaagaacagaatcgccgcccagaagagcagacagagacagacccagaaggccgacaccctgcacctggagagcgaggacctggagaagcagaacgccgccctgagaaaggagatcaagcagctgaccgaggagctgaagtacttcaccagcgtgctgaacagccacgagcccctgtgcagcgtgctggccgccagcacccccagcccccccgaggtggtgtacagcgcccacgccttccaccagccccacgtgagcagccccagattccagccctag

SEQ ID NO: 164628 - protein, 406 aa, Artificial Sequence
  derived and/or modified sequence
MADPKYADLPGIARNEPDVYETSDLPEDDQAEFDAFAQELEELTSTSVEHIIVNPNAAYDKFKDKRVGTKGLDFSDRIGKTKRTGYESGEYEMLGEGLGVKETPQQKYQRLLHEVQELTTEVEKIKTTVKESATEEKLTPVLLAKQLAALKQQLVASHLEKLLGPDAAINLTDPDGALAKRLLLQLEATKNSKGGSGGKTTGTPPDSSLVTYELHSRPEQDKFSQAAKVAELEKRLTELETAVRCDQDAQNPLSAGLQGACLMETVELLQAKVSALDLAVLDQVEARLQSVLGKVNEIAKHKASVEDADTQSKVHQLYETIQRWSPIASTLPELVQRLVTIKQLHEQAMQFGQLLTHLDTTQQMIANSLKDNTTLLTQVQTTMRENLATVEGNFASIDERMKKLGK

SEQ ID NO: 164629 - protein, 406 aa, Artificial Sequence
  derived and/or modified sequence
MADPKYADLPGIARNEPDVYETSDLPEDDQAEFDATVQHLEELTSTSVEHIIVNPNAAYDKFKDKRVGTKGLDFSDRIGKTKRTGYESGEYEMLGEGLGVKETPQQKYQRLLHEVQELTTEVEKIKTTVKESATEEKLTPVLLAKQLAALKQQLVASHLEKLLGPDAAINLTDPDGALAKRLLLQLEATKNSKGGSGGKTTGTPPDSSLVTYELHSRPEQDKFSQAAKVAELEKRLTELETAVRCDQDAQNPLSAGLQGACLMETVELLQAKVSALDLAVLDQVEARLQSVLGKVNEIAKHKASVEDADTQSKVHQLYETIQRWSPIASTLPELVQRLVTIKQLHEQAMQFGQLLTHLDTTQQMIANSLKDNTTLLTQVQTTMRENLATVEGNFASIDERMKKLGK

SEQ ID NO: 164630 - DNA, 1221 bp, Artificial Sequence
  derived and/or modified sequence
atggccgatccaaaatacgccgaccttcctgggattgccaggaacgagcccgatgtttacgagaccagtgatttaccggaggacgaccaggccgaattcgacgctttcgctcaggaactggaggaactgacttccacgtccgtggaacacattatcgtgaatcccaatgccgcatacgataaatttaaggacaaacgcgtcggcacgaaggggctcgatttctccgaccgaatcggtaaaaccaaaaggaccggttacgagtctggtgagtatgaaatgttgggcgaagggttaggcgtgaaggagactccacagcaaaagtatcaacggctgctgcacgaagtgcaggaactgactactgaggtcgagaaaatcaagactaccgttaaagagtctgccaccgaggaaaaactgacacctgtccttctagccaaacagctcgctgcattgaagcagcagctcgtcgcttctcatcttgagaagttgctggggccggatgctgccatcaatttgaccgatcccgacggcgctctggctaagagactgttactgcagctggaagccaccaaaaacagcaaaggcggctcaggcggaaaaaccactggcacgccacccgattctagcctcgtgacatacgagttgcactcccgaccagaacaggacaagttctcacaggctgcgaaagtggccgagttggagaagcgcttaactgagctggagaccgccgtgaggtgtgatcaagatgcgcaaaatcccctgtcggcaggtctccagggcgcttgcctgatggaaactgtggagctgctgcaagctaaggtttccgccctggacttggctgtgctagaccaggtcgaggcccgattgcagagcgtgctgggcaaggtgaatgaaattgccaaacacaaagcatcagtcgaggatgccgacacccagtccaaagtgcaccagctgtatgagaccattcagcggtggtctccaatcgcatccaccttacccgagcttgtccagagactagtgaccataaagcagctgcacgaacaggctatgcaattcggtcagctgttaacacatctggacaccactcaacagatgatcgctaactctttgaaagataacaccacattactgacccaagttcagacaacaatgcgcgaaaatttggccaccgtcgaaggcaattttgcgagtatcgacgaaagaatgaagaagctgggaaaatag

SEQ ID NO: 164631 - DNA, 1137 bp, Artificial Sequence
  derived and/or modified sequence
atgtacgctcagggaaccgaagacagccggacgctcgaggaattaacctcaacatccgtggagcacataattgtgaatccaaacgcagcctatgacaagtttaaagataaaagagtgggcacaaagggcctagattttagcgaccgcatcggaaagaccaaacggaccggctatgaatccggagagtacgagatgctcggggagggtctgggggtgaaagaaacaccacagcagaagtatcagcggctccttcacgaagtgcaggaactcactaccgaggttgaaaaaatcaaaacaacagtgaaggaatccgcgaccgaagaaaaacttacccctgtgcttctggcaaaacagctagccgctctgaaacagcagctggttgcatctcacctcgaaaaattgctcggacccgatgccgcaataaatctgacagacccagacggtgctttggcaaagaggctgctcctccagctggaggcaaccaagaactccaaagggggtagcggcggcaaaacaacagggacaccaccagacagctccctggtcacttacgaattacactctaggcccgagcaggacaagttttcacaagccgcaaaagtggctgagctggagaagcggctgacggaattagaaactgcagtgagatgcgaccaggatgcccagaatcccctgtccgccggccttcaaggggcctgtctgatggagactgtggagttgctacaggcaaaagtgagcgccctggatttggcagtactggaccaggtggaggcccgcttacagtcagttcttggaaaagtgaacgaaatagctaaacacaaggcctcagttgaagacgccgatacacaaagtaaggttcaccaactttacgaaactatccagcgatggtccccaattgcctccaccctgccagagctggtacaaaggctggtgactattaagcaactccatgaacaagctatgcagtttggacagttattgacccatctcgacacgacacagcagatgattgccaactcactgaaggataataccactcttctgactcaagtacagacaacgatgagagaaaacctcgctacagtcgagggcaacttcgcctcgattgacgagaggatgaagaaattggggaagtag

SEQ ID NO: 164632 - DNA, 1221 bp, Artificial Sequence
  derived and/or modified sequence
atggccgaccccaagtacgctgacttgccaggcatcgcacgcaacgaacctgatgtgtatgagacttccgatctcccggaggacgaccaggccgagttcgacgcgaccgtgcaacatttggaagagctgactagtactagtgttgaacacattattgtgaaccccaacgcggcgtacgacaagtttaaagacaaacgggttggcactaaaggtcttgacttttccgacaggattggtaagacaaagaggacggggtacgagagcggggaatacgagatgcttggcgagggcctgggagtgaaagaaaccccccagcaaaagtaccagcggcttctgcacgaggtgcaggaactgaccacagaggtggaaaagatcaagacaacggtcaaggagagcgcaacggaggagaaattgactccagtgctgcttgccaaacagctggccgccctgaagcagcaattggtggctagccacttagagaagttgttggggcctgatgccgccatcaacctgaccgatcctgacggggccctggccaagagactactgttgcagctcgaagccactaaaaattccaagggagggtcaggcggaaaaactaccggtacgccgcccgatagcagtttggtcacctacgagctgcacagcagaccagaacaagacaagttctctcaggcagctaaagtcgcggaactggaaaagcgccttacagagctggagactgcagtgcggtgtgaccaggacgcacagaaccctctgagtgcagggctccagggggcgtgtttgatggagacagtagaactgctccaagcaaaggtttctgcccttgatctcgctgtccttgaccaggtcgaggcgaggctgcagagcgtgctggggaaggtgaatgagatagcaaaacataaggcttccgtggaagacgcagatactcagtctaaggtgcatcagctgtatgaaacaatccagaggtggtctccaatagcgagcacccttcctgaattagtccagcgcttggtgaccattaagcagttgcacgagcaggcgatgcaattcggccagctactcacgcatctggacaccacccagcagatgatcgcgaattcccttaaagacaatacaaccttgctgacacaggtccagaccacaatgagggagaacctggcaactgtcgaaggtaacttcgcttcaattgatgagcgcatgaagaagttgggaaaatag

SEQ ID NO: 164633 - DNA, 1221 bp, Artificial Sequence
  derived and/or modified sequence
atggctgaccccaagtatgctgacctgcccggcatcgccagaaatgaaccagatgtgtatgagaccagtgacctgcctgaagatgaccaggccgagtttgatgcctttgcccaggagctggaggagctgaccagcacctctgtggagcacatcatcgtgaaccccaatgctgcctatgacaagttcaaggacaagagggtgggcaccaagggcctggacttcagtgaccgcatcggcaagaccaagaggacaggctatgagagcggggagtatgagatgctgggggagggcctgggcgtgaaggagaccccccagcagaagtaccagaggctgctgcacgaggtgcaggagctgaccacagaggtggagaagatcaagaccaccgtgaaggagagcgccacagaggagaagctgacccctgtgctgctggccaagcagctggccgccctgaagcagcagctggtggccagccacctggagaagctgctgggcccagatgctgccatcaacctgacagatcctgatggagccctggccaagaggctgctgctgcagctggaggccaccaagaacagcaaaggaggcagcggcggcaagaccaccggcaccccaccagacagcagcctggtgacctatgagctgcacagcaggcctgagcaggacaagttcagccaggccgccaaggtggccgagctggagaagaggctgacagagctggagacagctgtgcgctgtgaccaggatgcccagaaccccctgtctgctggcctgcagggcgcctgcctgatggagaccgtggagctgctgcaggccaaggtgtctgccctggacctggccgtgctggaccaggtggaggcccggctgcagagcgtgctgggcaaggtgaatgagatcgccaagcacaaggcctctgtggaggatgctgacacccagagcaaggtgcaccagctgtatgagaccatccagcgctggagccccatcgccagcaccctgcctgagctggtgcagaggctggtgaccatcaagcagctgcacgagcaggccatgcagtttggccagctgctgacccacctggacaccacccagcagatgattgccaacagcctgaaggacaacaccaccctgctgacccaggtgcagaccaccatgagggagaacctggccaccgtggagggcaactttgccagcattgatgagaggatgaagaagctgggcaagtag

SEQ ID NO: 164634 - DNA, 1137 bp, Artificial Sequence
  derived and/or modified sequence
atgtatgcccagggcacagaggacagcaggaccctggaggagctgaccagcacctctgtggagcacatcatcgtgaaccccaatgctgcctatgacaagttcaaggacaagagggtgggcaccaagggcctggacttcagtgaccgcatcggcaagaccaagaggacaggctatgagagcggggagtatgagatgctgggggagggcctgggcgtgaaggagaccccccagcagaagtaccagaggctgctgcacgaggtgcaggagctgaccacagaggtggagaagatcaagaccaccgtgaaggagagcgccacagaggagaagctgacccctgtgctgctggccaagcagctggccgccctgaagcagcagctggtggccagccacctggagaagctgctgggcccagatgctgccatcaacctgacagatcctgatggagccctggccaagaggctgctgctgcagctggaggccaccaagaacagcaaaggaggcagcggcggcaagaccaccggcaccccaccagacagcagcctggtgacctatgagctgcacagcaggcctgagcaggacaagttcagccaggccgccaaggtggccgagctggagaagaggctgacagagctggagacagctgtgcgctgtgaccaggatgcccagaaccccctgtctgctggcctgcagggcgcctgcctgatggagaccgtggagctgctgcaggccaaggtgtctgccctggacctggccgtgctggaccaggtggaggcccggctgcagagcgtgctgggcaaggtgaatgagatcgccaagcacaaggcctctgtggaggatgctgacacccagagcaaggtgcaccagctgtatgagaccatccagcgctggagccccatcgccagcaccctgcctgagctggtgcagaggctggtgaccatcaagcagctgcacgagcaggccatgcagtttggccagctgctgacccacctggacaccacccagcagatgattgccaacagcctgaaggacaacaccaccctgctgacccaggtgcagaccaccatgagggagaacctggccaccgtggagggcaactttgccagcattgatgagaggatgaagaagctgggcaagtag

SEQ ID NO: 164635 - DNA, 1221 bp, Artificial Sequence
  derived and/or modified sequence
atggctgaccccaagtatgctgacctgcccggcatcgccagaaatgaaccagatgtgtatgagaccagtgacctgcctgaagatgaccaggccgagtttgatgccaccgtgcagcacctggaggagctgaccagcacctctgtggagcacatcatcgtgaaccccaatgctgcctatgacaagttcaaggacaagagggtgggcaccaagggcctggacttcagtgaccgcatcggcaagaccaagaggacaggctatgagagcggggagtatgagatgctgggggagggcctgggcgtgaaggagaccccccagcagaagtaccagaggctgctgcacgaggtgcaggagctgaccacagaggtggagaagatcaagaccaccgtgaaggagagcgccacagaggagaagctgacccctgtgctgctggccaagcagctggccgccctgaagcagcagctggtggccagccacctggagaagctgctgggcccagatgctgccatcaacctgacagatcctgatggagccctggccaagaggctgctgctgcagctggaggccaccaagaacagcaaaggaggcagcggcggcaagaccaccggcaccccaccagacagcagcctggtgacctatgagctgcacagcaggcctgagcaggacaagttcagccaggccgccaaggtggccgagctggagaagaggctgacagagctggagacagctgtgcgctgtgaccaggatgcccagaaccccctgtctgctggcctgcagggcgcctgcctgatggagaccgtggagctgctgcaggccaaggtgtctgccctggacctggccgtgctggaccaggtggaggcccggctgcagagcgtgctgggcaaggtgaatgagatcgccaagcacaaggcctctgtggaggatgctgacacccagagcaaggtgcaccagctgtatgagaccatccagcgctggagccccatcgccagcaccctgcctgagctggtgcagaggctggtgaccatcaagcagctgcacgagcaggccatgcagtttggccagctgctgacccacctggacaccacccagcagatgattgccaacagcctgaaggacaacaccaccctgctgacccaggtgcagaccaccatgagggagaacctggccaccgtggagggcaactttgccagcattgatgagaggatgaagaagctgggcaagtag

SEQ ID NO: 164636 - DNA, 1221 bp, Artificial Sequence
  derived and/or modified sequence
atggccgaccccaagtacgccgacctgcccggcatcgcccggaacgagcccgacgtctatgaaactagtgatcttccagaagacgaccaggcggaattcgatgccttcgcgcaggagctggaagaattaacttccacatctgtggaacatattatcgtcaatcctaatgcagcatatgacaagttcaaagataagagagtggggactaaaggactcgatttctctgatcgtatcggaaaaaccaagaggaccggttacgagagtggtgagtatgagatgctaggcgagggcctcggggtcaaggaaacgccgcaacagaaatatcaaagactgttacacgaggtgcaggaactgacaacagaggttgagaaaattaagacaactgtaaaggaatctgctactgaagagaagctgaccccagtgctgttagccaagcagctagcggctctcaagcagcagcttgtcgcatcccacctggagaaacttctgggtcccgatgctgccatcaatctgacggacccagatggagcgcttgccaagcgcttgctcctccagcttgaggcaacaaagaattctaagggcggatcaggaggcaagaccaccgggacacccccggatagctcattagtgacttacgaactgcacagtcgccctgagcaggataaattcagtcaggctgctaaagttgcagagcttgagaaacgcttgacagagctggaaactgccgttcggtgtgaccaggatgctcagaacccactgtcggctggattgcagggcgcctgcttaatggagacggtggaacttctgcaggccaaagtgtctgccctcgatcttgcagtcctggaccaggtggaagcacgtctccagagtgtgttaggtaaggtaaatgagattgctaagcataaggcatccgtagaagacgcagatacacagagcaaggtgcatcaactctacgaaacaatccagagatggagtcctatcgcctccacactaccagaacttgtgcagcggctagtaacaattaagcagctccacgaacaggcgatgcaattcggacagcttctgacacatctcgataccactcagcagatgattgcaaactcactgaaagacaataccacgctcctgacacaggtccagacaactatgagagaaaacctggccactgtcgaagggaatttcgctagcatagacgaacgcatgaaaaagctcggcaagtag

SEQ ID NO: 164637 - DNA, 1137 bp, Artificial Sequence
  derived and/or modified sequence
atgtacgcccagggcaccgaggacagccggaccctggaggagctgactagcacctccgtggagcacatcatcgtgaacccaaacgccgcttacgataaatttaaagacaagagagtgggaacgaagggcctggacttcagcgacagaattggcaagacaaaacggacgggctacgagagtggagagtatgaaatgcttggagagggattgggcgtcaaggagacaccgcagcagaagtatcagcgactattgcacgaggtgcaggagcttacgactgaagtggagaaaatcaaaaccacagtgaaagagagtgcgaccgaggagaaattgaccccggttctgctcgccaagcagcttgctgccctcaaacaacagcttgtcgcatcccacttggagaagttactcggcccggatgcagccattaatctcaccgaccctgacggcgctctggcaaaacgactactgctccagctagaggctacaaaaaactcgaagggcggttcagggggcaaaaccacgggcacacctccagactcttctctggtcacatatgaactgcattcgcggcccgagcaggataagttctcccaagcagccaaagtggccgagctggagaaacgcttgaccgaactagagaccgcagtgcgctgcgaccaggatgcccagaaccctctgagcgctggcttgcagggggcctgccttatggagacagtcgagttactgcaggctaaagtcagcgctttggacctagctgtcctcgaccaggtggaagcacggctgcagtcggtattggggaaagttaatgagatagctaagcacaaagcgagtgtagaggatgcggacactcagtccaaggttcatcagctgtacgagacgatccaacgctggtcaccaatcgcatctactctacccgaacttgtacagcgtcttgtcacaatcaagcaactgcacgaacaggcaatgcaattcggacagctgcttacacacctggacactacacagcagatgattgctaactcccttaaagataatacaacactcctgacccaagtacaaactacaatgagggagaatctggctactgtcgaaggtaacttcgccagtattgatgagcggatgaagaagttgggtaaatag

SEQ ID NO: 164638 - DNA, 1221 bp, Artificial Sequence
  derived and/or modified sequence
atggccgaccccaagtacgccgacctgcccggcatcgcccggaacgagcctgatgtgtatgaaaccagcgatctgcctgaggacgatcaagcagaattcgatgccacagtgcaacacttagaggagctaacctctacatctgtggaacacatcatagtcaaccctaacgcagcctatgataaattcaaggataagcgcgtgggaactaaagggctggactttagtgaccggattgggaaaaccaagcgcacaggttacgaatctggtgagtatgagatgctgggcgaaggactgggcgtaaaagagactcctcaacaaaaatatcagcggctccttcacgaagtgcaggaactgaccaccgaggttgagaagataaaaacgaccgtgaaggaatcggccaccgaagaaaagctgaccccagtgctcctcgccaaacaactggctgccctgaaacaacagctcgttgcgtctcatctggaaaaactgctcggtcctgatgccgctattaatctgacggatcctgacggcgctctcgccaaaagactgctgctacagctagaagccacaaagaatagtaaaggcggcagcggaggcaagacgaccggtacacctccagactcctcgctggtgacatatgagctgcatagcagaccagagcaagataaattcagtcaagccgctaaggttgccgaacttgaaaagaggctgacagagctggaaacagctgtgcgctgcgaccaggatgcacagaaccccctgagcgccggattacagggggcctgtctcatggagacagtggaactcctccaagccaaagtttccgctttagacctcgcagtcctggaccaagtggaagcccgcctgcagagcgtgcttggcaaggtgaacgagatagccaaacacaaggcctctgttgaagacgcagacacgcaatccaaggtgcatcaactgtacgagacgattcagcggtggagtcctattgccagcactcttccggagctggtgcaacggctcgtgactatcaaacagttacatgagcaggccatgcagttcgggcagctactgacacatctggacaccacccagcagatgattgccaacagtctgaaggacaacactaccctgcttacccaggttcagactacgatgcgagaaaacttggccactgtcgaaggcaactttgctagtattgacgagcgaatgaaaaaactcggtaaatag

SEQ ID NO: 164639 - DNA, 1221 bp, Artificial Sequence
  derived and/or modified sequence
atggctgatcccaaatatgcagatttgccagggattgctcggaacgagcccgatgtgtatgaaactagtgatctgccggaagacgaccaggcggaattcgacgcctttgcccaagagctcgaggaactgacgagcacttcagtagagcacattattgtgaatcctaacgcagcatacgacaagtttaaggacaaacgtgttggcacaaaaggcctcgacttcagcgatagaatcgggaaaacgaagagaaccggatatgagtccggtgaatacgaaatgttgggtgagggcctgggagtcaaggagaccccccagcagaaataccagcgcctcctgcacgaggtgcaggagctcacaaccgaggttgagaaaattaagacgactgtgaaggagagcgcaacggaagagaagctcacacctgtgctccttgcgaagcagttggcagcgctgaaacagcagttagtggcatcgcaccttgagaaattgctggggcctgacgctgcaatcaacctgaccgatcctgacggagcattggcaaagcgactcctcctacaattagaagccacaaagaactccaaaggaggaagcggcggaaagaccacaggcaccccccctgattcctctctcgtcacctacgagttgcacagccggccagagcaagacaaattctctcaggccgcaaaagtggccgaactagagaaaaggttaacagaactggagacggcggtgcgctgtgatcaagatgcccaaaatcctctatcagcgggtctgcaaggtgcatgtctcatggagaccgtagaactgctacaggcgaaggtgtcagccttagatctggctgtcctggaccaggtggaggctagactccagagcgtccttggaaaggtgaatgaaatcgccaagcacaaggcatcagtagaagacgcagatacccagtcaaaggttcatcagctgtacgaaaccattcagaggtggtcccccatcgcctctacgctgcctgagctggtgcaacgtctagttaccatcaagcagttgcacgagcaggcaatgcaatttggccagctgctcactcacctggataccacccagcagatgattgcgaattcgcttaaagacaataccactctcctcacccaggttcagacgactatgcgtgagaatctggccactgtggagggaaacttcgcttctattgacgaacgcatgaagaaacttggaaaatag

SEQ ID NO: 164640 - DNA, 1137 bp, Artificial Sequence
  derived and/or modified sequence
atgtacgcccagggaacagaggattccagaacgctagaagagctcacctcaacttctgtggaacatatcattgtgaaccctaatgccgcttatgataagtttaaggataaacgcgttggcaccaaaggtttggacttctcagatcggattgggaagacgaaacgtaccgggtacgaaagtggcgagtatgagatgttgggggaagggcttggagttaaggagacaccacagcagaaatatcagcgcttgctgcacgaggtccaggagctcactaccgaggtggagaagatcaaaaccacagttaaagagagcgcaaccgaagaaaaactgactcccgttctcttggccaagcagcttgcggctctgaaacagcaactcgtggcctcacacctggaaaaacttcttggtccagatgccgctataaacctcaccgacccggatggggctcttgccaaacgtctgttacttcagctcgaagccaccaagaactcaaagggcggatccggagggaagacaaccggcactccgccagacagctccttggtcacatacgaactgcattcacggccagaacaggacaagttctctcaggccgcaaaagtggccgaactggaaaagaggctgactgagctggagacggcagtgcgctgtgaccaggacgcccagaatccgctgtcagctgggctgcagggcgcatgcctgatggagaccgtggagctgctgcaggcaaaagtctcagccctcgacctggctgttctggaccaggtcgaggccaggctccagtccgttttaggcaaagtcaatgaaattgcgaaacacaaggcatcagtagaggatgctgatactcagagcaaggttcaccagttgtacgaaactatccaaagatggagcccgatcgcctcaacgctgccggaactggtgcagcgtctcgtgacaattaaacaactccacgaacaggccatgcagttcggacaactgttaacacaccttgacacgactcagcaaatgatagccaactctctgaaggacaacacgactctgctgactcaggtgcagaccaccatgagggaaaacctcgccacagtggaaggtaactttgccagtatcgacgagaggatgaagaaactgggcaagtag

SEQ ID NO: 164641 - DNA, 1221 bp, Artificial Sequence
  derived and/or modified sequence
atggccgaccccaagtacgccgatttgcccggaattgcgaggaatgagccagacgtctatgaaacaagcgacctcccagaagatgatcaggcggagtttgatgccaccgtccagcacttggaggaattgacctcaacgtctgtggaacatattatagtaaaccccaacgctgcttatgataaattcaaggacaaaagagttgggacgaaagggctagactttagcgaccggataggtaagactaagcggacggggtatgagtcgggggaatacgagatgctaggggaaggcctaggggtaaaggagacaccgcaacagaagtatcaacgtctcctgcacgaggtgcaggagttgacgactgaagtggagaagatcaaaaccacagtcaaggagtccgcgaccgaggagaagctgacacctgtactgttggcaaagcagctcgccgcacttaagcagcagctggttgcgtcacacctggagaagttgctcggaccagatgccgctatcaatctaacggatcccgacggcgcacttgcaaagcgccttctactccaactcgaggcaacaaaaaactctaagggcggatcaggcggtaagactaccggcacaccaccggactcttccttggtcacttacgagctgcactccaggccggagcaggacaagttttcccaggctgcgaaggtggccgagctcgagaagcggttgactgaactagagaccgcagttaggtgtgaccaagacgcccagaatcctttgagcgccggtctccagggcgcttgcctgatggaaactgtcgaactcctgcaggcaaaggtaagtgccctggacctcgccgtgctggaccaggtagaagctcggctgcagagcgtgctcggcaaagtgaacgagattgcaaagcataaagcatcggtcgaggatgccgacacacagagcaaggtacaccagctgtatgagaccatccagcggtggagccccattgcttcaacgctgccagagctggttcaacggttggtgactatcaaacagctgcatgaacaagccatgcagttcggacagctgctgactcacttagacactactcagcagatgattgcgaactctttaaaggataacactacacttctgacgcaagtccaaacaacaatgcgcgaaaatctggccacagtggaaggcaacttcgccagtatcgacgaacgcatgaagaagcttggcaagtag

SEQ ID NO: 164642 - DNA, 1221 bp, Artificial Sequence
  derived and/or modified sequence
atggccgaccccaagtacgccgacctgcccggcatcgccagaaacgagcccgacgtgtacgagaccagcgacctgcccgaggacgaccaggccgagttcgacgccttcgcccaggagctggaggagctgaccagcaccagcgtggagcacatcatcgtgaaccccaacgccgcctacgacaagttcaaggacaagagagtgggcaccaagggcctggacttcagcgacagaatcggcaagaccaagagaaccggctacgagagcggcgagtacgagatgctgggcgagggcctgggcgtgaaggagaccccccagcagaagtaccagagactgctgcacgaggtgcaggagctgaccaccgaggtggagaagatcaagaccaccgtgaaggagagcgccaccgaggagaagctgacccccgtgctgctggccaagcagctggccgccctgaagcagcagctggtggccagccacctggagaagctgctgggccccgacgccgccatcaacctgaccgaccccgacggcgccctggccaagagactgctgctgcagctggaggccaccaagaacagcaagggcggcagcggcggcaagaccaccggcaccccccccgacagcagcctggtgacctacgagctgcacagcagacccgagcaggacaagttcagccaggccgccaaggtggccgagctggagaagagactgaccgagctggagaccgccgtgagatgcgaccaggacgcccagaaccccctgagcgccggcctgcagggcgcctgcctgatggagaccgtggagctgctgcaggccaaggtgagcgccctggacctggccgtgctggaccaggtggaggccagactgcagagcgtgctgggcaaggtgaacgagatcgccaagcacaaggccagcgtggaggacgccgacacccagagcaaggtgcaccagctgtacgagaccatccagagatggagccccatcgccagcaccctgcccgagctggtgcagagactggtgaccatcaagcagctgcacgagcaggccatgcagttcggccagctgctgacccacctggacaccacccagcagatgatcgccaacagcctgaaggacaacaccaccctgctgacccaggtgcagaccaccatgagagagaacctggccaccgtggagggcaacttcgccagcatcgacgagagaatgaagaagctgggcaagtag

SEQ ID NO: 164643 - DNA, 1137 bp, Artificial Sequence
  derived and/or modified sequence
atgtacgcccagggcaccgaggacagcagaaccctggaggagctgaccagcaccagcgtggagcacatcatcgtgaaccccaacgccgcctacgacaagttcaaggacaagagagtgggcaccaagggcctggacttcagcgacagaatcggcaagaccaagagaaccggctacgagagcggcgagtacgagatgctgggcgagggcctgggcgtgaaggagaccccccagcagaagtaccagagactgctgcacgaggtgcaggagctgaccaccgaggtggagaagatcaagaccaccgtgaaggagagcgccaccgaggagaagctgacccccgtgctgctggccaagcagctggccgccctgaagcagcagctggtggccagccacctggagaagctgctgggccccgacgccgccatcaacctgaccgaccccgacggcgccctggccaagagactgctgctgcagctggaggccaccaagaacagcaagggcggcagcggcggcaagaccaccggcaccccccccgacagcagcctggtgacctacgagctgcacagcagacccgagcaggacaagttcagccaggccgccaaggtggccgagctggagaagagactgaccgagctggagaccgccgtgagatgcgaccaggacgcccagaaccccctgagcgccggcctgcagggcgcctgcctgatggagaccgtggagctgctgcaggccaaggtgagcgccctggacctggccgtgctggaccaggtggaggccagactgcagagcgtgctgggcaaggtgaacgagatcgccaagcacaaggccagcgtggaggacgccgacacccagagcaaggtgcaccagctgtacgagaccatccagagatggagccccatcgccagcaccctgcccgagctggtgcagagactggtgaccatcaagcagctgcacgagcaggccatgcagttcggccagctgctgacccacctggacaccacccagcagatgatcgccaacagcctgaaggacaacaccaccctgctgacccaggtgcagaccaccatgagagagaacctggccaccgtggagggcaacttcgccagcatcgacgagagaatgaagaagctgggcaagtag

SEQ ID NO: 164644 - DNA, 1221 bp, Artificial Sequence
  derived and/or modified sequence
atggccgaccccaagtacgccgacctgcccggcatcgccagaaacgagcccgacgtgtacgagaccagcgacctgcccgaggacgaccaggccgagttcgacgccaccgtgcagcacctggaggagctgaccagcaccagcgtggagcacatcatcgtgaaccccaacgccgcctacgacaagttcaaggacaagagagtgggcaccaagggcctggacttcagcgacagaatcggcaagaccaagagaaccggctacgagagcggcgagtacgagatgctgggcgagggcctgggcgtgaaggagaccccccagcagaagtaccagagactgctgcacgaggtgcaggagctgaccaccgaggtggagaagatcaagaccaccgtgaaggagagcgccaccgaggagaagctgacccccgtgctgctggccaagcagctggccgccctgaagcagcagctggtggccagccacctggagaagctgctgggccccgacgccgccatcaacctgaccgaccccgacggcgccctggccaagagactgctgctgcagctggaggccaccaagaacagcaagggcggcagcggcggcaagaccaccggcaccccccccgacagcagcctggtgacctacgagctgcacagcagacccgagcaggacaagttcagccaggccgccaaggtggccgagctggagaagagactgaccgagctggagaccgccgtgagatgcgaccaggacgcccagaaccccctgagcgccggcctgcagggcgcctgcctgatggagaccgtggagctgctgcaggccaaggtgagcgccctggacctggccgtgctggaccaggtggaggccagactgcagagcgtgctgggcaaggtgaacgagatcgccaagcacaaggccagcgtggaggacgccgacacccagagcaaggtgcaccagctgtacgagaccatccagagatggagccccatcgccagcaccctgcccgagctggtgcagagactggtgaccatcaagcagctgcacgagcaggccatgcagttcggccagctgctgacccacctggacaccacccagcagatgatcgccaacagcctgaaggacaacaccaccctgctgacccaggtgcagaccaccatgagagagaacctggccaccgtggagggcaacttcgccagcatcgacgagagaatgaagaagctgggcaagtag

SEQ ID NO: 164645 - DNA, 1677 bp, Artificial Sequence
  derived and/or modified sequence
aacccagcctctcccctacccgaacaccggccccggctccaccgaggcccgggtcccccagcccgtctcgccgccgccatggcggaccctaaatacgccgaccttcccggcattgccaggaatgagccagatgtttatgaaactagcgacctacctgaggatgatcaagcggagttcgatgcgtttgcacaagagctggaggagctgacaagcacaagtgtggaacacatcattgtcaatcctaatgctgcctatgacaagttcaaggacaagagagtggggacaaagggacttgatttctcagatcgtattggaaaaaccaagaggacaggatatgaatctggagaatatgagatgcttggagagggtctgggagtgaaggagacaccccagcaaaagtaccagcgcctactgcatgaggtccaagagctgacaactgaagttgaaaaaatcaagacgacagtgaaggagtcagccacagaggagaagctgacccctgtgttgctggctaaacagctggcagccctgaagcagcagctggttgcttcccacctggagaagctgctgggaccagatgctgcaatcaaccttaccgaccccgatggcgccctggctaagcgcctactactgcagctggaagcaacaaagaacagcaaagggggatcagggggaaaaaccactgggacccccccagatagcagccttgtcacttatgaactacattctcggcctgagcaggacaagttctctcaagctgccaaagtcgcagaacttgaaaagcgcctgacagagctggagacagctgtacgttgtgatcaggatgctcagaatcccctttctgcaggtctacagggagcctgtctcatggagactgtagagctgttgcaagcaaaggtgagcgccctagaccttgcagttttggatcaagtggaggctcggctacagagtgtcctgggaaaggtgaacgagattgccaagcataaagcctctgtagaagatgcagatacacaaagcaaggtgcaccagctatatgaaactatacagcgctggagccccattgcctccaccctccctgagctggtgcagagacttgtcaccatcaagcagctgcacgagcaagccatgcagtttggtcagctcctgacacacttggataccacccagcagatgattgctaattccttgaaggacaataccaccctcttgacccaggtgcagacaaccatgcgtgaaaacctggccacagttgaggggaactttgccagcattgatgaacggatgaagaagctgggaaagtgagcacatttgggagctggagaacaggggttatccctacccctgtgaactctgttaacagcttacatagggtttcccctttactataactctagcatccccatcccatttgacactgggggcaagggttcttcttgcatgtggggtttatacccctcccctgatgaatacagagtggtagctaggggttggttatcatcagaaggtggtctcccctcaggcctgggggataaggacgtgggcccagccacatgccaactcatgtccaatactgctttgcctggtgtggggaaggattgggtcttgtcccccaacacagcttctgtggctgactgtaatactgtacaactgtttctgaccattaaatgctgttgtactctg

SEQ ID NO: 164646 - DNA, 1515 bp, Artificial Sequence
  derived and/or modified sequence
atgtatgcacagggaacagaggattcaaggactcttgaggagctgacaagcacaagtgtggaacacatcattgtcaatcctaatgctgcctatgacaagttcaaggacaagagagtggggacaaagggacttgatttctcagatcgtattggaaaaaccaagaggacaggatatgaatctggagaatatgagatgcttggagagggtctgggagtgaaggagacaccccagcaaaagtaccagcgcctactgcatgaggtccaagagctgacaactgaagttgaaaaaatcaagacgacagtgaaggagtcagccacagaggagaagctgacccctgtgttgctggctaaacagctggcagccctgaagcagcagctggttgcttcccacctggagaagctgctgggaccagatgctgcaatcaaccttaccgaccccgatggcgccctggctaagcgcctactactgcagctggaagcaacaaagaacagcaaagggggatcagggggaaaaaccactgggacccccccagatagcagccttgtcacttatgaactacattctcggcctgagcaggacaagttctctcaagctgccaaagtcgcagaacttgaaaagcgcctgacagagctggagacagctgtacgttgtgatcaggatgctcagaatcccctttctgcaggtctacagggagcctgtctcatggagactgtagagctgttgcaagcaaaggtgagcgccctagaccttgcagttttggatcaagtggaggctcggctacagagtgtcctgggaaaggtgaacgagattgccaagcataaagcctctgtagaagatgcagatacacaaagcaaggtgcaccagctatatgaaactatacagcgctggagccccattgcctccaccctccctgagctggtgcagagacttgtcaccatcaagcagctgcacgagcaagccatgcagtttggtcagctcctgacacacttggataccacccagcagatgattgctaattccttgaaggacaataccaccctcttgacccaggtgcagacaaccatgcgtgaaaacctggccacagttgaggggaactttgccagcattgatgaacggatgaagaagctgggaaagtgagcacatttgggagctggagaacaggggttatccctacccctgtgaactctgttaacagcttacatagggtttcccctttactataactctagcatccccatcccatttgacactgggggcaagggttcttcttgcatgtggggtttatacccctcccctgatgaatacagagtggtagctaggggttggttatcatcagaaggtggtctcccctcaggcctgggggataaggacgtgggcccagccacatgccaactcatgtccaatactgctttgcctggtgtggggaaggattgggtcttgtcccccaacacagcttctgtggctgactgtaatactgtacaactgtttctgaccattaaatgctgttgtactctg

SEQ ID NO: 164647 - DNA, 1439 bp, Artificial Sequence
  derived and/or modified sequence
gaacaccggccccggctccaccgaggcccgggtcccccagcccgtctcgccgccgccatggcggaccctaaatacgccgaccttcccggcattgccaggaatgagccagatgtttatgaaactagcgacctacctgaggatgatcaagcggagttcgatgcgatgccccagatcttcaagacactgctggagtaggtgctactggaggactagagtgtgctcccgggccacagccttggagaggctccagaggatgccagcgccaggaggagctgacaagcacaagtgtggaacacatcattgtcaatcctaatgctgcctatgacaagttcaaggacaagagagtggggacaaagggacttgatttctcagatcgtattggaaaaaccaagaggacaggatatgaatctggagaatatgagatgcttggagagggtctgggagtgaaggagacaccccagcaaaagtaccagcgcctactgcatgaggtccaagagctgacaactgaagttgaaaaaatcaagacgacagtgaaggagtcagccacagaggagaagctgacccctgtgttgctggctaaacagctggcagccctgaagcagcagctggttgcttcccacctggagaagctgctgggaccagatgctgcaatcaaccttaccgaccccgatggcgccctggctaagcgcctactactgcagctggaagcaacaaagaacagcaaagggggatcagggggaaaaaccactgggacccccccagatagcagccttgtcacttatgaactacattctcggcctgagcaggacaagttctctcaagctgccaaagtcgcagaacttgaaaagcgcctgacagagctggagacagctgtacgttgtgatcaggatgctcagaatcccctttctgcaggtctacagggagcctgtctcatggagactgtagagctgttgcaagcaaaggtgagcgccctagaccttgcagttttggatcaagtggaggctcggctacagagtgtcctgggaaaggtgaacgagattgccaagcataaagcctctgtagaagatgcagatacacaaagcaaggtgcaccagctatatgaaactatacagcgctggagccccattgcctccaccctccctgagctggtgcagagacttgtcaccatcaagcagctgcacgagcaagccatgcagtttggtcagctcctgacacacttggataccacccagcagatgattgctaattccttgaaggacaataccaccctcttgacccaggtgcagacaaccatgcgtgaaaacctggccacagttgaggggaactttgccagcattgatgaacggatgaagaagctgggaaagtgagcacatttgggagctggagaacaggggttatccctacccctgtgaactctgttaacagcttacatagggttt

SEQ ID NO: 164648 - DNA, 1745 bp, Artificial Sequence
  derived and/or modified sequence
gctactgctgtcgcgagacttcctgctcatctgccgctccctttgccgccgccttagcccgggacccgaacccagcctctcccctacccgaacaccggccccggctccaccgaggcccgggtcccccagcccgtctcgccgccgccatggcggaccctaaatacgccgaccttcccggcattgccaggaatgagccagatgtttatgaaactagcgacctacctgaggatgatcaagcggagttcgatgcgactgttcaacatctagaggagctgacaagcacaagtgtggaacacatcattgtcaatcctaatgctgcctatgacaagttcaaggacaagagagtggggacaaagggacttgatttctcagatcgtattggaaaaaccaagaggacaggatatgaatctggagaatatgagatgcttggagagggtctgggagtgaaggagacaccccagcaaaagtaccagcgcctactgcatgaggtccaagagctgacaactgaagttgaaaaaatcaagacgacagtgaaggagtcagccacagaggagaagctgacccctgtgttgctggctaaacagctggcagccctgaagcagcagctggttgcttcccacctggagaagctgctgggaccagatgctgcaatcaaccttaccgaccccgatggcgccctggctaagcgcctactactgcagctggaagcaacaaagaacagcaaagggggatcagggggaaaaaccactgggacccccccagatagcagccttgtcacttatgaactacattctcggcctgagcaggacaagttctctcaagctgccaaagtcgcagaacttgaaaagcgcctgacagagctggagacagctgtacgttgtgatcaggatgctcagaatcccctttctgcaggtctacagggagcctgtctcatggagactgtagagctgttgcaagcaaaggtgagcgccctagaccttgcagttttggatcaagtggaggctcggctacagagtgtcctgggaaaggtgaacgagattgccaagcataaagcctctgtagaagatgcagatacacaaagcaaggtgcaccagctatatgaaactatacagcgctggagccccattgcctccaccctccctgagctggtgcagagacttgtcaccatcaagcagctgcacgagcaagccatgcagtttggtcagctcctgacacacttggataccacccagcagatgattgctaattccttgaaggacaataccaccctcttgacccaggtgcagacaaccatgcgtgaaaacctggccacagttgaggggaactttgccagcattgatgaacggatgaagaagctgggaaagtgagcacatttgggagctggagaacaggggttatccctacccctgtgaactctgttaacagcttacatagggtttcccctttactataactctagcatccccatcccatttgacactgggggcaagggttcttcttgcatgtggggtttatacccctcccctgatgaatacagagtggtagctaggggttggttatcatcagaaggtggtctcccctcaggcctgggggataaggacgtgggcccagccacatgccaactcatgtccaatactgctttgcctggtgtggggaaggattgggtcttgtcccccaacacagcttctgtggctgactgtaatactgtacaactgtttctgaccattaaatgctgttgtactctg

SEQ ID NO: 164649 - protein, 251 aa, Artificial Sequence
  derived and/or modified sequence
MDMKRRIHLELRNRTPAAVRELVLDNCKSNDGKIEGLTAEFVNLEFLSLINVGLISVSNLPKLPKLKKLELSENRIFGGLDMLAEKLPNLTHLNLSGNKLKDISTLEPLKKLECLKSLDLFNCEVTNLNDYRESVFKLLPQLTYLDGYDREDQEAPDSDAEVDGVDEEEEDEEGEDEEDEDDEDGEEEEFDEEDDEDEDVEGDEDDDEVSEEEEEFGLDEEDEDEDEDEEEEEGGKGEKRKRETDDEGEDD

SEQ ID NO: 164650 - protein, 156 aa, Artificial Sequence
  derived and/or modified sequence
MLAEKLPNLTHLNLSGNKLKDISTLEPLKKLECLKSLDLFNCEVTNLNDYRESVFKLLPQLTYLDGYDREDQEAPDSDAEVDGVDEEEEDEEGEDEEDEDDEDGEEEEFDEEDDEDEDVEGDEDDDEVSEEEEEFGLDEEDEDEDEDEEEEEGGKG

SEQ ID NO: 164651 - DNA, 756 bp, Artificial Sequence
  derived and/or modified sequence
atggacatgaagagaagaatccacctggagctgagaaacagaacccccgccgccgtgagagagctggtgctggacaactgcaagagcaacgacggcaagatcgagggcctgaccgccgagttcgtgaacctggagttcctgagcctgatcaacgtgggcctgatcagcgtgagcaacctgcccaagctgcccaagctgaagaagctggagctgagcgagaacagaatcttcggcggcctggacatgctggccgagaagctgcccaacctgacccacctgaacctgagcggcaacaagctgaaggacatcagcaccctggagcccctgaagaagctggagtgcctgaagagcctggacctgttcaactgcgaggtgaccaacctgaacgactacagagagagcgtgttcaagctgctgccccagctgacctacctggacggctacgacagagaggaccaggaggcccccgacagcgacgccgaggtggacggcgtggacgaggaggaggaggacgaggagggcgaggacgaggaggacgaggacgacgaggacggcgaggaggaggagttcgacgaggaggacgacgaggacgaggacgtggagggcgacgaggacgacgacgaggtgagcgaggaggaggaggagttcggcctggacgaggaggacgaggacgaggacgaggacgaggaggaggaggagggcggcaagggcgagaagagaaagagagagaccgacgacgagggcgaggacgactag

SEQ ID NO: 164652 - DNA, 1463 bp, Artificial Sequence
  derived and/or modified sequence
ctccgctcccgtgagtaacttggctccgggggctccgctcgcctgcccgcacgccgcccgccacccaggaccgcgccgccggcctccgccgctagcaaacccttccgacggccctcgctgcgcaagccgggacgcctctcccccctccgcccccgccgcggaaagttaagtttgaagaggggggaagaggggaacatggacatgaagaggaggatccacctggagctgaggaaccggaccccggcagctgttcgagaacttgtcttggacaattgcaaatcaaatgatggaaaaattgagggcttaacagctgaatttgtgaacttagagttcctcagtttaataaatgtaggcttgatctcagtttcaaatctccccaagctgcctaaattgaaaaagcttgaactcagtgaaaatagaatctttggaggtctggacatgttagctgaaaaacttccaaatctcacacatctaaacttaagtggaaataaactgaaagatatcagcaccttggaacctttgaaaaagttagaatgtctgaaaagcctggacctctttaactgtgaggttaccaacctgaatgactaccgagagagtgtcttcaagctcctgccccagcttacctacttggatggctatgaccgagaggaccaggaagcacctgactcagatgccgaggtggatggtgtggatgaagaggaggaggacgaagaaggagaagatgaggaagacgaggacgatgaggatggtgaagaagaggagtttgatgaagaagatgatgaagatgaagatgtagaaggggatgaggacgacgatgaagtcagtgaggaggaagaagaatttggacttgatgaagaagatgaagatgaggatgaggatgaagaggaggaagaaggtgggaaaggtgaaaagaggaagagagaaacagatgatgaaggagaagatgattaagaccccagatgacctgcagaaacagaactgttcagtattggttggactgctcatggattttgtagctgtttaaaaaaaaaaaaaaggtagctgtgatacaaaccccaggacacccacccacccaaagagccaaagaatagttcctgtgacattccgccttccttccatgtagtccctcttggtaatctaccaccaagcttgtggacttcaccccaacaaaattgtaagcgttgttaggtttttgtgtaagattcttgctgtagcgtggatagctgtgattggtgagtcaaccgtctgtggctaccagttacactgagattgtaacagcatttttactttctgtacaacaaaaaagctttgtaaataaaatcttaacattttgggtctgttttttcatgctttgctttttaattattattattattttttttacattaggacattttatgtgacaactgccaaaaaagtatttttaagaatttaagcgaaataaacagttactctttggtaaa

SEQ ID NO: 164653 - DNA, 471 bp, Artificial Sequence
  derived and/or modified sequence
atgctggccgagaagctgcccaacctgacccacctgaacctgagcggcaacaagctgaaggacatcagcaccctggagcccctgaagaagctggagtgcctgaagagcctggacctgttcaactgcgaggtgaccaacctgaacgactacagagagagcgtgttcaagctgctgccccagctgacctacctggacggctacgacagagaggaccaggaggcccccgacagcgacgccgaggtggacggcgtggacgaggaggaggaggacgaggagggcgaggacgaggaggacgaggacgacgaggacggcgaggaggaggagttcgacgaggaggacgacgaggacgaggacgtggagggcgacgaggacgacgacgaggtgagcgaggaggaggaggagttcggcctggacgaggaggacgaggacgaggacgaggacgaggaggaggaggagggcggcaagggctag

SEQ ID NO: 164654 - DNA, 756 bp, Artificial Sequence
  derived and/or modified sequence
atggacatgaagcggcgtattcatcttgaactgcgtaaccggacgcccgctgctgtgcgcgagctagtgctcgacaattgtaaatctaacgacggaaagattgagggactcacagctgaatttgtcaatctcgaattcctttcactcattaatgtgggccttatttctgtgtctaatttacccaagctgcccaaattgaagaagctcgagctgtcagaaaaccgcatcttcggcgggctcgacatgctggcagaaaaattgcctaatttgactcatctcaacttgtccggcaacaagctcaaggacatctctacacttgaacccttgaagaagctggaatgcttgaaatccctggaccttttcaattgcgaagtgactaatctgaatgattaccgggaatccgtctttaaattactcccccagctcacctatttagatggttacgacagggaagaccaggaagcacccgatagtgacgcagaggttgacggtgtggatgaagaggaagaagatgaggaaggagaagatgaagaggacgaggacgatgaggatggcgaggaagaagaattcgatgaggaggatgatgaggacgaggacgtagaaggcgatgaggacgacgatgaggtgagtgaggaagaggaagagtttggtcttgatgaggaggacgaagatgaggatgaggatgaggaggaagaagaaggcggcaagggcgagaaacgcaaaagagaaacggacgacgaaggcgaggacgattag

SEQ ID NO: 164655 - DNA, 471 bp, Artificial Sequence
  derived and/or modified sequence
atgcttgctgagaagttacccaatctgactcacttgaacctgagcggaaataaactcaaagacattagtacactcgagcctctcaagaagctggagtgtcttaaaagcctcgatctgttcaactgtgaagttaccaatctgaatgactatcgggagtctgtgttcaaacttctgcctcaactcacatacctggatggctacgatcgggaagatcaagaggcacccgattctgacgcagaagtcgacggagttgatgaggaggaggaagatgaggagggcgaggatgaggaggacgaggacgatgaggatggcgaggaggaagaatttgacgaagaggacgacgaagatgaagatgttgaaggcgacgaagatgacgacgaagtctcagaagaagaagaggagtttggcctggatgaggaagacgaggatgaggatgaggatgaggaggaagaggaaggaggcaaggggtag

SEQ ID NO: 164656 - DNA, 756 bp, Artificial Sequence
  derived and/or modified sequence
atggacatgaagaggcgcatccacctggagctgaggaacagaacaccagctgctgtgcgggagctggtgctggacaactgcaagagcaatgatggcaagattgagggcctgacagctgagtttgtgaacctggagttcctgagcctcatcaacgtgggcctcatctctgtgagcaacctgcccaagctgcccaagctgaagaagctggagctgtctgaaaatcgcatctttggaggcctggacatgctggccgagaagctgcccaacctgacccacctgaacctgagcggcaacaagctgaaggacatcagcaccctggagcccctgaagaagctggagtgcctgaagagcctggacctcttcaactgtgaggtgaccaacctgaatgactaccgggagagcgtcttcaagctgctgccccagctgacctacctggatggctatgaccgggaggaccaggaggccccagacagtgatgctgaggtggatggagtggatgaggaggaggaggatgaggagggagaagatgaggaggatgaagatgatgaagatggagaggaggaggagtttgatgaagaagatgatgaagatgaagatgtggagggagatgaagatgatgatgaggtgtctgaggaggaggaggagtttggcctggatgaagaagatgaagatgaagatgaagatgaggaggaggaggagggcggcaagggggagaagaggaagcgggagacagatgatgaaggagaagatgactag

SEQ ID NO: 164657 - DNA, 471 bp, Artificial Sequence
  derived and/or modified sequence
atgctggccgagaagctgcccaacctgacccacctgaacctgagcggcaacaagctgaaggacatcagcaccctggagcccctgaagaagctggagtgcctgaagagcctggacctcttcaactgtgaggtgaccaacctgaatgactaccgggagagcgtcttcaagctgctgccccagctgacctacctggatggctatgaccgggaggaccaggaggccccagacagtgatgctgaggtggatggagtggatgaggaggaggaggatgaggagggggaggatgaagaagatgaagatgatgaagatggagaggaggaggagtttgatgaggaggatgatgaagatgaagatgtggagggagatgaagatgatgatgaggtgtctgaggaggaggaggagtttggcctggatgaggaggatgaagatgaagatgaagatgaggaggaggaggagggcggcaaaggatag

SEQ ID NO: 164658 - DNA, 756 bp, Artificial Sequence
  derived and/or modified sequence
atggacatgaagcggcggatccacctggagctgcggaaccggaccccagctgctgttcgagagttggtcctggataactgcaagagcaacgacggtaaaattgaggggctgacggccgagttcgtcaatctggaatttcttagcttaatcaacgttggtctgatttccgtctccaacttacctaaacttccaaaacttaagaagttagagctcagcgaaaatcgtatttttgggggtctggatatgctggccgagaaattaccgaaccttactcacctgaatctttcgggcaataaactgaaggatatttcaactctcgagcctctcaaaaaattggaatgcctgaaatctcttgacctgttcaactgcgaagtgacgaatctaaacgattacagggagtccgtcttcaagttgttaccgcagctcacatacctagacggatacgaccgggaggatcaggaggcccctgattctgacgcagaggtggacggagtcgacgaagaggaagaggacgaagagggcgaagatgaggaagatgaggatgacgaggacggcgaggaagaggaattcgacgaggaagacgatgaggatgaagacgtggagggggacgaggatgatgatgaagtttctgaagaagaggaagaattcggattagacgaagaggacgaggacgaggatgaagacgaagaggaggaagaaggaggcaagggggagaaaaggaaacgagaaaccgatgacgagggtgaagatgactag

SEQ ID NO: 164659 - DNA, 471 bp, Artificial Sequence
  derived and/or modified sequence
atgctggccgagaagctgcccaacctgacccacctgaacctgagcgggaacaaactgaaagacatctctacgttggaacctctgaagaagctcgaatgcctgaagtccctggacctgttcaattgcgaggtgactaatctgaatgactacagggaatcagtgtttaaactattaccccagctgacttatcttgatggctacgacagggaggaccaagaagcgcctgatagtgatgccgaagtggatggcgtcgatgaggaagaagaagatgaagagggtgaagatgaggaggacgaagacgacgaggatggggaagaggaggagttcgacgaggaggacgatgaggacgaggacgtcgagggagacgaagatgacgacgaggtcagcgaggaagaggaggagttcgggctcgacgaagaagacgaagacgaggatgaggatgaggaagaagaagaggggggtaaaggttag

SEQ ID NO: 164660 - DNA, 756 bp, Artificial Sequence
  derived and/or modified sequence
atggacatgaagaggaggatccaccttgaattaaggaataggacacccgctgccgtgagggagctcgtactggacaattgtaagagcaatgacggcaagatagagggcctcactgcggagtttgtgaacctggaattcctgagcctgattaacgtgggtctaatatctgtatctaacctaccaaagctccccaagttgaaaaaactcgagctgagtgagaatcggatatttggcggactggatatgctggcagagaaactgcccaatctgacacatctaaatctgtccggcaacaaacttaaggatatcagtacattagagcccctgaagaagttagaatgcctgaagagtctagacctgttcaactgtgaggtcactaacctcaatgattaccgggaatctgtctttaagctgctaccgcagctgacttatctcgacggatatgatcgtgaggatcaggaggcacccgacagtgatgccgaagttgacggagttgatgaagaagaggaggatgaagaaggagaggacgaggaggatgaagacgatgaagacggagaggaagaggaattcgacgaagaagacgatgaggacgaggacgtggagggagacgaagacgatgacgaggtaagtgaagaggaggaagagtttgggctggatgaggaggatgaggacgaagatgaagacgaagaggaagaggaagggggtaagggtgaaaagaggaagagagagactgacgacgagggggaagacgattag

SEQ ID NO: 164661 - DNA, 471 bp, Artificial Sequence
  derived and/or modified sequence
atgctagcggagaaactccccaacctcactcatcttaacctgtcggggaataagctgaaagatatctccactctagaacccctcaagaagttggagtgccttaagtctctggatctgtttaactgcgaggtcaccaatctaaatgactacagagaaagcgtgtttaagttgttgccccagcttacatacttggacggatacgatagagaagatcaggaggctcccgatagcgacgcagaggtcgacggagtggacgaggaggaggaagacgaagagggggaggacgaggaagacgaggatgacgaggatggagaggaagaggaattcgatgaggaggacgacgaagacgaagacgtcgagggcgatgaagacgacgacgaggtcagcgaagaagaggaagaattcggactggatgaagaggacgaggacgaggatgaggacgaggaggaagaagagggaggtaagggttag

SEQ ID NO: 164662 - DNA, 826 bp, Artificial Sequence
  derived and/or modified sequence
tttctctccgctcccgtgagtaacttggctccgggggctccgctcgcctgcccgcacgccgcccgccacccaggaccgcgccgccggcctccgccgctagcaaacccttccgacggccctcgctgcgcaagccgggacgcctctcccccctccgcccccgccgcggaaagttcgagaacttgtcttggacaattgcaaatcaaatgatggaaaaattgagggcttaacagctgaatttgtgaacttagagttcctcagtttaataaatgtaggcttgatctcagtttcaaatctccccaagctgcctaaattgaaaaagcttgaactcagtgaaaatagaatctttggaggtctggacatgttagctgaaaaacttccaaatctcacacatctaaacttaagtggaaataaactgaaagatatcagcaccttggaacctttgaaaaagttagaatgtctgaaaagcctggacctctttaactgtgaggttaccaacctgaatgactaccgagagagtgtcttcaagctcctgccccagcttacctacttggatggctatgaccgagaggaccaggaagcacctgactcagatgccgaggtggatggtgtggatgaagaggaggaggacgaagaaggagaagatgaggaagacgaggacgatgaggatggtgaagaagaggagtttgatgaagaagatgatgaagatgaagatgtagaaggggatgaggacgacgatgaagtcagtgaggaggaagaagaatttggacttgatgaagaagatgaagatgaggatgaggatgaagaggaggaagaaggtgggaaaggt

SEQ ID NO: 164663 - protein, 834 aa, Artificial Sequence
  derived and/or modified sequence
MKYKNLMARALYDNVPECAEELAFRKGDILTVIEQNTGGLEGWWLCSLHGRQGIVPGNRVKLLIGPMQETASSHEQPASGLMQQTFGQQKLYQVPNPQAAPRDTIYQVPPSYQNQGIYQVPTGHGTQEQEVYQVPPSVQRSIGGTSGPHVGKKVITPVRTGHGYVYEYPSRYQKDVYDIPPSHTTQGVYDIPPSSAKGPVFSVPVGEIKPQGVYDIPPTKGVYAIPPSACRDEAGLREKDYDFPPPMRQAGRPDLRPEGVYDIPPTCTKPAGKDLHVKYNCDIPGAAEPVARRHQSLSPNHPPPQLGQSVGSQNDAYDVPRGVQFLEPPAETSEKANPQERDGVYDVPLHNPPDAKGSRDLVDGINRLSFSSTGSTRSNMSTSSTSSKESSLSASPAQDKRLFLDPDTAIERLQRLQQALEMGVSSLMALVTTDWRCYGYMERHINEIRTAVDKVELFLKEYLHFVKGAVANAACLPELILHNKMKRELQRVEDSHQILSQTSHDLNECSWSLNILAINKPQNKCDDLDRFVMVAKTVPDDAKQLTTTINTNAEALFRPGPGSLHLKNGPESIMNSTEYPHGGSQGQLLHPGDHKAQAHNKALPPGLSKEQAPDCSSSDGSERSWMDDYDYVHLQGKEEFERQQKELLEKENIMKQNKMQLEHHQLSQFQLLEQEITKPVENDISKWKPSQSLPTTNSGVSAQDRQLLCFYYDQCETHFISLLNAIDALFSCVSSAQPPRIFVAHSKFVILSAHKLVFIGDTLTRQVTAQDIRNKVMNSSNQLCEQLKTIVMATKMAALHYPSTTALQEMVHQVTDLSRNAQLFKRSLLEMATF

SEQ ID NO: 164664 - DNA, 2505 bp, Artificial Sequence
  derived and/or modified sequence
atgaagtacaagaacctgatggctagggccttgtatgacaatgtgcccgagtgtgctgaggaactggccttccgcaagggagatatcttgaccgtaattgaacaaaacaccgggggcctggaaggatggtggctgtgttctctccatggccgtcagggcattgtgccggggaaccgagtgaaactgctgatcggtccaatgcaggaaaccgcatcttcacacgaacaaccagctagcggtctgatgcagcaaactttcggacagcagaagctgtaccaagtgccaaaccctcaggcggcccccagagataccatctatcaggtgcctccgagctatcagaatcaaggcatttatcaggtgccaactgggcacggaactcaggagcaggaggtttaccaggtgcctccttcggtacagaggtccatcggcggtacaagtgggcctcacgttggcaaaaaagtcatcacaccggtgaggaccgggcacgggtacgtttatgaatatccaagtagatatcagaaggacgtgtacgacatacctcctagccataccactcagggagtgtacgacattccaccatcgtcagccaagggtcctgttttttctgtgcccgtgggcgagatcaaacctcagggagtttacgacatacctcccacaaagggcgtctacgctattcctcccagtgcctgtagggacgaggccggcctccgtgaaaaggactacgattttccacccccaatgcgccaggccgggcggccagatcttagacccgagggcgtttacgacattcccccaacatgtaccaaacccgccggaaaggacctgcacgtgaagtataactgcgatatccctggcgcggctgagccagtcgccaggcggcatcagagtctctctccgaaccatccgccacctcagttagggcagtctgtaggcagtcagaatgatgcctacgacgtcccaaggggtgtgcagttcctcgagccacccgcagagacgagtgagaaagccaatccacaagaaagagatggcgtatacgacgtacctcttcataaccccccagatgctaaggggtccagagatctagtggatggcattaatagattgagcttttcgagcaccggcagcactcgcagtaacatgtccactagctctacttccagcaaagaaagctcactctcagcatctcccgcccaggataaaaggttgttcctggatcccgataccgctatagagcgcctacaacgcctgcagcaagcgctagagatgggcgtcagctcacttatggcgctggtgaccacagattggaggtgttatggatatatggagagacacatcaacgagattagaacagcggtggacaaggtagagttgttcttaaaagagtacctccactttgtgaaaggtgcagtagctaacgctgcttgtttgccagaactgattttacacaataagatgaagcgggaactgcagcgcgtagaggatagccatcagatcctgagccagacatcccatgacctgaatgagtgttcatggagtttaaacattcttgctattaacaagcctcaaaataagtgcgatgacctcgatcgctttgtgatggtcgctaagactgtgccggacgatgcgaaacaactgacaactactattaatacgaatgcagaggccttgttcagacctgggcccgggtcattgcacctgaaaaatggacctgagtcaattatgaacagtactgaatacccccacggagggtcccaaggccagctgctgcaccctggagatcataaagcgcaggcccacaataaggcattaccccccggcctaagcaaagagcaggctcctgactgtagctccagcgacgggtccgagcggtcttggatggacgattacgattacgttcatctgcagggtaaggaagaatttgagcgccagcagaaagaactcttggaaaaggaaaacattatgaagcagaataagatgcagctcgagcatcaccagctaagccagtttcagctgctggagcaggaaatcaccaagccagttgaaaacgatatttctaagtggaagccatctcagagtctccccacaactaattctggagtctccgcccaagatcggcaactattatgtttctattacgatcagtgtgaaacccacttcatttcgctcctaaatgccatcgatgctctgtttagttgtgtgtcttccgcacagcctcctagaatcttcgtggctcacagcaaatttgtgattctcagcgctcacaagctcgtgttcataggggatactcttacccgacaggtcaccgcccaggacatcagaaacaaagtgatgaattcatcgaaccagctgtgcgagcagctcaagacaatcgttatggcgacaaaaatggctgctttgcattatccatctaccaccgcactgcaggaaatggtccaccaggtgactgacctgtctaggaacgcacaactgtttaagaggagtcttctcgaaatggccacgttctag

SEQ ID NO: 164665 - DNA, 2505 bp, Artificial Sequence
  derived and/or modified sequence
atgaagtacaagaacctgatggcccgggccctgtatgacaacgtgcctgaatgtgccgaggagctggccttcaggaagggggacatcctgactgtgattgagcagaacacaggaggcctggagggctggtggctgtgcagcctgcacggccggcagggcatcgtgcccggcaacagagtgaagctgctgattggccccatgcaggagacagccagcagccatgagcagcctgccagcggcctgatgcagcagaccttcggccagcagaagctgtaccaggtgcccaacccccaggccgccccccgggacaccatctaccaggtgcccccatcctaccagaaccagggcatctaccaggtgcccaccggccacggcacccaggagcaggaggtgtaccaggtgcccccatctgtgcagaggagcatcggcggcaccagcggcccccacgtgggcaagaaggtgatcacccctgtgaggacaggccacggctacgtgtatgagtaccccagccgctaccagaaggatgtgtatgacatcccccccagccacaccacccagggcgtgtatgacatcccccccagcagcgccaagggccctgtgttttctgtgcctgtgggggagatcaagccccagggcgtgtatgacatcccccccaccaagggcgtgtatgccatcccccccagcgcctgcagagatgaggccggcctgcgggagaaggactatgacttccccccacccatgaggcaggccggccgcccagacctgcggcctgagggcgtgtatgacatcccccccacctgcaccaagccagctgggaaggacctgcacgtgaagtacaactgtgacatccctggagctgctgagcctgtggcccggcggcaccagagcctgagccccaaccaccccccaccccagctgggccagagcgtgggcagccagaatgatgcctatgatgtgccccggggcgtgcagttcctggagcccccagctgagaccagcgagaaggccaacccccaggagagagatggagtgtatgatgtgcccctgcacaaccccccagatgccaagggcagccgggacctggtggatggcatcaaccggctgtccttcagcagcacaggcagcaccaggagcaacatgagcaccagcagcaccagcagcaaggagagcagcctgagcgccagccctgcccaggacaagaggctcttcctggaccctgacacagccatcgagcggctgcagaggctgcagcaggccctggagatgggcgtgagcagcctgatggccctggtgaccacagactggcgctgctacggctacatggagcggcacatcaatgagatcagaacagctgtggacaaggtggagctgttcctgaaggagtacctgcactttgtgaagggagctgtggccaatgctgcctgcctgcctgagctgatcctgcacaacaagatgaagcgggagctgcagagggtggaggacagccaccagatcctgagccagaccagccatgacctgaatgaatgttcctggagcctgaacatcctggccatcaacaagccccagaacaagtgtgatgacctggacagatttgtgatggtggccaagacagtgcctgatgatgccaagcagctgaccaccaccatcaacaccaatgctgaggccctcttccggcccggccctggcagcctgcacctgaagaatggacctgagagcatcatgaacagcacagagtacccccatggaggcagccagggccagctgctgcaccctggggaccacaaggcccaggcccacaacaaggccctgcccccaggcctgagcaaggagcaggccccagactgcagcagcagtgatggcagcgagaggtcctggatggatgattatgactatgtgcacctgcagggcaaggaggagtttgagcggcagcagaaggagctgctggagaaggagaacatcatgaagcagaacaagatgcagctggagcaccaccagctgagccagttccagctgctggagcaggagatcaccaagcctgtggagaatgacatcagcaagtggaagcccagccagagcctgcccaccaccaacagcggcgtgtctgcccaggaccggcagctgctgtgcttctactatgaccagtgtgagacccacttcatcagcctgctgaatgccattgatgccctcttcagctgtgtgtcctctgcccagcccccacgcatctttgtggcccacagcaagtttgtgatcctgagcgcccacaagctggtgttcatcggggacaccctgacccggcaggtgacagcccaggacatccggaacaaggtgatgaacagcagcaaccagctgtgtgagcagctgaagaccatcgtgatggccaccaagatggccgccctgcactaccccagcaccacagccctgcaggagatggtgcaccaggtgacagacctgagcagaaatgcccagctgttcaagaggagcctgctggagatggccaccttctag

SEQ ID NO: 164666 - DNA, 2505 bp, Artificial Sequence
  derived and/or modified sequence
atgaagtacaagaacctgatggcccgggccctgtacgacaacgtgccagaatgtgcagaagagctagcatttcgaaagggggatattctgaccgtgattgagcaaaataccgggggactggaagggtggtggctttgttcccttcacgggcgccaaggcatcgtaccaggaaatagggtcaaactgttgatcggacctatgcaagagaccgcctcaagccacgaacagcctgcctccggtcttatgcagcagacatttggccagcagaagctgtaccaagtccctaacccccaggccgcccctcgcgacactatctatcaggtgccaccctcttaccagaaccagggtatctatcaggtgccaactggtcatggaactcaggagcaggaagtctaccaggtccccccctccgtgcagcggtcaataggtggcacctctggtccgcatgttggtaaaaaggttatcactccagtgagaactgggcatggctatgtctacgagtacccttcccgttaccagaaagatgtatatgacatcccaccttctcatacaacacagggtgtgtacgacatcccgcccagcagcgctaaaggacccgtcttcagcgtgccagttggagaaatcaagcctcaaggggtctatgacatcccccctaccaaaggggtgtatgcaatccctccaagtgcatgccgagacgaggctggcctccgtgagaaggattatgattttccgcctcctatgcgacaggccggacgccctgatctgagacccgaaggagtgtatgacatcccacctacttgcactaagccagcggggaaggatctgcacgtgaagtacaactgcgacattccaggagccgccgagccagtggctcgccgccatcagagcttatcaccaaaccatccccctcctcaactcggccaaagtgtagggtcacagaacgatgcttacgatgttcccaggggtgtccagtttttagagcctccagctgagacctccgaaaaggccaaccctcaggagagagacggcgtttacgatgtgcctctccataaccctccggatgctaagggaagtagagatttggtggatggaataaaccggctgtcctttagctcaactggatccacaagatccaacatgtctacatctagtacatcttcaaaagagtccagcttatcagcgagccccgcccaggacaaacgtctgtttctcgatcccgatacggccatcgagcgcctccaacggctgcagcaggccctagagatgggagtcagcagccttatggcattagttaccacagattggagatgctacggatatatggagcgccacattaatgagatccgaaccgcagtggacaaggtggaactgttcctcaaggagtacctgcactttgtgaagggcgcagttgctaacgccgcctgcctgcccgaattgatcctgcataataagatgaagcgggaacttcaacgggttgaggactcacatcagatcctgagccagacatcacacgacctcaatgagtgttcttggtccctaaatattctcgcgataaacaaaccgcagaacaagtgcgacgacctcgataggttcgtgatggtagccaagacagtccctgacgacgccaaacagctcactaccacaattaataccaacgccgaggctctcttcagaccaggacctgggtcactgcacctgaagaacgggccggagtccattatgaacagcactgaatatccccatggcggctcccaggggcagctgttgcatccaggcgaccataaagcacaagcgcacaacaaagcccttcctcccggtttgagcaaagaacaggcacctgattgcagtagcagtgatgggagcgagcgatcttggatggacgattacgactacgttcacctccaggggaaagaagagtttgagaggcagcaaaaggaactcctggagaaagagaatattatgaaacagaacaagatgcagcttgaacaccaccaactgtcccagttccagctcttggagcaagagatcaccaaaccagttgaaaatgacatctcaaaatggaaaccttctcaatcactgcccaccaccaactccggagtgtcagcgcaggacagacagctcctctgtttttactacgatcaatgcgagacccattttattagcctgctgaatgcaatcgacgcactgttctcttgcgtgagcagcgctcagccccccaggattttcgtcgcacattccaagtttgtcatactcagtgcccataaactagtattcataggggacaccctaacacgacaggtgacagcacaagacatcagaaacaaggtaatgaattccagtaatcagctctgcgaacagctgaagaccatagtcatggcaacaaagatggccgcgctgcattacccttccaccaccgccctccaagagatggtacaccaagtaacagatctctcaagaaacgctcagctgtttaagcgctctttgctggagatggccacattctag

SEQ ID NO: 164667 - DNA, 4536 bp, Artificial Sequence
  derived and/or modified sequence
acaacagtgagctcagagacttgagggaggcgctgcgactgacaagcggctctgcccgggaccttctcgctttcatctagcgctgcactcaatggaggggcgggcaccgcagtgcttaatgctgtcttaactagtgtaggaaaacggctcaacccaccgctgccgaaatgaagtataagaatcttatggcaagggccttatatgacaatgtcccagagtgtgccgaggaactggcctttcgcaagggagacatcctgaccgtcatagagcagaacacagggggactggaaggatggtggctgtgctcattacacggtcggcaaggcattgtcccaggcaaccgggtgaagcttctgattggtcccatgcaggagactgcctccagtcacgagcagcctgcctctggactgatgcagcagacctttggccaacagaagctctatcaagtgccaaacccacaggctgctccccgagacaccatctaccaagtgccaccttcctaccaaaatcagggaatttaccaagtccccactggccacggcacccaagaacaagaggtatatcaggtgccaccatcagtgcagagaagcattgggggaaccagtgggccccacgtgggtaaaaaggtgataacccccgtgaggacaggccatggctacgtatacgagtacccatccagataccaaaaggacgtctatgatatccctccttctcataccactcaaggggtatacgacatccctccctcatcagcaaaaggccctgtgttttcagttccagtgggagagataaaacctcaaggggtgtatgacatcccgcctacaaaaggggtatatgccattccgccctctgcttgccgggatgaagcagggcttagggaaaaagactatgacttcccccctcccatgagacaagctggaaggccggacctcagaccggagggggtttatgacattcctccaacctgcaccaagccagcagggaaggaccttcatgtaaaatacaactgtgacattccaggagctgcagaaccggtggctcgaaggcaccagagcctgtccccgaatcacccacccccgcaactcggacagtcagtgggctctcagaacgacgcatatgatgtcccccgaggcgttcagtttcttgagccaccagcagaaaccagtgagaaagcaaacccccaggaaagggatggtgtttatgatgtccctctgcataacccgccagatgctaaaggctctcgggacttggtggatgggatcaaccgattgtctttctccagtacaggcagcacccggagtaacatgtccacgtcttccacctcctccaaggagtcctcactgtcagcctccccagctcaggacaaaaggctcttcctggatccagacacagctattgagagacttcagcggctccagcaggcccttgagatgggtgtctccagcctaatggcactggtcactaccgactggcggtgttacggatatatggaaagacacatcaatgaaatacgcacagcagtggacaaggtggagctgttcctgaaggagtacctccactttgtcaagggagctgttgcaaatgctgcctgcctcccggaactcatcctccacaacaagatgaagcgggagctgcaacgagttgaagactcccaccagatcctgagtcaaaccagccatgacttaaatgagtgcagctggtccctgaatatcttggccatcaacaagccccagaacaagtgtgacgatctggaccggtttgtgatggtggcaaagacggtgcccgatgacgccaagcagctcaccacaaccatcaacaccaacgcagaggccctcttcagacccggccctggcagcttgcatctgaagaatgggccggagagcatcatgaactcaacggagtacccacacggtggctcccagggacagctgctgcatcctggtgaccacaaggcccaggcccacaacaaggcactgcccccaggcctgagcaaggagcaggcccctgactgtagcagcagtgatggttctgagaggagctggatggatgactacgattacgtccacctacagggtaaggaggagtttgagaggcaacagaaagagctattggaaaaagagaatatcatgaaacagaacaagatgcagctggaacatcatcagctgagccagttccagctgttggaacaagagattacaaagcccgtggagaatgacatctcgaagtggaagccctctcagagcctacccaccacaaacagtggcgtgagtgctcaggatcggcagttgctgtgcttctactatgaccaatgtgagacccatttcatttcccttctcaacgccattgacgcactcttcagttgtgtcagctcagcccagcccccgcgaatcttcgtggcacacagcaagtttgtcatcctcagtgcacacaaactggtgttcattggagacacgctgacacggcaggtgactgcccaggacattcgcaacaaagtcatgaactccagcaaccagctctgcgagcagctcaagaccatagtcatggcaaccaagatggccgccctccattaccccagcaccacggccctgcaggaaatggtgcaccaagtgacagacctttctagaaatgcccagctgttcaagcgctctttgctggagatggcaacgttctgagaagaaaaaaaagaggaaggggactgcgttaacggttactaaggaaaactggaaatactgtctggtttttgtaaatgttatctatttttgtagatattttatataaaaatgaaatattttaacattttatgggtcagtcaactttcagaaattcagggagctggagagggaaatctttttttttccccctgagtggttcttatgtatacatagaagtatctgagacataaactgtacagaaaacttgtccacgtgcttttgtatgcccatgtattcatgtttgtttgtagatgtttgtctgatgcatttcattaaaaaaaaaaccatgaattacgaagcaccttagtaagcaccttctaatgctgcattttttttgttgttgttaaaaacataccagctggttataatattgttctccacgtccttgtgatgattctgagcctggcactcccaaatctgggaagcatagtttatttgcaagtgttcaccttccaaatcatgaggcatagcatgacttattcttgtttggaaaactcttttcaaaactgaccatcttaaacacatgatggccaagtgcccaaaagccctcttgcggagcaaatttcagaatatatatgtggatccaagctctgatagttcaggtgctggagggaagagagacctgtgtgtttagaggccaggaccacagttaggattgggttgtttcaatactgagagacagctacaataaaaggagagcaattgcctccctggggctgttcaatcttctgcatttgtgagtggttcagtcatgaggttttccaaaagatgtttttagagttgtaaaaaccatatttgcagcaaagatttacaaaggcgtatcagactatgattgttcaccaaaataggggaatggtttgatccgccagttgcaagtagaggcctttctgactcttaatattcactttggtgctactacccccattacctgagggaaactggccaggtccttgatcatggaactatagagctaccaggacatatcctgctctctaagggaatttattgctatcttgcaccttctttaaaactcacatatgcagacctgacactcaagagtggctagctacacagagtccatctaatttttgcaacttcctgtggccagtgtgtataaccccttccactatctcacagatagtcacagcgtccattccatagtctgtctcctcacatctgttagtattgacacagcacagacaccacaagccatcaggttcttcatggggcaggtgaaatacttctaccccatgggtaaatgtattcacatattaccaagagaagaagcacattatctatgatcttttggcccagttcttatttagcatttttattccagcctacttggaaacatgtttttatttgcaatatatgcctgactgaattaagcttgcttgttttaaacaaccaaatcattggaacagaaaaggatttaaaaaacaagaatgcatgatctcagagtgattaaaaaaaaatcagtggaaataaatgatcatagaaggtgcttttcaaaacaactgctattataattctcaaagtcctactctgccaaaagaagattaaaagtcatacattacattacaaggaaatgttcatgtgggaagagggttgctgaaaatcaacaacgcttgaagttaaaaagtgtgtctttgtagatttcattgtataatgtgtatttcttaggagatggctgacttgattgatctacgctaagtggagacatttcacatttttaaaaccaaatgttcaatctgtattactctttgccgtcttgtatgtagaggctatttttaaatcattaaatttttagatctctgttttcata

SEQ ID NO: 164668 - DNA, 2505 bp, Artificial Sequence
  derived and/or modified sequence
atgaagtacaagaacctgatggccagggccctgtatgataacgtgcccgagtgtgccgaggaactggcattcaggaagggcgacattcttacggtcatcgagcagaatacaggaggcctggaaggctggtggctttgcagtctacacggccgacagggcatcgttcccggtaaccgggtgaaactattaatcggcccaatgcaagagaccgcatcgtcacacgagcagcccgctagcggattaatgcagcagactttcggccagcaaaaactgtaccaggtgcctaatccacaagccgcaccgagagacactatctatcaggttccaccttcttaccagaatcaggggatctatcaggttcccactggtcacggaactcaagaacaggaagtatatcaggtccctcccagcgtgcagcggtcaatagggggtaccagtggaccccacgtgggaaagaaggtgatcacacctgtgaggactggccatggctacgtgtacgaatacccttctagataccaaaaggacgtttacgatattcccccttctcacaccacccagggcgtctacgacattcccccttcaagcgcaaaaggtcctgtgttttccgtgcccgttggtgagattaagccgcaaggtgtttatgatattcctcccactaaaggggtttatgccatacctccttctgcatgtcgggatgaggctggtctgcgagagaaggactatgactttccaccccctatgcgacaggccggtaggcccgatctacggcctgagggagtgtatgacatcccacctacctgtaccaaaccagctgggaaggacctccacgtcaaatataactgcgacattcctggagcagctgagcccgtagcccgacggcatcagagtttatctcccaatcatcccccaccgcagcttgggcaaagtgtgggaagtcagaacgatgcatacgacgtgccgcgaggcgtgcagtttcttgaacctccagctgagacatctgagaaggccaacccacaggagagagatggtgtgtacgacgtccctctgcacaatcctcctgacgcaaagggctcccgcgacctggtggacggcatcaatagactgtcattctcttcgaccggatcgacccgcagtaatatgtctacctcttctacttccagcaaggaatcttccctgtccgctagcccagcccaagacaaacgcttatttctcgatcccgacacagccatagagcgtctccagcgactccaacaggcccttgagatgggcgtttcatccctgatggctttagtgactaccgactggaggtgttacggatatatggaaaggcatataaatgaaatccgtaccgcagttgacaaggtggagctgttccttaaagaatacttgcactttgtaaaaggggcagtcgcgaatgctgcttgccttccagaacttattctgcacaacaaaatgaaacgggaacttcagcgcgtggaagacagccaccagatactgtcccagacgtctcacgatctgaatgagtgctcctggtcccttaatatcctagcaattaataagccacagaataagtgtgacgacctggaccgatttgtcatggtggcaaaaacagtacctgacgatgcgaagcaactcaccactactattaacaccaatgccgaagctttgttcagaccaggccctggcagcctgcacttgaagaatggaccggaatcgatcatgaatagtaccgaatatcctcacggaggtagccaggggcagctcctccaccctggcgatcataaggctcaagcacataataaggccctacccccaggcctgtctaaggagcaggcccctgactgttcatctagcgacgggagcgaacgtagctggatggacgactatgattacgtccaccttcaggggaaggaggaattcgagagacagcagaaggagctgctcgagaaggagaatataatgaagcagaataaaatgcagctggagcaccatcagttaagtcagtttcaactacttgagcaagagatcaccaaacccgtagaaaacgatataagcaagtggaagccaagtcaatccttgccaacaaccaacagtggcgtgtccgcccaagatcggcagctgctgtgcttttactatgaccagtgcgagactcacttcataagcctgttgaatgctatcgacgcactattctcctgtgtcagctccgcccagcccccacgcatcttcgttgctcactctaagtttgttatactttcagcgcacaaactggtttttataggagacacgctaacacgtcaggtcacagcgcaagatatcaggaataaagtgatgaactcctcaaaccagctgtgcgagcaactcaaaactattgtaatggcaactaagatggccgcacttcattaccctagtacaacagccctgcaggagatggtacatcaggttaccgacttgagtcgcaacgcccagttgttcaagcgcagcctattagaaatggccactttttag

SEQ ID NO: 164669 - DNA, 2505 bp, Artificial Sequence
  derived and/or modified sequence
atgaagtacaagaacctgatggccagagccctgtacgacaacgtgcccgagtgcgccgaggagctggccttcagaaagggcgacatcctgaccgtgatcgagcagaacaccggcggcctggagggctggtggctgtgcagcctgcacggcagacagggcatcgtgcccggcaacagagtgaagctgctgatcggccccatgcaggagaccgccagcagccacgagcagcccgccagcggcctgatgcagcagaccttcggccagcagaagctgtaccaggtgcccaacccccaggccgcccccagagacaccatctaccaggtgccccccagctaccagaaccagggcatctaccaggtgcccaccggccacggcacccaggagcaggaggtgtaccaggtgccccccagcgtgcagagaagcatcggcggcaccagcggcccccacgtgggcaagaaggtgatcacccccgtgagaaccggccacggctacgtgtacgagtaccccagcagataccagaaggacgtgtacgacatcccccccagccacaccacccagggcgtgtacgacatcccccccagcagcgccaagggccccgtgttcagcgtgcccgtgggcgagatcaagccccagggcgtgtacgacatcccccccaccaagggcgtgtacgccatcccccccagcgcctgcagagacgaggccggcctgagagagaaggactacgacttccccccccccatgagacaggccggcagacccgacctgagacccgagggcgtgtacgacatcccccccacctgcaccaagcccgccggcaaggacctgcacgtgaagtacaactgcgacatccccggcgccgccgagcccgtggccagaagacaccagagcctgagccccaaccacccccccccccagctgggccagagcgtgggcagccagaacgacgcctacgacgtgcccagaggcgtgcagttcctggagccccccgccgagaccagcgagaaggccaacccccaggagagagacggcgtgtacgacgtgcccctgcacaacccccccgacgccaagggcagcagagacctggtggacggcatcaacagactgagcttcagcagcaccggcagcaccagaagcaacatgagcaccagcagcaccagcagcaaggagagcagcctgagcgccagccccgcccaggacaagagactgttcctggaccccgacaccgccatcgagagactgcagagactgcagcaggccctggagatgggcgtgagcagcctgatggccctggtgaccaccgactggagatgctacggctacatggagagacacatcaacgagatcagaaccgccgtggacaaggtggagctgttcctgaaggagtacctgcacttcgtgaagggcgccgtggccaacgccgcctgcctgcccgagctgatcctgcacaacaagatgaagagagagctgcagagagtggaggacagccaccagatcctgagccagaccagccacgacctgaacgagtgcagctggagcctgaacatcctggccatcaacaagccccagaacaagtgcgacgacctggacagattcgtgatggtggccaagaccgtgcccgacgacgccaagcagctgaccaccaccatcaacaccaacgccgaggccctgttcagacccggccccggcagcctgcacctgaagaacggccccgagagcatcatgaacagcaccgagtacccccacggcggcagccagggccagctgctgcaccccggcgaccacaaggcccaggcccacaacaaggccctgccccccggcctgagcaaggagcaggcccccgactgcagcagcagcgacggcagcgagagaagctggatggacgactacgactacgtgcacctgcagggcaaggaggagttcgagagacagcagaaggagctgctggagaaggagaacatcatgaagcagaacaagatgcagctggagcaccaccagctgagccagttccagctgctggagcaggagatcaccaagcccgtggagaacgacatcagcaagtggaagcccagccagagcctgcccaccaccaacagcggcgtgagcgcccaggacagacagctgctgtgcttctactacgaccagtgcgagacccacttcatcagcctgctgaacgccatcgacgccctgttcagctgcgtgagcagcgcccagccccccagaatcttcgtggcccacagcaagttcgtgatcctgagcgcccacaagctggtgttcatcggcgacaccctgaccagacaggtgaccgcccaggacatcagaaacaaggtgatgaacagcagcaaccagctgtgcgagcagctgaagaccatcgtgatggccaccaagatggccgccctgcactaccccagcaccaccgccctgcaggagatggtgcaccaggtgaccgacctgagcagaaacgcccagctgttcaagagaagcctgctggagatggccaccttctag

SEQ ID NO: 164670 - protein, 238 aa, Artificial Sequence
  derived and/or modified sequence
MLTTLLPILLLSGWAFCSQDASDGLQRLHMLQISYFRDPYHVWYQGNASLGGHLTHVLEGPDTNTTIIQLQPLQEPESWARTQSGLQSYLLQFHGLVRLVHQERTLAFPLTIRCFLGCELPPEGSRAHVFFEVAVNGSSFVSFRPERALWQADTQVTSGVVTFTLQQLNAYNRTRYELREFLEDTCVQYVQKHISAENTKGSQTSRSYTSLVLGVLVGSFIIAGVAVGIFLCTGGRRC

SEQ ID NO: 164671 - DNA, 717 bp, Artificial Sequence
  derived and/or modified sequence
atgctgaccaccctgctccctattttattattatctgggtgggcattctgctcccaagatgcctccgacggcttacagcgactgcatatgctgcagatttcatattttcgggacccttaccatgtgtggtatcaaggcaatgcatctctggggggacatctgacccatgttctcgagggccccgacaccaataccactataatccagttgcagccactgcaagaacctgagtcctgggccagaacacagtctgggctgcagagctacctgctgcaatttcatggattggtgcgactggtgcaccaggaacgaaccctagcctttccgctaacaataaggtgcttcctgggatgcgagttgcctcccgaaggttcgagggcccatgtgttcttcgaggtagcagtgaacggaagcagctttgtgtcattccgccccgagcgagccctctggcaggcggacactcaggttacctccggagttgttacctttaccctgcagcagctgaatgcatacaaccgcacgcggtatgagctgcgggagttcctcgaagacacttgtgtgcagtatgttcaaaaacatatcagtgccgaaaacaccaaaggttcacagactagcaggtcatatacctctttggtcctcggcgtgttagtcggcagctttattattgctggcgtggcggtgggcattttcctctgcacaggagggcgccggtgttag

SEQ ID NO: 164672 - DNA, 717 bp, Artificial Sequence
  derived and/or modified sequence
atgctgactactctactgcctatactgctgctgtctggctgggccttctgttcgcaggacgcctccgatggcctacagcgcttacacatgctgcagatctcttatttccgcgatccctaccatgtctggtatcagggcaacgctagcctcggggggcatcttactcacgtgctggaggggccagacacaaatactacaatcatacagcttcagccactgcaggagcccgaaagctgggcccgtacacagtccgggctgcaaagttatctgttgcaatttcatggtctggtgagattggttcaccaggagagaacactggcatttcccttgacaatcaggtgctttcttgggtgtgagctcccccccgagggaagccgcgctcatgtgttctttgaagtggctgtcaatgggtcatccttcgtgtcttttagacctgaaagggccctgtggcaggccgatacacaagtgacgagtggtgtggtgacgttcactctgcagcagttaaatgcttataatagaactcgatatgagttgcgcgagttcctggaagatacttgtgtgcagtacgtccagaaacacatcagcgctgaaaacacaaagggctcgcagaccagccgttcctacacttctctcgtgctgggcgtgttggttgggtcttttattattgcgggagtggctgtgggaattttcctctgtacagggggccggcggtgctag

SEQ ID NO: 164673 - DNA, 717 bp, Artificial Sequence
  derived and/or modified sequence
atgctgaccaccctgctgcccatcctgctgctgagcggctgggccttctgcagccaggatgccagtgatggcctgcagaggctgcacatgctgcagatctcctacttccgggacccctaccacgtgtggtaccagggcaatgccagcctgggcggccacctgacccacgtgctggagggccctgacaccaacaccaccatcatccagctgcagcccctgcaggagcctgagagctgggcccggacccagagcggcctgcagagctacctgctgcagttccacggcctggtgcggctggtgcaccaggagaggaccctggccttccccctgaccatccgctgcttcctgggctgtgagctgcccccagagggcagccgggcccacgtgttctttgaggtggccgtgaatggcagcagctttgtgtccttccggcctgagcgggccctgtggcaggccgacacccaggtgaccagcggcgtggtgaccttcaccctgcagcagctgaatgcctacaacagaaccaggtatgagctgcgggagttcctggaggacacctgtgtgcagtatgtgcagaagcacatctctgctgagaacaccaagggcagccagaccagccgcagctacaccagcctggtgctgggcgtgctggtgggcagcttcatcatcgccggcgtggccgtgggcatcttcctgtgcacaggaggccgccgctgctag

SEQ ID NO: 164674 - DNA, 717 bp, Artificial Sequence
  derived and/or modified sequence
atgctgaccaccctgctgcccatcctgctgctgagcggctgggccttctgcagtcaggatgccagtgatggcctacagcgcctgcatatgcttcaaatctcctactttagggacccttaccacgtatggtaccagggaaatgcatctctagggggtcatctgacccatgtcctggagggcccggacaccaacaccactattatccagctccagccgctgcaggaacctgaatcttgggcgcgcacgcagagcggattgcagtcctacctgttgcagttccacggccttgtcaggcttgtgcaccaggagaggacactggcctttcctctgaccattagatgtttccttggttgtgagctgccgccagagggctctcgggcgcatgtcttcttcgaggtggcggtgaacggatcttccttcgtctccttccggccagagagagcactgtggcaagccgatactcaggtaacttccggggtcgtaacttttaccctgcagcagctcaacgcatacaatagaacacgttatgagctacgggagtttctggaggacacctgtgtgcagtatgtgcagaaacatatttccgcggaaaataccaagggttcccagacctcccgaagctatacatcactggtgctgggcgtcctagtgggtagctttattatagctggcgtggccgtgggaatctttctatgcaccggcggtaggcgttgctag

SEQ ID NO: 164675 - DNA, 717 bp, Artificial Sequence
  derived and/or modified sequence
atgctgaccaccctgctgcccatcctgctgctgagcggctgggccttctgtagtcaagacgcaagcgacggcttgcaacgtctgcacatgttgcagatatcctatttccgcgacccgtatcacgtgtggtaccagggtaacgctagtctaggtggccacctgacccatgtgctcgaagggccggacacaaacacaacaatcattcaactccaacctctgcaggaaccggaaagctgggcgcgaacccagagtggcctccagtcctatctgctgcaatttcacggcctggttcgtctggtgcaccaagagcgcaccctcgcgtttcccctgacaatcaggtgctttttaggttgtgagctgcctccggagggaagtcgcgcccatgtctttttcgaggtggcagtgaatggttcttccttcgtaagtttccgtccagaacgagcactgtggcaagccgacacacaggtaacttccggggtggtgacttttaccctgcaacagctcaacgcttacaatcgaacaagatatgaactgcgagagttccttgaggacacttgtgtacaatatgtccagaaacatatatctgctgagaataccaaaggttcccaaacgtctcggagttatacatccttggtgttgggagtgctggttgggagcttcattatcgcaggtgtcgccgtgggaatttttctctgcacagggggacggcgatgttag

SEQ ID NO: 164676 - DNA, 717 bp, Artificial Sequence
  derived and/or modified sequence
atgctcactaccttgctacccattcttctgctatctggatgggctttttgtagccaggacgcatccgacggtctgcaaaggttgcatatgttacaaatctcatatttccgagatccatatcacgtttggtatcaggggaacgcctccttgggaggccatcttacccatgtgctggaggggcctgatactaatactactatcatacagctgcagcccctgcaagagccagagagctgggccagaactcagagcggcctccagtcatacctcctccagttccacggcctggtccgcttagtgcaccaggaacgcacactagcattcccccttactattaggtgttttctgggctgcgagctccctccagaaggaagccgagcacacgttttcttcgaagtagccgtcaacggcagttccttcgtgtcttttcgaccagagcgcgctttgtggcaggcagacacccaagtcacaagcggagtggtgacctttacgctgcagcagctcaacgcttacaataggaccagatatgagctgagggaattcctagaagatacttgcgtgcagtacgtccagaaacacattagcgccgagaacaccaaggggtctcagaccagccggtcgtatacctccctcgtgctaggagtgctggtcggttctttcatcatcgccggagtcgctgtcggcattttcttgtgcaccggcggacggcgatgctag

SEQ ID NO: 164677 - DNA, 1449 bp, Artificial Sequence
  derived and/or modified sequence
gacacagtagaaataacactttataagcctcttcctcctcccatctcctggcctccttccatcctcctctgcccagactccgcccctcccagacggtcctcacttctcttttccctagactgcagccagcggagcccgcagccggcccgagccaggaacccaggtccggagcctcaacttcaggatgttgacaacattgctgccgatactgctgctgtctggctgggccttttgtagccaagacgcctcagatggcctccaaagacttcatatgctccagatctcctacttccgcgacccctatcacgtgtggtaccagggcaacgcgtcgctggggggacacctaacgcacgtgctggaaggcccagacaccaacaccacgatcattcagctgcagcccttgcaggagcccgagagctgggcgcgcacgcagagtggcctgcagtcctacctgctccagttccacggcctcgtgcgcctggtgcaccaggagcggaccttggcctttcctctgaccatccgctgcttcctgggctgtgagctgcctcccgagggctctagagcccatgtcttcttcgaagtggctgtgaatgggagctcctttgtgagtttccggccggagagagccttgtggcaggcagacacccaggtcacctccggagtggtcaccttcaccctgcagcagctcaatgcctacaaccgcactcggtatgaactgcgggaattcctggaggacacctgtgtgcagtatgtgcagaaacatatttccgcggaaaacacgaaagggagccaaacaagccgctcctacacttcgctggtcctgggcgtcctggtgggcagtttcatcattgctggtgtggctgtaggcatcttcctgtgcacaggtggacggcgatgttaattactctccagccccctcagaaggggctggattgatggaggctggcaagggaaagtttcagctcactgtgaagccagactccccaactgaaacaccagaaggtttggagtgacagctcctttcttctcccacatctgcccactgaagatttgagggaggggagatggagaggagaggtggacaaagtacttggtttgctaagaacctaagaacgtgtatgctttgctgaattagtctgataagtgaatgtttatctatctttgtggaaaacagataatggagttggggcaggaagcctatggcccatcctccaaagacagacagaatcacctgaggcgttcaaaagatataaccaaataaacaagtcatccacaatcaaaatacaacattcaatacttccaggtgtgtcagacttgggatgggacgctgatataatagggtagaaagaagtaacacgaagaagtggtggaaatgtaaaatccaagtcatatggcagtgatcaattattaatcaattaataatattaataaatttcttatatttaaggc

SEQ ID NO: 164678 - DNA, 1538 bp, Artificial Sequence
  derived and/or modified sequence
agacagaatcttgccgcatgacccaggctagaatgcagtggtgtgatctcggccctctgcaacctccacctcccagagacgttcgccatattggccaggctggtctcaaactcctggcctcaagtgatctgcccacctcggcctcccaaagtgccagcagcatgctcggaggagtgactttaaagcttttctacttgcttcctagaactgcagccagcggagcccgcagccggcccgagccaggaacccaggtccggagcctcaacttcaggatgttgacaacattgctgccgatactgctgctgtctggctgggccttttgtagccaagacgcctcagatggcctccaaagacttcatatgctccagatctcctacttccgcgacccctatcacgtgtggtaccagggcaacgcgtcgctggggggacacctaacgcacgtgctggaaggcccagacaccaacaccacgatcattcagctgcagcccttgcaggagcccgagagctgggcgcgcacgcagagtggcctgcagtcctacctgctccagttccacggcctcgtgcgcctggtgcaccaggagcggaccttggcctttcctctgaccatccgctgcttcctgggctgtgagctgcctcccgagggctctagagcccatgtcttcttcgaagtggctgtgaatgggagctcctttgtgagtttccggccggagagagccttgtggcaggcagacacccaggtcacctccggagtggtcaccttcaccctgcagcagctcaatgcctacaaccgcactcggtatgaactgcgggaattcctggaggacacctgtgtgcagtatgtgcagaaacatatttccgcggaaaacacgaaagggagccaaacaagccgctcctacacttcgctggtcctgggcgtcctggtgggcagtttcatcattgctggtgtggctgtaggcatcttcctgtgcacaggtggacggcgatgttaattactctccagccccctcagaaggggctggattgatggaggctggcaagggaaagtttcagctcactgtgaagccagactccccaactgaaacaccagaaggtttggagtgacagctcctttcttctcccacatctgcccactgaagatttgagggaggggagatggagaggagaggtggacaaagtacttggtttgctaagaacctaagaacgtgtatgctttgctgaattagtctgataagtgaatgtttatctatctttgtggaaaacagataatggagttggggcaggaagcctatggcccatcctccaaagacagacagaatcacctgaggcgttcaaaagatataaccaaataaacaagtcatccacaatcaaaatacaacattcaatacttccaggtgtgtcagacttgggatgggacgctgatataatagggtagaaagaagtaacacgaagaagtggtggaaatgtaaaatccaagtcatatggcagtgatcaattattaatcaattaataatattaataaatttcttatatttaaggca

SEQ ID NO: 164679 - DNA, 717 bp, Artificial Sequence
  derived and/or modified sequence
atgctgacaaccttgctgccaattctgttgctctccgggtgggctttctgtagccaagacgcttccgacgggctccagagattgcatatgttgcagatttcctatttcagggatccctatcatgtgtggtaccaggggaacgcgtctcttgggggtcatcttacccacgtgcttgagggccctgacactaacaccacgattattcagcttcagccattgcaggagccagagtcttgggccagaacccagagcggtctgcagagctatcttctccagtttcatgggctggtacggcttgtccaccaggaacggaccttggcctttcctctcaccatccgttgtttcctgggctgtgagctgccacccgaggggtcaagggcacacgtgttcttcgaggtcgccgtgaacggatcaagctttgtgtcctttcgtcctgagcgcgcactgtggcaagcagacactcaagtgacgtccggggtggtcacgttcactcttcagcagctgaacgcctacaatcggaccagatacgaactgcgagagttccttgaagacacgtgcgtgcagtatgtccagaaacacatctcagctgagaatactaaagggtcacagacttcccgctcttacacgtccttggtcctgggtgtgcttgttgggagttttatcatcgctggggtggctgtaggtatattcctgtgtaccggaggtcgcagatgctag

SEQ ID NO: 164680 - DNA, 717 bp, Artificial Sequence
  derived and/or modified sequence
atgctgaccaccctgctgcccatcctgctgctgagcggctgggccttctgcagccaggacgccagcgacggcctgcagagactgcacatgctgcagatcagctacttcagagacccctaccacgtgtggtaccagggcaacgccagcctgggcggccacctgacccacgtgctggagggccccgacaccaacaccaccatcatccagctgcagcccctgcaggagcccgagagctgggccagaacccagagcggcctgcagagctacctgctgcagttccacggcctggtgagactggtgcaccaggagagaaccctggccttccccctgaccatcagatgcttcctgggctgcgagctgccccccgagggcagcagagcccacgtgttcttcgaggtggccgtgaacggcagcagcttcgtgagcttcagacccgagagagccctgtggcaggccgacacccaggtgaccagcggcgtggtgaccttcaccctgcagcagctgaacgcctacaacagaaccagatacgagctgagagagttcctggaggacacctgcgtgcagtacgtgcagaagcacatcagcgccgagaacaccaagggcagccagaccagcagaagctacaccagcctggtgctgggcgtgctggtgggcagcttcatcatcgccggcgtggccgtgggcatcttcctgtgcaccggcggcagaagatgctag

SEQ ID NO: 164681 - protein, 186 aa, Artificial Sequence
  derived and/or modified sequence
MEALPLLAATTPDHGRHRRLLLLPLLLFLLPAGAVQGWETEERPRTREEECHFYAGGQVYPGEASRVSVADHSLHLSKAKISKPAPYWEGTAVIDGEFKELKLTDYRGKYLVFFFYPLDFTFVCPTEIIAFGDRLEEFRSINTEVVACSVDSQFTHLAWSVSYTYIRRKKRMDLLLKHGQITLDMI

SEQ ID NO: 164682 - protein, 271 aa, Artificial Sequence
  derived and/or modified sequence
MEALPLLAATTPDHGRHRRLLLLPLLLFLLPAGAVQGWETEERPRTREEECHFYAGGQVYPGEASRVSVADHSLHLSKAKISKPAPYWEGTAVIDGEFKELKLTDYRGKYLVFFFYPLDFTFVCPTEIIAFGDRLEEFRSINTEVVACSVDSQFTHLAWINTPRRQGGLGPIRIPLLSDLTHQISKDYGVYLEDSGHTLRGLFIIDDKGILRQITLNDLPVGRSVDETLRLVQAFQYTDKHGEVCPAGWKPGSETIIPDPAGKLKYFDKLN

SEQ ID NO: 164683 - protein, 161 aa, Artificial Sequence
  derived and/or modified sequence
  misc_feature (1)..(1): Xaa can be any naturally occurring amino acid
XCPTEIIAFGDRLEEFRSINTEVVACSVDSQFTHLAWINTPRRQGGLGPIRIPLLSDLTHQISKDYGVYLEDSGHTLRGLFIIDDKGILRQITLNDLPVGRSVDETLRLVQAFQYTDKHGEVCPAGWKPGSETIKPEDTMKAWWPRESYNPRSSWKAEVFR

SEQ ID NO: 164684 - DNA, 561 bp, Artificial Sequence
  derived and/or modified sequence
atggaagccctgccgctgctggctgccaccacaccagatcacggcagacaccgcaggctgctccttctgccactcctcctgttcctattgcctgcaggagcagtgcagggctgggagacagaggaaagacccagaacacgggaggaggaatgtcatttttacgccggaggacaggtgtatcccggagaggccagtcgcgtgagtgttgcagaccattccctacacttgagcaaagcaaagatcagtaagcccgcaccctattgggaaggcacggcggtcatagatggtgagtttaaggaactgaaattgaccgactacagaggaaagtacctggttttctttttctatcctctcgacttcacattcgtgtgtccaactgaaatcatcgccttcggagacagactagaggagttccgatcgattaatacagaggtggtggcatgttcagtagacagccagttcacccacctggcctggtccgtttcctatacatacattcgcagaaagaagaggatggacctattactgaagcacggacagatcacgttggatatgatttag

SEQ ID NO: 164685 - DNA, 816 bp, Artificial Sequence
  derived and/or modified sequence
atggaagctctgcccttactggccgcaaccacaccagaccatggccgacacaggcgcctcctcctcctccccttgctcctgttcctgctgcctgctggagcagtgcagggatgggaaaccgaggaaaggcccagaactcgggaagaagaatgccatttctacgccggaggccaggtgtatccaggcgaagcatccagagtaagcgtcgccgaccattcgctgcatttgagcaaagccaaaatcagcaagcccgcaccctactgggaaggaactgctgtcatcgatggcgagttcaaggaacttaagctgaccgactatcgcggaaagtacctggtcttctttttctaccccctcgatttcacgtttgtctgccctaccgaaattatcgcttttggcgatcgacttgaggaatttcgatctataaacacagaagtggttgcttgtagtgtggattcacagtttacacatctagcatggatcaatacaccacgacggcaaggcggtctgggccctatccgcattcctctacttagcgatttaacccaccagatctccaaagactacggtgtatacctggaagattccggacacacactgcgcggacttttcatcatcgatgacaaaggaatcctgcggcagatcacactgaatgaccttcctgttggcaggtctgttgatgaaacgctgaggctcgtacaggctttccaatataccgacaagcatggcgaggtctgccctgccggttggaagccaggtagcgagaccatcatccccgaccccgcaggcaaactcaagtatttcgataaattaaattag

SEQ ID NO: 164686 - DNA, 561 bp, Artificial Sequence
  derived and/or modified sequence
atggaagccttaccccttttagccgccacaaccccagatcatggccgccacaggagactgctactgctcccactgctactatttctcttgcccgccggcgccgtgcaaggatgggagacagaggagcgccctcgcacgcgcgaggaagagtgtcacttttacgcaggtggccaggtataccctggcgaagccagcagggtaagcgtcgctgatcactcccttcacctgagcaaagccaaaatctccaaacctgccccttactgggagggcacagcagtgattgacggcgaattcaaggagctgaaactgaccgattacagaggaaaatacctggtgttctttttctatcccctggatttcactttcgtgtgtcccacagaaattatcgcattcggggatcgccttgaagaattcaggagcataaacacagaagtcgtagcatgttccgttgacagtcaatttacgcacctcgcctggtctgtatcctacacatatattcggcgcaagaagcgaatggacttgctcctcaagcatgggcaaataactctggatatgatttag

SEQ ID NO: 164687 - DNA, 816 bp, Artificial Sequence
  derived and/or modified sequence
atggaagctttgcccttgcttgccgccactactccagatcacggccggcaccgtcgactattgcttttgcctctccttctctttctactgccagccggtgccgtgcagggatgggaaacggaagagcgtcccaggactcgtgaggaagaatgccacttctatgccggtggtcaagtctacccaggggaagcctcacgggtgtctgtagccgatcactctctgcacctatcaaaagccaagatctcaaagcccgccccctattgggaggggacggcagtgattgacggagagtttaaagaactgaagcttacagactatcgagggaagtacttggtttttttcttctaccccttagattttacatttgtgtgcccaaccgaaatcattgcttttggcgatcgattggaggagttccgtagcattaataccgaggtagttgcatgtagtgtggattcccagttcactcacctagcctggatcaatacacctcgtagacaggggggcctcggacccataagaattcccctcctcagcgacctaacccatcagattagcaaggactacggagtatacttagaggactcaggccacacactacgcggcctattcatcattgatgataaggggatcctgagacaaataacacttaacgatctgccagtcggaaggtccgttgatgagacactccgattggtgcaagcttttcaatataccgataagcatggagaggtgtgcccagccgggtggaagccagggtctgaaacgataattccagatccagccggcaaactaaaatactttgacaaattgaactag

SEQ ID NO: 164688 - DNA, 561 bp, Artificial Sequence
  derived and/or modified sequence
atggaggcattacccctattagccgcgacgactccagatcacggacggcacagaaggttgctgctgctgcccttgctgttgtttttgctccccgccggcgccgttcagggttgggagacagaagagaggccacggacaagggaagaagagtgccacttttacgcaggaggtcaagtctatccgggggaagccagtagggttagtgtggccgatcactcactgcatctgagtaaggcgaagatctcaaaacccgctccttactgggaaggtactgccgtaatagacggcgaatttaaagaactgaagcttaccgactatagggggaagtacctagtcttctttttctatcctcttgactttacatttgtgtgccctactgaaatcatagcttttggggaccgtctggaagaatttagatctatcaacaccgaagttgtcgcatgtagcgtggactcacaatttactcacctagcttggtcagtctcttacacctacattagacgcaagaaacggatggatcttctcctgaagcacggccagattactctggatatgatatag

SEQ ID NO: 164689 - DNA, 816 bp, Artificial Sequence
  derived and/or modified sequence
atggaagctcttcctctgctcgccgctaccacacctgatcacggtagacatcgacgactcttactgttgccattgctattatttttgctgcctgccggtgccgtccaaggctgggaaacagaagaaagacctcggaccagagaggaagagtgccatttctacgcgggcggtcaagtgtatccaggcgaagctagcagggtctccgtggcagaccattccctacacctcagcaaagcgaaaatctccaagcccgctccttactgggaaggaacagcagtgatcgacggcgagtttaaagagctgaagcttacagactatcgagggaagtacttggtttttttcttctaccccttagattttacatttgtgtgcccaaccgaaatcattgcttttggcgatcgattggaggagttccgtagcattaataccgaggtagttgcatgtagtgtggattcccagttcactcacctagcctggatcaatacacctcgtagacaggggggcctcggacccataagaattcccctcctcagcgacctaacccatcagattagcaaggactacggagtatacttagaggactcaggccacacactacgcggactctttattatagatgacaagggcattctgaggcaaatcacattaaacgatctcccagtcggaagatcagttgacgagactctgaggttggtacaggctttccagtacaccgataagcatggtgaggtctgtccggcaggctggaaaccgggaagcgagactatcataccggaccctgcaggaaagttaaaatacttcgacaagctgaattag

SEQ ID NO: 164690 - DNA, 561 bp, Artificial Sequence
  derived and/or modified sequence
atggaggccctgcccctgctggccgccaccacccccgaccacggcagacacagaagactgctgctgctgcccctgctgctgttcctgctgcccgccggcgccgtgcagggctgggagaccgaggagagacccagaaccagagaggaggagtgccacttctacgccggcggccaggtgtaccccggcgaggccagcagagtgagcgtggccgaccacagcctgcacctgagcaaggccaagatcagcaagcccgccccctactgggagggcaccgccgtgatcgacggcgagttcaaggagctgaagctgaccgactacagaggcaagtacctggtgttcttcttctaccccctggacttcaccttcgtgtgccccaccgagatcatcgccttcggcgacagactggaggagttcagaagcatcaacaccgaggtggtggcctgcagcgtggacagccagttcacccacctggcctggagcgtgagctacacctacatcagaagaaagaagagaatggacctgctgctgaagcacggccagatcaccctggacatgatctag

SEQ ID NO: 164691 - DNA, 816 bp, Artificial Sequence
  derived and/or modified sequence
atggaggccctgcccctgctggccgccaccacccccgaccacggcagacacagaagactgctgctgctgcccctgctgctgttcctgctgcccgccggcgccgtgcagggctgggagaccgaggagagacccagaaccagagaggaggagtgccacttctacgccggcggccaggtgtaccccggcgaggccagcagagtgagcgtggccgaccacagcctgcacctgagcaaggccaagatcagcaagcccgccccctactgggagggcaccgccgtgatcgacggcgagttcaaggagctgaagctgaccgactacagaggcaagtacctggtgttcttcttctaccccctggacttcaccttcgtgtgccccaccgagatcatcgccttcggcgacagactggaggagttcagaagcatcaacaccgaggtggtggcctgcagcgtggacagccagttcacccacctggcctggatcaacacccccagaagacagggcggcctgggccccatcagaatccccctgctgagcgacctgacccaccagatcagcaaggactacggcgtgtacctggaggacagcggccacaccctgagaggcctgttcatcatcgacgacaagggcatcctgagacagatcaccctgaacgacctgcccgtgggcagaagcgtggacgagaccctgagactggtgcaggccttccagtacaccgacaagcacggcgaggtgtgccccgccggctggaagcccggcagcgagaccatcatccccgaccccgccggcaagctgaagtacttcgacaagctgaactag

SEQ ID NO: 164692 - DNA, 561 bp, Artificial Sequence
  derived and/or modified sequence
atggaggccctgccacttctggccgccacgactcccgaccacggcaggcatcggcgcctgttactcctgcctcttttgctgttcctcttgccagcaggagcagttcagggctgggaaaccgaggagagaccaaggactcgggaagaggaatgccacttctatgcgggggggcaggtttacccaggcgaagcttctagagttagtgtggccgaccacagtttacacttgtcaaaagccaagatctcgaagccagctccatactgggaggggaccgcggtgatcgatggtgagttcaaggagctgaaactcacagactatcgcggtaaatacctggttttctttttttacccgctagactttaccttcgtctgtccgaccgagataatcgcattcggggaccgattagaagagttccggagcatcaacaccgaggtcgtggcctgctcagtcgacagccagttcacgcacctggcttggagcgtcagctatacctatatacggagaaagaaaagaatggatttactgctgaagcacgggcagataactcttgatatgatttag

SEQ ID NO: 164693 - DNA, 816 bp, Artificial Sequence
  derived and/or modified sequence
atggaagcactgcccttgctggctgccacaacccccgaccacggaaggcacagacgcctgctgcttctgccccttttattgttcttgctccccgccggcgccgttcagggctgggaaacggaggaaaggcccaggactcgcgaggaagaatgtcatttttacgccggtgggcaggtctaccctggggaagctagtagggtcagcgtggctgatcactcccttcatctgagcaaagctaaaatctctaaacccgccccctattgggagggaactgcagtgatcgatggcgaatttaaagagctcaagctcacggattaccgcggcaagtatctggtgttcttcttttaccccttggactttacatttgtttgcccaaccgagatcatcgcttttggcgacaggctggaggagttcaggtccatcaacaccgaggttgtagcctgcagcgtggactcccaatttactcatcttgcgtggattaacactccaagaaggcagggcgggctgggtcctattagaatccctctattgagcgacttaacacaccagatctctaaggactacggcgtttacctggaggacagtggtcataccctgcggggcctgttcattattgacgataaggggattctgcgccaaatcacgctgaatgatctgccagtgggccggtccgttgatgagactctgaggctggttcaggccttccagtacacagacaaacacggggaagtgtgcccagccggctggaaaccaggctcggaaactatcatcccagatccggccggcaaactcaagtattttgataagctaaactag

SEQ ID NO: 164694 - DNA, 561 bp, Artificial Sequence
  derived and/or modified sequence
atggaggccctgcccctgctggccgccaccaccccagaccacggccgccaccggcggctgctgctgctgcccctgctgctcttcctgctgcctgctggagctgtgcagggctgggagacagaggagcggcccaggacccgggaggaggagtgccacttctacgccggcggccaggtgtacccaggagaggccagccgggtgtctgtggccgaccacagcctgcacctgagcaaggccaagatcagcaagccagccccctactgggagggcacagctgtgattgatggagagttcaaggagctgaagctgacagactaccggggcaagtacctggtgttcttcttctaccccctggacttcacctttgtgtgccccacagagatcatcgcctttggagaccggctggaggagttccgcagcatcaacacagaggtggtggcctgcagcgtggacagccagttcacccacctggcctggagcgtgtcctacacctacatccggaggaagaagaggatggacctgctgctgaagcacggccagatcaccctggacatgatctag

SEQ ID NO: 164695 - DNA, 816 bp, Artificial Sequence
  derived and/or modified sequence
atggaggccctgcccctgctggccgccaccaccccagaccacggccgccaccggcggctgctgctgctgcccctgctgctcttcctgctgcctgctggagctgtgcagggctgggagacagaggagcggcccaggacccgggaggaggagtgccacttctacgccggcggccaggtgtacccaggagaggccagccgggtgtctgtggccgaccacagcctgcacctgagcaaggccaagatcagcaagccagccccctactgggagggcacagctgtgattgatggagagttcaaggagctgaagctgacagactaccggggcaagtacctggtgttcttcttctaccccctggacttcacctttgtgtgccccacagagatcatcgcctttggagaccggctggaggagttccgcagcatcaacacagaggtggtggcctgcagcgtggacagccagttcacccacctggcctggatcaacaccccccggcggcagggcggcctgggccccatccgcatccccctgctgagtgacctgacccaccagatcagcaaggactatggagtgtacctggaggacagcggccacaccctgcggggcctcttcatcattgatgacaagggcatcctgcggcagatcaccctgaatgacctgcctgtgggccgctctgtggatgagaccctgcggctggtgcaggccttccagtacacagacaagcatggagaggtgtgcccagctggctggaagccaggcagcgagaccatcatcccagaccctgctgggaagctgaagtactttgacaagctgaactag

SEQ ID NO: 164696 - DNA, 852 bp, Artificial Sequence
  derived and/or modified sequence
gtttctgcgctcgcgtggtcatggaggcgctgccgctgctagccgcgacaactccggaccacggccgccaccgaaggctgcttctgctgccgctactgctgttcctgctgccggctggagctgtgcagggctgggagacagaggagaggccccggactcgcgaagaggagtgccacttctacgcgggtggacaagtgtacccgggagaggcatcccgggtatcggtcgccgaccactccctgcacctaagcaaagcgaagatttccaagccagcgccctactgggaaggaacagctgtgatcgatggagaatttaaggagctgaagttaactgattatcgtgggaaatacttggttttcttcttctacccacttgatttcacatttgtgtgtccaactgaaattatcgcttttggcgacagacttgaagaattcagatctataaatactgaagtggtagcatgctctgttgattcacagtttacccatttggcctggtcagtatcttacacttatattcgtagaaaaaaaagaatggatttactcttaaagcatggacagataactcttgatatgatataagaatatagtcatttatcagacaattcaggaatagctttatctaagagtaatacatgtaactacacattttccaggttaaaaaaagagagaagagtaatataatcagctgctataataaaaatgcttaaggattttataggacatttcaaaataaggggaaaagttaaatgcaatagatgtgatttctatagcgaaaaccactgaattatatgcttatgataaattgggttaccataatctggaggaaaaaaatctttaaaatatgccattt

SEQ ID NO: 164697 - DNA, 1005 bp, Artificial Sequence
  derived and/or modified sequence
gggaggagctggtctcgcgaggccgcgccccggttcgcgcgggcgtcgtgcacgcggttgtagctgcccggcggcggcagaagcggcgctcgcgccaagggacgtgtttctgcgctcgcgtggtcatggaggcgctgccgctgctagccgcgacaactccggaccacggccgccaccgaaggctgcttctgctgccgctactgctgttcctgctgccggctggagctgtgcagggctgggagacagaggagaggccccggactcgcgaagaggagtgccacttctacgcgggtggacaagtgtacccgggagaggcatcccgggtatcggtcgccgaccactccctgcacctaagcaaagcgaagatttccaagccagcgccctactgggaaggaacagctgtgatcgatggagaatttaaggagctgaagttaactgattatcgtgggaaatacttggttttcttcttctacccacttgatttcacatttgtgtgtccaactgaaattatcgcttttggcgacagacttgaagaattcagatctataaatactgaagtggtagcatgctctgttgattcacagtttacccatttggcctggattaatacccctcgaagacaaggaggacttgggccaataaggattccacttctttcagatttgacccatcagatctcaaaggactatggtgtatacctagaggactcaggccacactcttagaggtctcttcattattgatgacaaaggaatcctaagacaaattactctgaatgatcttcctgtgggtagatcagtggatgagacactacgtttggttcaagcattccagtacactgacaaacacggagaagtctgccctgctggctggaaacctggtagtgaaacaataatcccagatccagctggaaagctgaagtatttcgataaactgaattgagaaatacttcttcaagttatgatgcttgaaagttctcaataaagttcacggtttcattaccaca

SEQ ID NO: 164698 - DNA, 561 bp, Artificial Sequence
  derived and/or modified sequence
atggaggccctgcccctgctggccgccaccacccccgaccacggccgccacaggagattacttctcctgcccttactgctcttcctgttgcctgcaggcgcagtgcaggggtgggagactgaggagcgccctcgaacccgggaggaggaatgccacttctacgccgggggccaagtgtatccaggggaagccagtagggtgtctgtggctgaccactctctccacttgtccaaggctaagatctcaaagcctgccccttactgggagggcactgctgtgattgatggcgaatttaaagagctgaagttaaccgattaccgagggaagtacctggtcttctttttttatcccctggactttacatttgtttgcccaactgaaattatcgccttcggtgacaggctggaagagttccgctccataaatacagaggtggtggcgtgttcggtagactctcagttcacccacctggcatggtccgtttcctacacatacataaggcgcaagaagcgtatggacctcctgctgaagcacgggcagattacactcgatatgatctag

SEQ ID NO: 164699 - DNA, 816 bp, Artificial Sequence
  derived and/or modified sequence
atggaggccctgcccctgctggccgccaccacccccgaccacggcagacatcgtcggctcctgctactgccgctactgttatttctgttaccagcgggagctgtccaagggtgggagaccgaggaacggcctagaacaagggaggaggagtgtcatttttatgcaggaggacaggtgtaccccggcgaggcctcacgagtgtcagtcgccgaccattctctgcatctatcaaaagcgaagatctctaaacccgcgccctattgggagggtacagctgttattgacggggaatttaaagagctgaaactcactgactatcgaggcaagtatctggtgttttttttttacccccttgattttaccttcgtctgtcccacagagatcatcgctttcggggaccgtctcgaggagttcaggtccataaacaccgaagtggtggcttgctccgtcgattcgcaattcactcacctcgcctggatcaacacccctcggagacagggcggtctgggaccgatccgcattcctttgctgagcgacttgacgcaccagatcagcaaggattacggagtttaccttgaggatagcggacacactttgcgcggattgttcatcatcgacgacaaaggcattctgagacagattaccttaaacgaccttcccgtcggtcggtcagtggacgagaccctgcggcttgttcaggctttccagtatacagacaagcacggcgaagtgtgccctgcggggtggaagcctggatctgagacaattatccctgacccagctgggaaactgaaatactttgataagctgaactag

SEQ ID NO: 164700 - RNA, 561 nt, Artificial Sequence
  derived and/or modified sequence
auggaagccuuaccccuuuuagccgccacaaccccagaucauggccgccacaggagacugcuacugcucccacugcuacuauuucucuugcccgccggcgccgugcaaggaugggagacagaggagcgcccucgcacgcgcgaggaagagugucacuuuuacgcagguggccagguauacccuggcgaagccagcaggguaagcgucgcugaucacucccuucaccugagcaaagccaaaaucuccaaaccugccccuuacugggagggcacagcagugauugacggcgaauucaaggagcugaaacugaccgauuacagaggaaaauaccugguguucuuuuucuauccccuggauuucacuuucgugugucccacagaaauuaucgcauucggggaucgccuugaagaauucaggagcauaaacacagaagucguagcauguuccguugacagucaauuuacgcaccucgccuggucuguauccuacacauauauucggcgcaagaagcgaauggacuugcuccucaagcaugggcaaauaacucuggauaugauuuag

SEQ ID NO: 164701 - RNA, 816 nt, Artificial Sequence
  derived and/or modified sequence
auggaagcuuugcccuugcuugccgccacuacuccagaucacggccggcaccgucgacuauugcuuuugccucuccuucucuuucuacugccagccggugccgugcagggaugggaaacggaagagcgucccaggacucgugaggaagaaugccacuucuaugccgguggucaagucuacccaggggaagccucacgggugucuguagccgaucacucucugcaccuaucaaaagccaagaucucaaagcccgcccccuauugggaggggacggcagugauugacggagaguuuaaagaacugaagcuuacagacuaucgagggaaguacuugguuuuuuucuucuaccccuuagauuuuacauuugugugcccaaccgaaaucauugcuuuuggcgaucgauuggaggaguuccguagcauuaauaccgagguaguugcauguaguguggauucccaguucacucaccuagccuggaucaauacaccucguagacaggggggccucggacccauaagaauuccccuccucagcgaccuaacccaucagauuagcaaggacuacggaguauacuuagaggacucaggccacacacuacgcggccuauucaucauugaugauaaggggauccugagacaaauaacacuuaacgaucugccagucggaagguccguugaugagacacuccgauuggugcaagcuuuucaauauaccgauaagcauggagaggugugcccagccggguggaagccagggucugaaacgauaauuccagauccagccggcaaacuaaaauacuuugacaaauugaacuag

SEQ ID NO: 164702 - RNA, 561 nt, Artificial Sequence
  derived and/or modified sequence
auggaggcauuaccccuauuagccgcgacgacuccagaucacggacggcacagaagguugcugcugcugcccuugcuguuguuuuugcuccccgccggcgccguucaggguugggagacagaagagaggccacggacaagggaagaagagugccacuuuuacgcaggaggucaagucuauccgggggaagccaguaggguuaguguggccgaucacucacugcaucugaguaaggcgaagaucucaaaacccgcuccuuacugggaagguacugccguaauagacggcgaauuuaaagaacugaagcuuaccgacuauagggggaaguaccuagucuucuuuuucuauccucuugacuuuacauuugugugcccuacugaaaucauagcuuuuggggaccgucuggaagaauuuagaucuaucaacaccgaaguugucgcauguagcguggacucacaauuuacucaccuagcuuggucagucucuuacaccuacauuagacgcaagaaacggauggaucuucuccugaagcacggccagauuacucuggauaugauauag

SEQ ID NO: 164703 - RNA, 816 nt, Artificial Sequence
  derived and/or modified sequence
auggaagcucuuccucugcucgccgcuaccacaccugaucacgguagacaucgacgacucuuacuguugccauugcuauuauuuuugcugccugccggugccguccaaggcugggaaacagaagaaagaccucggaccagagaggaagagugccauuucuacgcgggcggucaaguguauccaggcgaagcuagcagggucuccguggcagaccauucccuacaccucagcaaagcgaaaaucuccaagcccgcuccuuacugggaaggaacagcagugaucgacggcgaguuuaaagagcugaagcuuacagacuaucgagggaaguacuugguuuuuuucuucuaccccuuagauuuuacauuugugugcccaaccgaaaucauugcuuuuggcgaucgauuggaggaguuccguagcauuaauaccgagguaguugcauguaguguggauucccaguucacucaccuagccuggaucaauacaccucguagacaggggggccucggacccauaagaauuccccuccucagcgaccuaacccaucagauuagcaaggacuacggaguauacuuagaggacucaggccacacacuacgcggacucuuuauuauagaugacaagggcauucugaggcaaaucacauuaaacgaucucccagucggaagaucaguugacgagacucugagguugguacaggcuuuccaguacaccgauaagcauggugaggucuguccggcaggcuggaaaccgggaagcgagacuaucauaccggacccugcaggaaaguuaaaauacuucgacaagcugaauuag

SEQ ID NO: 164704 - protein, 188 aa, Artificial Sequence
  derived and/or modified sequence
MDVNIAPLRAWDDFFPGSDRFARPDFRDISKWNNRVVSNLLYYQTNYLVVAAMMISIVGFLSPFNMILGGIVVVLVFTGFVWAAHNKDVLRRMKKRYPTTFVMVVMLASYFLISMFGGVMVFVFGITFPLLLMFIHASLRLRNLKNKLENKMEGIGLKRTPMGIVLDALEQQEEGINRLTDYISKVKE

SEQ ID NO: 164705 - protein, 136 aa, Artificial Sequence
  derived and/or modified sequence
MDVNIAPLRAWDDFFPGSDRFARPDFRDISKWNNRVVSNLLYYQTNYLVVAAMMISIVGFLSPFNMILGGIVVVLVFTGFVWAAHDVRYGGHVGELFPYLHVWRSHGLCVWHYFSFAVDVYPCIVETSEPQEQTGE

SEQ ID NO: 164706 - DNA, 567 bp, Artificial Sequence
  derived and/or modified sequence
atggacgttaatatagctcccctgcgcgcctgggacgactttttcccaggcagtgataggttcgcacgccctgacttccgggacataagcaagtggaacaatagggtggtaagcaacctgttgtactatcaaacaaactatctagttgtcgccgcaatgatgatttccatcgtggggtttctatccccatttaatatgatcttaggcgggattgtggttgtcctcgtgttcaccgggttcgtgtgggccgcgcacaacaaggacgtactccgacgcatgaagaagcgctatccaaccaccttcgtgatggtcgttatgctggctagctactttctgattagcatgtttggcggcgtgatggtgttcgtgtttgggatcacttttcctctcctgctgatgttcatccatgctagcctccgcttgaggaacctgaaaaataaactggaaaataagatggaggggattggcttgaagcgaacaccaatggggattgttctcgatgcactggaacagcaggaggaagggattaaccgtctgacagattacatctccaaagtaaaagaatag

SEQ ID NO: 164707 - DNA, 411 bp, Artificial Sequence
  derived and/or modified sequence
atggacgtaaatattgctccgctgagggcttgggatgatttcttccccggcagcgaccgtttcgccagaccagacttcagggacatcagtaagtggaacaaccgggttgtctcaaacctcttatactatcagacgaattatctggttgtggccgccatgatgatatctattgtggggttcctcagtccatttaacatgatcctcggggggatagtggtggtgctcgtctttactggatttgtgtgggccgcacacgacgtgcgctatggcgggcacgtgggcgagctgtttccctatttgcacgtgtggagaagccacgggctgtgcgtctggcattacttcagttttgccgtggacgtgtacccatgcatcgtcgagacctcggaaccccaggaacagactggggaatag

SEQ ID NO: 164708 - DNA, 2101 bp, Artificial Sequence
  derived and/or modified sequence
cgaccgagacggagccgctgtcaactctccaactcagctcagctgatcggttgccgccgccgccgccgccagattctggaggcgaagaacgcaaagctgagaacatggacgttaatatcgccccactccgcgcctgggacgatttcttcccgggttccgatcgctttgcccggccggacttcagggacatttccaaatggaacaaccgcgtagtgagcaacctgctctattaccagaccaactacctggtggtggctgccatgatgatttccattgtggggtttctgagtcccttcaacatgatcctgggaggaatcgtggtggtgctggtgttcacagggtttgtgtgggcagcccacaataaagacgtccttcgccggatgaagaagcgctaccccacgacgttcgttatggtggtcatgttggcgagctatttccttatctccatgtttggaggagtcatggtctttgtgtttggcattacttttcctttgctgttgatgtttatccatgcatcgttgagacttcggaacctcaagaacaaactggagaataaaatggaaggaataggtttgaagaggacaccgatgggcattgtcctggatgccctagaacagcaggaagaaggcatcaacagactcactgactatatcagcaaagtgaaggaataaacataacttacctgagctagggttgcagcagaaattgagttgcagcttgcccttgtccagacctatgttctgcttgcgtttttgaaacaggaggtgcacgtaccacccaattatctatggcagcatgcatgtataggccgaactattatcagctctgatgtttcagagagaagacctcagaaaccgaaagaaaaccaccaccctcctattgtgtctgaagtttcacgtgtgtttatgaaatctaatgggaaatggatcacacgatttctttaagggaattaaaaaaaataaaagaattacggcttttacagcaacaatacgattatcttataggaaaaaaaaaatcattgtaaagtatcaagacaatacgagtaaatgaaaaggctgttaaagtagatgacatcatgtgttagcctgttcctaatcccctagaattgtaatgtgtgggatataaattagtttttattattctcttaaaaatcaaagatgatctctatcactttgccacctgtttgatgtgcagtggaaactggttaagccagttgttcatacttcctttacaaatataaagatagctgtttaggatattttgttacatttttgtaaatttttgaaatgctagtaatgtgttttcaccagcaagtatttgttgcaaacttaatgtcattttccttaagatggttacagctatgtaacctgtattattctggacggacttattaaaatacaaacagacaaaaaataaaacaaaacttgagttctatttaccttgcacattttttgttgttacagtgaaaaaaatggtccaagaaaatgtttgccatttttgcattgtttcgtttttaactggaacatttagaaagaaggaaatgaatgtgcattttattaattccttaggggcacaaggaggacaataatagctgatcttttgaaatttgaaaaacgtctttagatgaccaagcaaaaagactttaaaaaatggtaatgaaaatggaatgcagctactgcagctaataaaaaattttagatagcaattgttacaaccatatgcctttatagctagacattagaattatgatagcatgagtttatacattctattatttttcctccctttctcatgtttttataaataggtaataaaaaatgttttgcctgccaattgaatgatttcgtagctgaagtagaaacatttaggtttctgtagcattaaattgtgaagacaactggagtggtacttactgaagaaactctctgtatgtcctagaataagaagcaatgatgtgctgcttctgatttttcttgcattttaaattctcagccaacctacagccatgatctttagcacagtgatatcaccatgacttcacagacatggtctagaatctgtacccttacccacatatgaagaataaaattgattaaaggtt

SEQ ID NO: 164709 - DNA, 2060 bp, Artificial Sequence
  derived and/or modified sequence
cgaccgagacggagccgctgtcaactctccaactcagctcagctgatcggttgccgccgccgccgccgccagattctggaggcgaagaacgcaaagctgagaacatggacgttaatatcgccccactccgcgcctgggacgatttcttcccgggttccgatcgctttgcccggccggacttcagggacatttccaaatggaacaaccgcgtagtgagcaacctgctctattaccagaccaactacctggtggtggctgccatgatgatttccattgtggggtttctgagtcccttcaacatgatcctgggaggaatcgtggtggtgctggtgttcacagggtttgtgtgggcagcccacgacgttcgttatggtggtcatgttggcgagctatttccttatctccatgtttggaggagtcatggtctttgtgtttggcattacttttcctttgctgttgatgtttatccatgcatcgttgagacttcggaacctcaagaacaaactggagaataaaatggaaggaataggtttgaagaggacaccgatgggcattgtcctggatgccctagaacagcaggaagaaggcatcaacagactcactgactatatcagcaaagtgaaggaataaacataacttacctgagctagggttgcagcagaaattgagttgcagcttgcccttgtccagacctatgttctgcttgcgtttttgaaacaggaggtgcacgtaccacccaattatctatggcagcatgcatgtataggccgaactattatcagctctgatgtttcagagagaagacctcagaaaccgaaagaaaaccaccaccctcctattgtgtctgaagtttcacgtgtgtttatgaaatctaatgggaaatggatcacacgatttctttaagggaattaaaaaaaataaaagaattacggcttttacagcaacaatacgattatcttataggaaaaaaaaaatcattgtaaagtatcaagacaatacgagtaaatgaaaaggctgttaaagtagatgacatcatgtgttagcctgttcctaatcccctagaattgtaatgtgtgggatataaattagtttttattattctcttaaaaatcaaagatgatctctatcactttgccacctgtttgatgtgcagtggaaactggttaagccagttgttcatacttcctttacaaatataaagatagctgtttaggatattttgttacatttttgtaaatttttgaaatgctagtaatgtgttttcaccagcaagtatttgttgcaaacttaatgtcattttccttaagatggttacagctatgtaacctgtattattctggacggacttattaaaatacaaacagacaaaaaataaaacaaaacttgagttctatttaccttgcacattttttgttgttacagtgaaaaaaatggtccaagaaaatgtttgccatttttgcattgtttcgtttttaactggaacatttagaaagaaggaaatgaatgtgcattttattaattccttaggggcacaaggaggacaataatagctgatcttttgaaatttgaaaaacgtctttagatgaccaagcaaaaagactttaaaaaatggtaatgaaaatggaatgcagctactgcagctaataaaaaattttagatagcaattgttacaaccatatgcctttatagctagacattagaattatgatagcatgagtttatacattctattatttttcctccctttctcatgtttttataaataggtaataaaaaatgttttgcctgccaattgaatgatttcgtagctgaagtagaaacatttaggtttctgtagcattaaattgtgaagacaactggagtggtacttactgaagaaactctctgtatgtcctagaataagaagcaatgatgtgctgcttctgatttttcttgcattttaaattctcagccaacctacagccatgatctttagcacagtgatatcaccatgacttcacagacatggtctagaatctgtacccttacccacatatgaagaataaaattgattaaaggtt

SEQ ID NO: 164710 - DNA, 567 bp, Artificial Sequence
  derived and/or modified sequence
atggatgtgaacatcgcccccctgcgggcctgggatgacttcttccctggcagtgacagatttgcccggccagacttccgggacatcagcaagtggaacaacagagtggtgagcaacctgctgtactaccagaccaactacctggtggtggccgccatgatgatcagcatcgtgggcttcctgagccccttcaacatgatcctgggcggcatcgtggtggtgctggtgttcaccggctttgtgtgggccgcccacaacaaggatgtgctgcggaggatgaagaagcgctaccccaccacctttgtgatggtggtgatgctggccagctacttcctgatctccatgtttggaggagtgatggtgtttgtgtttggcatcaccttccccctgctgctgatgttcatccacgccagcctgcggctgaggaacctgaagaacaagctggagaacaagatggagggcatcggcctgaagaggacccccatgggcatcgtgctggatgccctggagcagcaggaggagggcatcaaccggctgacagactacatcagcaaggtgaaggagtag

SEQ ID NO: 164711 - DNA, 411 bp, Artificial Sequence
  derived and/or modified sequence
atggatgtgaacatcgcccccctgcgggcctgggatgacttcttccctggcagtgacagatttgcccggccagacttccgggacatcagcaagtggaacaacagagtggtgagcaacctgctgtactaccagaccaactacctggtggtggccgccatgatgatcagcatcgtgggcttcctgagccccttcaacatgatcctgggcggcatcgtggtggtgctggtgttcaccggctttgtgtgggccgcccatgatgtgcgctatggaggccacgtgggggagctgttcccctacctgcacgtgtggaggagccacggcctgtgtgtgtggcactacttctcctttgctgtggatgtgtacccctgcatcgtggagaccagcgagccccaggagcagacaggagagtag

SEQ ID NO: 164712 - DNA, 567 bp, Artificial Sequence
  derived and/or modified sequence
atggacgtgaacatcgcccccctgcgggcctgggacgacttcttccccggaagcgaccggttcgctaggccggattttcgagatatctccaaatggaacaatcgcgttgtcagtaatttgctgtattaccagaccaactacctggtggtagccgccatgatgatatccatcgtgggtttcctcagccctttcaacatgatcctaggaggcattgtcgtggtgctcgtgtttacgggattcgtgtgggctgcccacaacaaggacgtgctgcgccgcatgaagaaaaggtatcccaccactttcgtgatggtcgtgatgctcgcgagctattttcttataagtatgtttggaggcgtcatggtctttgtgtttgggatcacatttccactgttgctgatgttcattcacgcctctttgaggctgagaaatctgaagaataagctggaaaacaaaatggagggaataggtcttaagaggactcccatgggtatcgtgctggacgcgctggaacaacaagaggaaggtattaatagactgactgattacataagtaaagtgaaggagtag

SEQ ID NO: 164713 - DNA, 411 bp, Artificial Sequence
  derived and/or modified sequence
atggacgtgaacatcgcccccctgcgggcctgggacgacttcttcccgggctcagaccgcttcgctcggcccgactttcgcgacatttctaagtggaacaatcgggtggtttctaatctactgtactatcagaccaactacttggtggtagcagccatgatgatctcaattgttgggttcctttccccttttaatatgattctggggggcatcgtcgtggtgctcgttttcactggcttcgtgtgggccgcccacgacgtgaggtatggcggacatgttggcgaattgttcccctacctgcatgtatggagatcacacggtctgtgcgtctggcactactttagtttcgccgtggatgtctatccctgtattgtcgaaacgtcagagccccaagagcagacgggagagtag

SEQ ID NO: 164714 - DNA, 567 bp, Artificial Sequence
  derived and/or modified sequence
atggacgtcaatatagcgccactgagggcttgggatgatttcttccctggctccgacaggtttgcaaggccagacttcagggacatttccaaatggaacaaccgtgttgtgagcaatctgctgtattatcagacgaactaccttgttgttgctgctatgatgatcagcatagtgggattcctcagtcctttcaatatgatccttggaggcatagtagtggtgcttgtcttcacagggttcgtttgggctgcccacaacaaggacgtgctgcgacggatgaagaaaaggtatccaacaacattcgtgatggtggttatgctggctagttacttcctcataagcatgtttgggggagtcatggtttttgtgtttggcatcactttcccattgctgctgatgtttattcatgcttcattacgattaagaaatcttaaaaacaagctcgaaaacaaaatggaaggcattggactgaaacgaacacccatggggattgtgctcgacgcactggaacaacaggaggagggtatcaaccgtctgacagactacataagcaaagtgaaggaatag

SEQ ID NO: 164715 - DNA, 411 bp, Artificial Sequence
  derived and/or modified sequence
atggacgtcaatatcgccccacttcgagcctgggatgattttttccccggatcggatcggttcgcgcgtccggacttcagggacatctcaaagtggaataaccgggtcgtgtccaacctcctctactatcaaactaactacctcgtggttgcagctatgatgatttctattgtgggctttctaagcccgtttaatatgatcctcggcggaattgttgtggtcctggtattcacaggattcgtgtgggccgcacacgatgtgaggtatggcggtcacgtcggcgagttgtttccttacttgcacgtctggagaagtcacgggctctgtgtctggcactatttcagctttgcggtcgatgtgtatccctgtatcgtggaaaccagtgagccacaggaacagacgggagaatag

SEQ ID NO: 164716 - DNA, 567 bp, Artificial Sequence
  derived and/or modified sequence
atggacgtgaacatcgcccccctgagagcctgggacgacttcttccccggcagcgacagattcgccagacccgacttcagagacatcagcaagtggaacaacagagtggtgagcaacctgctgtactaccagaccaactacctggtggtggccgccatgatgatcagcatcgtgggcttcctgagccccttcaacatgatcctgggcggcatcgtggtggtgctggtgttcaccggcttcgtgtgggccgcccacaacaaggacgtgctgagaagaatgaagaagagataccccaccaccttcgtgatggtggtgatgctggccagctacttcctgatcagcatgttcggcggcgtgatggtgttcgtgttcggcatcaccttccccctgctgctgatgttcatccacgccagcctgagactgagaaacctgaagaacaagctggagaacaagatggagggcatcggcctgaagagaacccccatgggcatcgtgctggacgccctggagcagcaggaggagggcatcaacagactgaccgactacatcagcaaggtgaaggagtag

SEQ ID NO: 164717 - DNA, 411 bp, Artificial Sequence
  derived and/or modified sequence
atggacgtgaacatcgcccccctgagagcctgggacgacttcttccccggcagcgacagattcgccagacccgacttcagagacatcagcaagtggaacaacagagtggtgagcaacctgctgtactaccagaccaactacctggtggtggccgccatgatgatcagcatcgtgggcttcctgagccccttcaacatgatcctgggcggcatcgtggtggtgctggtgttcaccggcttcgtgtgggccgcccacgacgtgagatacggcggccacgtgggcgagctgttcccctacctgcacgtgtggagaagccacggcctgtgcgtgtggcactacttcagcttcgccgtggacgtgtacccctgcatcgtggagaccagcgagccccaggagcagaccggcgagtag

SEQ ID NO: 164718 - protein, 131 aa, Artificial Sequence
  derived and/or modified sequence
MEKIPVSAFLLLVALSYTLARDTTVKPGAKKDTKDSRPKLPQTLSRGWGDQLIWTQTYEEALYKSKTSNKPLMIIHHLDECPHSQALKKVFAENKEIQKLAEQFVLLNLVYETTDKHLSPDGQYVPRIMFV

SEQ ID NO: 164719 - protein, 175 aa, Artificial Sequence
  derived and/or modified sequence
MEKIPVSAFLLLVALSYTLARDTTVKPGAKKDTKDSRPKLPQTLSRGWGDQLIWTQTYEEALYKSKTSNKPLMIIHHLDECPHSQALKKVFAENKEIQKLAEQFVLLNLVYETTDKHLSPDGQYVPRIMFVDPSLTVRADITGRYSNRLYAYEPADTALLLDNMKKALKLLKTEL

SEQ ID NO: 164720 - protein, 195 aa, Artificial Sequence
  derived and/or modified sequence
MSNYTDAESSFSKQEIIRVAMEKIPVSAFLLLVALSYTLARDTTVKPGAKKDTKDSRPKLPQTLSRGWGDQLIWTQTYEEALYKSKTSNKPLMIIHHLDECPHSQALKKVFAENKEIQKLAEQFVLLNLVYETTDKHLSPDGQYVPRIMFVDPSLTVRADITGRYSNRLYAYEPADTALLLDNMKKALKLLKTEL

SEQ ID NO: 164721 - DNA, 396 bp, Artificial Sequence
  derived and/or modified sequence
atggagaagatacctgtgagtgcattccttcttctcgtggctctgtcctataccttagcccgggacaccaccgtgaaaccaggtgccaaaaaagacacaaaggatagccggccaaaattacctcagaccttgtcaaggggctggggggaccagttaatttggactcagacttacgaagaagctttatataaaagcaagacctctaataagccacttatgatcatccaccaccttgacgaatgccctcactcacaggccctcaagaaggtgttcgctgaaaacaaagagatccagaagttggccgaacagtttgttctcctaaacttggtgtatgaaaccaccgacaagcatttatcccccgacgggcagtatgtgccacggataatgttcgtctag

SEQ ID NO: 164722 - DNA, 528 bp, Artificial Sequence
  derived and/or modified sequence
atggaaaaaattcccgtgagcgcattccttctgcttgtggcactcagctataccctggccagagatacaacagttaagcctggcgctaagaaagatacaaaggatagccgcccgaagctcccacagaccctaagccggggctggggggaccagctcatatggacccaaacctatgaagaggccctctacaagtccaagacttcgaacaaacccctgatgattatccaccacctcgacgaatgccctcatagccaggccctgaagaaggtgttcgcagaaaataaagaaattcagaaactggcggagcagttcgtcctgctcaatctggtctatgagacaaccgacaaacacctgtcacccgatgggcagtacgtgccaaggatcatgtttgtagatccctcgctgaccgtccgtgcagacatcactgggcgctactccaacaggttatacgcctatgagcccgcggacaccgctctcctcttagacaacatgaaaaaggcgttgaaactactgaaaacagaactgtag

SEQ ID NO: 164723 - DNA, 588 bp, Artificial Sequence
  derived and/or modified sequence
atgtctaactataccgacgccgaaagtagctttagcaagcaggagatcataagggttgcgatggagaagattcccgtctctgccttcttgttactcgtcgcgctctcttacactttggcccgtgacacaactgttaaacccggagccaagaaggacactaaagattcccgtcctaaacttccacagactctttccaggggatggggggatcaattaatctggacccagacctacgaggaagctttatacaaatctaagaccagtaataagcccctaatgatcatccaccacctagacgagtgcccccactctcaggctctcaagaaggtcttcgccgaaaataaagagatacagaagctcgccgagcaatttgttctcttgaatctggtgtacgagactactgataaacacctgtcccccgacggccagtacgttcctagaatcatgtttgtggatccttctctgacggtgcgagctgatatcaccgggcgatacagcaaccgactttacgcatatgagcctgcagatacggccctgctgctcgataacatgaagaaagcactcaaacttttgaagaccgaactgtag

SEQ ID NO: 164724 - DNA, 396 bp, Artificial Sequence
  derived and/or modified sequence
atggagaagatccctgtgtctgccttcctgctgctggtggccctgagctacaccctggcccgggacaccaccgtgaagccaggggccaagaaggacaccaaggacagccggcccaagctgccccagaccctgagccggggctggggagaccagctgatctggacccagacctatgaggaggccctgtacaagagcaagaccagcaacaagcccctgatgatcatccaccacctggatgagtgcccccacagccaggccctgaagaaggtgtttgctgagaacaaggagatccagaagctggccgagcagtttgtgctgctgaacctggtgtatgagaccacagacaagcacctgagcccagatggccagtatgtgccccgcatcatgtttgtgtag

SEQ ID NO: 164725 - DNA, 528 bp, Artificial Sequence
  derived and/or modified sequence
atggagaagatccctgtgtctgccttcctgctgctggtggccctgagctacaccctggcccgggacaccaccgtgaagccaggggccaagaaggacaccaaggacagccggcccaagctgccccagaccctgagccggggctggggagaccagctgatctggacccagacctatgaggaggccctgtacaagagcaagaccagcaacaagcccctgatgatcatccaccacctggatgagtgcccccacagccaggccctgaagaaggtgtttgctgagaacaaggagatccagaagctggccgagcagtttgtgctgctgaacctggtgtatgagaccacagacaagcacctgagcccagatggccagtatgtgccccgcatcatgtttgtggaccccagcctgactgtgcgggctgacatcaccggccgctacagcaaccggctgtatgcctatgagcctgctgacacagccctgctgctggacaacatgaagaaggccctgaagctgctgaagacagagctgtag

SEQ ID NO: 164726 - DNA, 588 bp, Artificial Sequence
  derived and/or modified sequence
atgagcaactacacagatgctgagagcagcttcagcaagcaggagatcatccgggtggccatggagaagatccctgtgtctgccttcctgctgctggtggccctgagctacaccctggcccgggacaccaccgtgaagccaggggccaagaaggacaccaaggacagccggcccaagctgccccagaccctgagccggggctggggagaccagctgatctggacccagacctatgaggaggccctgtacaagagcaagaccagcaacaagcccctgatgatcatccaccacctggatgagtgcccccacagccaggccctgaagaaggtgtttgctgagaacaaggagatccagaagctggccgagcagtttgtgctgctgaacctggtgtatgagaccacagacaagcacctgagcccagatggccagtatgtgccccgcatcatgtttgtggaccccagcctgactgtgcgggctgacatcaccggccgctacagcaaccggctgtatgcctatgagcctgctgacacagccctgctgctggacaacatgaagaaggccctgaagctgctgaagacagagctgtag

SEQ ID NO: 164727 - DNA, 396 bp, Artificial Sequence
  derived and/or modified sequence
atggagaagatccccgtgagcgccttcctgctgctggtggccctgtcctatactctggctagggacacaactgtcaaaccaggggccaagaaggatacaaaagattctcgtcctaagcttccacagacactgtcacggggttggggggatcaactcatctggacacagacctacgaagaggctctgtataagtctaaaacatcaaataaaccgcttatgattatccaccacctggacgaatgcccccattctcaggccctgaaaaaggttttcgccgagaataaggaaatccagaaactggctgaacaattcgtgctactgaatctggtatatgaaaccacagataaacacctctcaccagatggtcagtatgtgccaagaataatgtttgtgtag

SEQ ID NO: 164728 - DNA, 528 bp, Artificial Sequence
  derived and/or modified sequence
atggagaagatccccgtgagcgccttcctgctgctggtggccctgagctacactctggccagggatacaacagtaaaacccggtgcgaaaaaagacaccaaggatagccgccccaaattgccccagactctctcccgcggctggggagaccagctgatctggactcagacctacgaggaggctctgtataagtcaaagaccagcaataaacctctcatgattatacaccacctcgatgaatgcccccacagtcaggccctgaagaaggtcttcgctgaaaacaaggaaatccaaaagctggctgaacaatttgtgctgctgaacctagtgtatgaaacgaccgacaagcacttgtcccccgatgggcagtacgtcccgagaattatgttcgtggaccccagcttaaccgtgagagctgacattacaggccgatatagcaaccgcctgtatgcgtatgagcccgccgatacggccctgttattagataacatgaagaaagctctgaagctgttaaaaacggaactttag

SEQ ID NO: 164729 - DNA, 588 bp, Artificial Sequence
  derived and/or modified sequence
atgagcaactacaccgacgccgagagcagcttcagcaagcaggagatcatccgagtggccatggagaaaatcccagtttcagcatttctcctgttggttgccctgtcttatacgctcgcccgcgataccacagtgaaacctggcgcaaagaaagacaccaaggatagccgccctaagctgccccagaccttatccagagggtggggagaccagctgatctggacacagacatacgaggaagctttatataaaagcaagactagtaataaaccgctgatgataattcaccacctggatgaatgcccgcattcacaggccttaaagaaggtattcgccgaaaacaaggagattcagaaattagccgagcagtttgtccttcttaacctggtgtacgaaactaccgataagcacctgtcgcccgacggccaatacgttcctagaataatgttcgtggacccaagcctgacagtgagagcagacatcacaggaaggtactccaataggctctacgcctatgaacccgctgacacagcactgctcttggataacatgaaaaaagcgttgaagttgctaaaaaccgagctgtag

SEQ ID NO: 164730 - DNA, 396 bp, Artificial Sequence
  derived and/or modified sequence
atggaaaaaatacccgtgtccgcgtttctcctgttagtggccctctcctacacgttggccagggatacgacggttaagcccggagcaaagaaggacactaaggacagtcggccaaagttgcctcagactctaagcaggggttggggcgatcagctgatctggactcaaacatacgaagaagccctctataaaagcaaaacctcgaataaacccttaatgataatccatcacctggacgagtgcccccactcccaggccctgaaaaaagtgttcgccgaaaacaaggagatacagaagctggctgagcaattcgtactattaaatctggtctacgaaactaccgataagcacttgtcgcctgatggccagtacgtcccgagaattatgttcgtctag

SEQ ID NO: 164731 - DNA, 528 bp, Artificial Sequence
  derived and/or modified sequence
atggagaagattccagtcagtgccttcctgctcctggtggcactgtcgtacactctcgcacgcgacaccacagtgaaacctggcgcaaaaaaagacacgaaggactctcgacccaaactgccccagactctgtcccggggatggggggatcagctgatctggacacagacatacgaggaggcgctttacaagagcaaaacttccaacaagcctctcatgattatccaccacctggatgagtgcccacacagccaggcactcaagaaggtgttcgctgagaacaaggagattcagaaactcgccgagcaatttgtgctgctaaatctcgtgtacgaaactaccgataagcacctttcacccgatggacagtacgttcctcgtattatgttcgtcgaccctagcttaaccgtgcgcgctgacatcacagggagatactccaaccggctgtacgcatacgaacctgccgacactgctctgctgctggacaatatgaagaaggctctcaaactcctcaagactgaactgtag

SEQ ID NO: 164732 - DNA, 588 bp, Artificial Sequence
  derived and/or modified sequence
atgagtaattacacagatgccgagtcaagcttttcaaaacaagagattatcagagtggcaatggagaagattccagtctcagcttttctgctcctggtagcgctgtcctacaccttggccagagataccaccgtcaagcccggagccaaaaaggacaccaaggattctaggcctaagttgcctcagacactgtcccggggatggggcgaccagctgatatggacacagacatatgaagaggccttgtataagtcaaagacttcgaacaaacccctgatgatcattcatcatttggacgaatgcccacactcccaggccctgaaaaaggttttcgctgaaaataaggaaatccaaaagctggccgaacagtttgtcctgctgaacctggtctacgaaacaaccgacaaacacctctctcccgacggacagtatgtgccacgaattatgttcgttgacccctcgctgaccgtgcgtgcagatatcaccggacgatatagtaatcgcctttatgcgtacgagcccgcagatacagctctgcttctcgataacatgaaaaaagcgctgaagctccttaaaactgagctgtag

SEQ ID NO: 164733 - DNA, 670 bp, Artificial Sequence
  derived and/or modified sequence
agattcacaaggccaacagacaacccaaagtcattaagccatgagagtggaatgaatctatgaaaactcaatgaagacagaacaagagaaaaatcttttcagccacgatgaattaggagaacaagatgtcaaattacactgatgctgagtcaagcttctcaaagcaagagataatcaggctgacctattgctgaggactatgagaaaaaagttattacagaatgagtcatatggaaaacacttgcaaacagaagaatattgagaacataagttgccatggagaaaattccagtgtcagcattcttgctccttgtggccctctcctacactctggccagagataccacagtcaaacctggagccaaaaaggacacaaaggactctcgacccaaactgccccagaccctctccagaggttggggtgaccaactcatctggactcagacatatgaagaagctctatataaatccaagacaagcaacaaacccttgatgattattcatcacttggatgagtgcccacacagtcaagctttaaagaaagtgtttgctgaaaataaagaaatccagaaattggcagagcagtttgtcctcctcaatctggtttatgaaacaactgacaaacacctttctcctgatggccagtatgtccccaggattatgtttgttg

SEQ ID NO: 164734 - DNA, 1778 bp, Artificial Sequence
  derived and/or modified sequence
tagcaacaagtaaatgcagcactagtgggtgggattgaggtatgccctggtgcataaatagagactcagctgtgctggcacactcagaagcttggaccgcatcctagccgccgactcacacaaggcaggtgggtgaggaaatccagagttgccatggagaaaattccagtgtcagcattcttgctccttgtggccctctcctacactctggccagagataccacagtcaaacctggagccaaaaaggacacaaaggactctcgacccaaactgccccagaccctctccagaggttggggtgaccaactcatctggactcagacatatgaagaagctctatataaatccaagacaagcaacaaacccttgatgattattcatcacttggatgagtgcccacacagtcaagctttaaagaaagtgtttgctgaaaataaagaaatccagaaattggcagagcagtttgtcctcctcaatctggtttatgaaacaactgacaaacacctttctcctgatggccagtatgtccccaggattatgtttgttgacccatctctgacagttagagccgatatcactggaagatattcaaatcgtctctatgcttacgaacctgcagatacagctctgttgcttgacaacatgaagaaagctctcaagttgctgaagactgaattgtaaagaaaaaaaatctccaagcccttctgtctgtcaggccttgagacttgaaaccagaagaagtgtgagaagactggctagtgtggaagcatagtgaacacactgattaggttatggtttaatgttacaacaactattttttaagaaaaacaagttttagaaatttggtttcaagtgtacatgtgtgaaaacaatattgtatactaccatagtgagccatgattttctaaaaaaaaaaataaatgttttgggggtgttctgttttctccaacttggtctttcacagtggttcgtttaccaaataggattaaacacacacaaaatgctcaaggaagggacaagacaaaaccaaaactagttcaaatgatgaagaccaaagaccaagttatcatctcaccacaccacaggttctcactagatgactgtaagtagacacgagcttaatcaacagaagtatcaagccatgtgctttagcataaaagaatatttagaaaaacatcccaagaaaatcacatcactacctagagtcaactctggccaggaactctaaggtacacactttcatttagtaattaaattttagtcagattttgcccaacctaatgctctcagggaaagcctctggcaagtagctttctccttcagaggtctaatttagtagaaaggtcatccaaagaacatctgcactcctgaacacaccctgaagaaatcctgggaattgaccttgtaatcgatttgtctgtcaaggtcctaaagtactggagtgaaataaattcagccaacatgtgactaattggaagaagagcaaagggtggtgacgtgttgatgaggcagatggagatcagaggttactagggtttaggaaacgtgaaaggctgtggcatcagggtaggggagcattctgcctaacagaaattagaattgtgtgttaatgtcttcactctatacttaatctcacattcattaatatatggaattcctctactgcccagcccctcctgatttctttggcccctggactatggtgctgtatataatgctttgcagtatctgttgcttgtcttgattaacttttttggataaaaccttttttgaacaga

SEQ ID NO: 164735 - DNA, 854 bp, Artificial Sequence
  derived and/or modified sequence
atgtcaaattacactgatgctgagtcaagcttctcaaagcaagagataatcagagttgccatggagaaaattccagtgtcagcattcttgctccttgtggccctctcctacactctggccagagataccacagtcaaacctggagccaaaaaggacacaaaggactctcgacccaaactgccccagaccctctccagaggttggggtgaccaactcatctggactcagacatatgaagaagctctatataaatccaagacaagcaacaaacccttgatgattattcatcacttggatgagtgcccacacagtcaagctttaaagaaagtgtttgctgaaaataaagaaatccagaaattggcagagcagtttgtcctcctcaatctggtttatgaaacaactgacaaacacctttctcctgatggccagtatgtccccaggattatgtttgttgacccatctctgacagttagagccgatatcactggaagatattcaaatcgtctctatgcttacgaacctgcagatacagctctgttgcttgacaacatgaagaaagctctcaagttgctgaagactgaattgtaaagaaaaaaaatctccaagcccttctgtctgtcaggccttgagacttgaaaccagaagaagtgtgagaagactggctagtgtggaagcatagtgaacacactgattaggttatggtttaatgttacaacaactattttttaagaaaaacaagttttagaaatttggtttcaagtgtacatgtgtgaaaacaatattgtatactaccatagtgagccatgattttctaaaaaaaaaaataaatgttttgggggtgttctgttttctcc

SEQ ID NO: 164736 - DNA, 396 bp, Artificial Sequence
  derived and/or modified sequence
atggagaagatccccgtgagcgccttcctgctgctggtggccctgagctacaccctggccagagacaccaccgtgaagcccggcgccaagaaggacaccaaggacagcagacccaagctgccccagaccctgagcagaggctggggcgaccagctgatctggacccagacctacgaggaggccctgtacaagagcaagaccagcaacaagcccctgatgatcatccaccacctggacgagtgcccccacagccaggccctgaagaaggtgttcgccgagaacaaggagatccagaagctggccgagcagttcgtgctgctgaacctggtgtacgagaccaccgacaagcacctgagccccgacggccagtacgtgcccagaatcatgttcgtgtag

SEQ ID NO: 164737 - DNA, 528 bp, Artificial Sequence
  derived and/or modified sequence
atggagaagatccccgtgagcgccttcctgctgctggtggccctgagctacaccctggccagagacaccaccgtgaagcccggcgccaagaaggacaccaaggacagcagacccaagctgccccagaccctgagcagaggctggggcgaccagctgatctggacccagacctacgaggaggccctgtacaagagcaagaccagcaacaagcccctgatgatcatccaccacctggacgagtgcccccacagccaggccctgaagaaggtgttcgccgagaacaaggagatccagaagctggccgagcagttcgtgctgctgaacctggtgtacgagaccaccgacaagcacctgagccccgacggccagtacgtgcccagaatcatgttcgtggaccccagcctgaccgtgagagccgacatcaccggcagatacagcaacagactgtacgcctacgagcccgccgacaccgccctgctgctggacaacatgaagaaggccctgaagctgctgaagaccgagctgtag

SEQ ID NO: 164738 - DNA, 588 bp, Artificial Sequence
  derived and/or modified sequence
atgagcaactacaccgacgccgagagcagcttcagcaagcaggagatcatcagagtggccatggagaagatccccgtgagcgccttcctgctgctggtggccctgagctacaccctggccagagacaccaccgtgaagcccggcgccaagaaggacaccaaggacagcagacccaagctgccccagaccctgagcagaggctggggcgaccagctgatctggacccagacctacgaggaggccctgtacaagagcaagaccagcaacaagcccctgatgatcatccaccacctggacgagtgcccccacagccaggccctgaagaaggtgttcgccgagaacaaggagatccagaagctggccgagcagttcgtgctgctgaacctggtgtacgagaccaccgacaagcacctgagccccgacggccagtacgtgcccagaatcatgttcgtggaccccagcctgaccgtgagagccgacatcaccggcagatacagcaacagactgtacgcctacgagcccgccgacaccgccctgctgctggacaacatgaagaaggccctgaagctgctgaagaccgagctgtag

SEQ ID NO: 164739 - protein, 370 aa, Artificial Sequence
  derived and/or modified sequence
MSLHQFLLEPITCHAWNRDRTQIALSPNNHEVHIYKKNGSQWVKAHELKEHNGHITGIDWAPKSDRIVTCGADRNAYVWSQKDGVWKPTLVILRINRAATFVKWSPLENKFAVGSGARLISVCYFESENDWWVSKHIKKPIRSTVLSLDWHPNNVLLAAGSCDFKCRVFSAYIKEVDEKPASTPWGSKMPFGQLMSEFGGSGTGGWVHGVSFSASGSRLAWVSHDSTVSVADASKSVQVSTLKTEFLPLLSVSFVSENSVVAAGHDCCPMLFNYDDRGCLTFVSKLDIPKQSIQRNMSAMERFRNMDKRATTEDRNTALETLHQNSITQVSIYEVDKQDCRKFCTTGIDGAMTIWDFKTLESSIQGLRIM

SEQ ID NO: 164740 - DNA, 1113 bp, Artificial Sequence
  derived and/or modified sequence
atgtctcttcaccaattcctcctggagccaatcacttgccacgcctggaatagggaccgtacgcagatcgcactttctcccaacaatcacgaggtgcatatttacaaaaaaaacggcagtcagtgggtaaaagcccatgagctcaaggaacacaacggacatataacaggcattgactgggcgcctaagagtgatagaattgtgacatgcggagcggaccgcaacgcgtacgtgtggagccaaaaggacggtgtgtggaaacctactctggttatactccggataaacagagcggccacatttgttaaatggtcccctctcgaaaacaaattcgctgtgggcagtggcgcccgactgatctctgtctgctacttcgaaagtgagaatgattggtgggtgtcaaagcacattaaaaagcctatccgctcaactgtcctcagtctggattggcacccaaacaatgttctgcttgctgccggctcatgcgatttcaaatgcagggttttcagtgcttacattaaggaggtagatgagaagcctgcttccacgccttggggcagcaagatgccattcgggcagctcatgtcggagttcggcggaagcggtactgggggatgggtgcacggggtgagcttcagcgcttctggaagccggcttgcttgggtgagccacgatagtaccgtatcagtcgccgatgcctccaagagtgtgcaggtcagcacactcaaaacggagtttctgccgctcttaagcgttagctttgtgagcgagaacagtgtagtcgccgccggacacgactgctgtcctatgttattcaactacgatgataggggttgtttgactttcgtctccaagttggatattcccaaacagtccatccagcgtaatatgtcagctatggagcgatttagaaacatggacaagcgggccaccacagaggacaggaacactgctttagagactctgcaccagaatagcatcacccaagtgtctatctacgaggtcgataaacaggattgcaggaaattctgcacgacgggtattgacggggctatgaccatatgggactttaaaactctggaatctagcattcagggactccggatcatgtag

SEQ ID NO: 164741 - DNA, 1113 bp, Artificial Sequence
  derived and/or modified sequence
atgagcctgcaccagttcctgctggagcccatcacctgccacgcctggaacagagacaggacccagatcgccctgagccccaacaaccacgaggtgcacatctacaagaagaatggcagccagtgggtgaaggcccacgagctgaaggagcacaacggccacatcaccggcatcgactgggcccccaagagtgacagaattgtgacctgtggggctgacagaaatgcctacgtgtggagccagaaggatggagtgtggaagcccaccctggtgatcctgcgcatcaacagagctgccacctttgtgaagtggagccccctggagaacaagtttgctgtgggcagcggggcccggctcatctctgtgtgctactttgaaagtgaaaatgactggtgggtgtccaagcacatcaagaagcccatccgcagcacagtgctgagcctggactggcaccccaacaacgtgctgctggccgccggcagctgtgacttcaagtgcagggtcttcagcgcctacatcaaggaggtggatgagaagccagccagcaccccctggggcagcaagatgcccttcggccagctgatgtctgaatttggaggcagcggcactggaggctgggtgcacggcgtgtccttcagcgccagcggcagccggctggcctgggtgtcccatgacagcacagtgtctgtggctgatgccagcaagtctgtgcaggtgtccaccctgaagacagagttcctgcccctgctgtctgtgtcctttgtgtctgaaaattctgtggtggccgccggccatgactgctgccccatgctgttcaactatgatgaccggggctgcctgacctttgtgtccaagctggacatccccaagcagagcatccagaggaacatgtctgccatggagcgcttcaggaacatggacaagagggccaccacagaagatagaaacacagccctggagaccctgcaccagaacagcatcacccaggtgtccatctatgaggtggacaagcaggactgcaggaagttctgcaccaccggcattgatggagccatgaccatctgggacttcaagaccctggagagcagcatccagggcctgcgcatcatgtag

SEQ ID NO: 164742 - DNA, 1113 bp, Artificial Sequence
  derived and/or modified sequence
atgagcctgcaccagttcctgctggagcccatcacctgccacgcctggaaccgggaccggacacagatagccttatcccccaataaccatgaggtccacatttataagaaaaatggtagccagtgggtaaaggctcatgaattgaaggaacataatggccacatcaccggcatagattgggctccaaaatctgataggattgtaacatgtggcgctgatagaaacgcatatgtctggtctcagaaggacggggtgtggaagcccaccctggtgattctccgaatcaaccgtgcggctacctttgttaaatggtcaccactggaaaataaatttgccgtgggaagtggtgcgaggctgattagcgtttgttatttcgagagcgagaatgactggtgggtaagtaagcatatcaagaagcccattagaagtacagtgctgtctttagactggcatcccaataatgtcttattggccgcgggatcttgcgacttcaaatgtcgtgtcttttctgcctacatcaaagaagtggacgaaaaacccgcgtcaaccccctgggggagtaaaatgccttttggacaactcatgagcgaatttggagggagcggcactgggggttgggtccacggcgtttcattttccgcctctggaagccggctggcatgggtatctcatgatagtaccgtgtccgtcgctgacgcgagcaagtctgtacaggtgtccacgctcaagaccgagtttctcccactgctgtcagtgagcttcgtctccgaaaactcagtagtggctgcaggacacgattgttgtcctatgttgtttaattatgatgaccgagggtgcctcactttcgtatcaaaactagatatccccaaacagtcaatccaaaggaacatgagtgccatggagagatttaggaacatggacaaaagggccaccacagaagataggaatacagctctggagaccctgcaccagaactctattacccaggttagcatctacgaagtcgacaaacaagattgtagaaagttttgtactaccggcatcgacggagcaatgaccatctgggacttcaaaacactggagagttcgattcaggggctacggatcatgtag

SEQ ID NO: 164743 - DNA, 1113 bp, Artificial Sequence
  derived and/or modified sequence
atgtctctgcaccaatttttactggaacctatcacttgccatgcctggaacagggaccgcacgcagattgccttgtctccaaataaccacgaggttcatatttacaaaaagaacggcagccaatgggtaaaagcgcatgaactgaaggagcataacggtcacatcaccggaatcgattgggcacctaaatcagatagaatcgttacttgtggagccgacagaaatgcttacgtctggtcccagaaggatggtgtctggaaacctacgttggttattctgcggataaatagagccgctaccttcgtgaaatggagcccactggaaaataagtttgctgtggggagcggagccaggctgataagtgtttgttacttcgaaagcgaaaacgattggtgggtgtctaaacacattaaaaagcccatccgcagcacagtcctgtcattggattggcacccaaataacgttctcctcgctgcgggaagctgcgacttcaagtgcagggtgttttctgcctacataaaggaggtcgacgaaaaaccggcttccaccccctggggcagtaaaatgccattcggccagctaatgtcggagtttggcggttctggaacagggggttgggtgcatggtgtttccttttcagcttcagggagtcggctggcctgggtgagccatgactctaccgtaagtgtcgctgacgcctctaagagtgtgcaggtatccacactgaagacagaatttttgcctctgctgtcggtgagctttgtgagcgaaaattctgtggtggcagcgggacacgattgctgccccatgctttttaactacgacgaccgcggatgtctcacctttgtgtctaagctggatattcccaaacagtcaatccagcgcaacatgtcagccatggagagattcagaaatatggataaaagggcgactacagaggataggaataccgcacttgaaactctgcaccaaaatagtatcacacaggtgtcgatctacgaagtggacaaacaggactgtagaaagttttgcactactggtatagacggtgctatgaccatttgggattttaagacactcgagtcgtccatacagggtcttcgtattatgtag

SEQ ID NO: 164744 - DNA, 1565 bp, Artificial Sequence
  derived and/or modified sequence
gtcctccgcccgcgcccgacggagcctgttcgcgtcgactgcccagagtccgcgaatcctccgctccgagcccgtccggactcccccgatcccagctttctctcctttgaaaacactaagaataatgtcactgcatcagtttttactagagccaatcacctgtcatgcctggaacagggatcgtactcagattgccctcagtcccaataatcacgaagtgcacatctataagaagaacgggagccagtgggtgaaagctcatgaactcaaggagcacaacggacacatcacaggtattgactgggctcccaagagcgaccgcattgtcacttgtggggcagaccgcaatgcctatgtctggagtcagaaagatggtgtttggaagccaaccctggtgatcctgagaattaatcgcgcagctacttttgtgaagtggtcccccctagagaacaaatttgctgtgggaagtggagcacgactcatttctgtttgttactttgagtctgaaaatgactggtgggtgagcaagcacattaaaaagccgattcgctccacagtcctcagcttggattggcatcccaacaacgttttgctggcagcaggatcatgtgacttcaaatgcagagtgttttctgcctacattaaagaagtggatgaaaagccagccagcacgccctggggcagcaagatgccttttgggcagctgatgtcagagtttggtggcagtggcactggtggctgggtccacggggtaagcttctctgccagtgggagccgcctggcctgggtcagccacgacagcaccgtgtctgttgctgatgcctcaaaaagtgtgcaggtctcgactctgaagacagagttcctgccgctcctaagtgtgtcatttgtctcagagaacagcgtcgtggctgctggccatgactgctgcccaatgctctttaactacgatgaccgcggctgcctgaccttcgtctccaagttagatattccaaaacagagcatccaacgcaacatgtctgccatggaacgcttccgcaacatggacaagagagccacaactgaggaccgcaacacggccttggagacgctgcaccagaatagcatcactcaagtctctatttatgaggtggacaagcaagattgtcgcaaattttgcactactggcatcgatggagccatgacaatttgggatttcaagaccctcgagtcttccatccagggcctccggataatgtgaagctgagtgagcctccgccatccagcatgacaaactgtggccgaccgcagctgtgccgtggcacgatggcgaggaagccagccccaaggaaacactgaaaacacatatcacgccaatgccgtgtggttttgtttgaatataaaattggtgaaagtgttggtttttttaaggcagtaatttttttgtttgtttttttgcgatttcattccattcttgaccaaagcttctctttaagtagtttattatggaaaattgtcacactaacttaaaagacagggtgagggagatatgtaaattgtccactagaaaattaaataaaagaactgaa

SEQ ID NO: 164745 - DNA, 1113 bp, Artificial Sequence
  derived and/or modified sequence
atgagcctgcaccagttcctgctggagcccatcacctgccacgcctggaacagagacagaacccagatcgccctgagccccaacaaccacgaggtgcacatctacaagaagaacggcagccagtgggtgaaggcccacgagctgaaggagcacaacggccacatcaccggcatcgactgggcccccaagagcgacagaatcgtgacctgcggcgccgacagaaacgcctacgtgtggagccagaaggacggcgtgtggaagcccaccctggtgatcctgagaatcaacagagccgccaccttcgtgaagtggagccccctggagaacaagttcgccgtgggcagcggcgccagactgatcagcgtgtgctacttcgagagcgagaacgactggtgggtgagcaagcacatcaagaagcccatcagaagcaccgtgctgagcctggactggcaccccaacaacgtgctgctggccgccggcagctgcgacttcaagtgcagagtgttcagcgcctacatcaaggaggtggacgagaagcccgccagcaccccctggggcagcaagatgcccttcggccagctgatgagcgagttcggcggcagcggcaccggcggctgggtgcacggcgtgagcttcagcgccagcggcagcagactggcctgggtgagccacgacagcaccgtgagcgtggccgacgccagcaagagcgtgcaggtgagcaccctgaagaccgagttcctgcccctgctgagcgtgagcttcgtgagcgagaacagcgtggtggccgccggccacgactgctgccccatgctgttcaactacgacgacagaggctgcctgaccttcgtgagcaagctggacatccccaagcagagcatccagagaaacatgagcgccatggagagattcagaaacatggacaagagagccaccaccgaggacagaaacaccgccctggagaccctgcaccagaacagcatcacccaggtgagcatctacgaggtggacaagcaggactgcagaaagttctgcaccaccggcatcgacggcgccatgaccatctgggacttcaagaccctggagagcagcatccagggcctgagaatcatgtag

SEQ ID NO: 164746 - protein, 278 aa, Artificial Sequence
  derived and/or modified sequence
MELWPCLAAALLLLLLLVQLSRAAEFYAKVALYCALCFTVSAVASLVCLLRHGGRTVENMSIIGWFVRSFKYFYGLRFEVRDPRRLQEARPCVIVSNHQSILDMMGLMEVLPERCVQIAKRELLFLGPVGLIMYLGGVFFINRQRSSTAMTVMADLGERMVRENLKVWIYPEGTRNDNGDLLPFKKGAFYLAVQAQVPIVPVVYSSFSSFYNTKKKFFTSGTVTVQVLEAIPTSGLTAADVPALVDTCHRAMRTTFLHISKTPQENGATAGSGVQPAQ

SEQ ID NO: 164747 - DNA, 837 bp, Artificial Sequence
  derived and/or modified sequence
atggagctgtggccctgtctcgccgccgctctcctcctgctcctgctgctggtacagctgagtcgcgccgcagagttttacgctaaggttgctctgtactgcgctctatgttttaccgtgtctgctgtggcttcgctagtatgtctgctgcgacacgggggacgtactgtggagaacatgagtattatcgggtggtttgtacggagctttaaatacttttatggcctgcgcttcgaagtgagggacccaagacggctgcaagaagcccgcccttgcgtgattgtctcaaaccaccagagtattctcgacatgatgggactgatggaagttcttccagaacgctgtgttcagatcgccaaacgggagctgctattcctgggacccgtcgggctgatcatgtatctgggcggcgtatttttcatcaatcggcagcgctcaagcacagcaatgactgtgatggcggacctgggcgagcgcatggtgagggaaaacctgaaggtctggatctaccccgagggaacgcggaatgataacggcgacctactgccatttaagaaaggagcattttacctggccgtacaggcccaagtgcctatcgttcccgtggtgtactcttcgttctcttctttttacaacacaaagaaaaaatttttcacatccggtacagtgaccgtgcaggttttagaggcgatccctacgtccggtttgacagccgccgacgttcccgcgttagtggatacctgccacagggccatgcggacgacgttcctgcacatctcaaagactccacaggagaacggagctaccgcagggagcggggttcaacccgcgcaatag

SEQ ID NO: 164748 - DNA, 837 bp, Artificial Sequence
  derived and/or modified sequence
atggaattgtggccatgcctagctgccgcactgctgcttctactgctgctggtccaactgtctagagcagcggagttttacgctaaagtggctctgtactgcgcactttgcttcacggtcagcgcagtggctagtctggtgtgcttgctgcgccatggtggtagaactgtggagaatatgagcatcattggttggtttgtgcggtctttcaaatacttctacggcctcaggttcgaagtacgcgaccctagaagactccaggaggcgaggccttgtgtgatcgtgtccaatcatcagagtatcctagatatgatgggcctaatggaagtccttcccgaacggtgcgtgcagatcgccaagagggagctcctgttcctggggcccgtcggcctgattatgtatcttggtggcgtgtttttcatcaacaggcagcgcagctcgactgccatgaccgtcatggcggatttgggagagcgcatggtgcgggagaaccttaaggtgtggatttaccctgagggcactagaaacgataatggggacctcctgccctttaaaaaaggcgccttttacctggcagttcaggcccaggttcccattgtccctgtggtctatagttcattctcttctttctacaacactaaaaagaaatttttcacatcaggtacagttactgtccaagtgctcgaagccataccaacaagtgggctcaccgcagctgatgttcctgctctggtcgacacctgtcacagggctatgcgcaccactttcctgcatatatctaagactccgcaggagaacggggcaactgccgggtcgggcgtgcaacctgctcaatag

SEQ ID NO: 164749 - DNA, 837 bp, Artificial Sequence
  derived and/or modified sequence
atggagctgtggccctgcctggccgccgccctgctgctgctgctgctgctggtgcagctgagcagagctgctgagttctacgccaaggtggccctgtactgtgccctgtgcttcaccgtgtctgctgtggccagcctggtgtgcctgctgcggcacggcggccgcacagtggagaacatgagcatcatcggctggtttgtgcgctccttcaagtacttctacggcctgcgctttgaggtgcgggacccccggcggctgcaggaggcccggccctgcgtcatcgtgagcaaccaccagagcatcctggacatgatgggcctgatggaggtgctgcctgagcgctgtgtgcagatcgccaagcgggagctgctcttcctgggccctgtgggcctcatcatgtacctgggcggcgtcttcttcatcaaccggcagaggagcagcacagccatgacagtgatggctgacctgggggagaggatggtgcgggagaacctgaaggtgtggatctacccagagggcaccagaaatgacaacggggacctgctgcccttcaagaagggggccttctacctggccgtgcaggcccaggtgcccatcgtgcctgtggtgtacagcagcttcagcagcttctacaacaccaagaagaagttcttcaccagcggcaccgtgacagtgcaggtgctggaggccatccccaccagcggcctgacagctgctgatgtgcctgccctggtggacacctgccaccgggccatgaggaccaccttcctgcacatcagcaagaccccccaggagaatggagccacagctggcagcggcgtgcagcctgcccagtag

SEQ ID NO: 164750 - DNA, 837 bp, Artificial Sequence
  derived and/or modified sequence
atggagctgtggccctgcctggccgccgccctgctgctgctgctgttattggtgcagttaagcagagccgccgaattctacgccaaggttgccttgtattgtgcgctgtgcttcactgtttctgcagtggccagtctggtctgcctgctgcgtcatgggggcagaaccgtagagaatatgagtatcataggctggtttgtgaggtcctttaaatatttttacgggttacgtttcgaggttcgcgacccacggcggctgcaagaagctcggccatgcgttatcgtgagcaatcatcagagcattctggacatgatgggcctgatggaggtgctgccagagaggtgtgtgcaaattgccaaacgcgaacttctgttcctgggacctgtcgggttgatcatgtacctgggcggtgtattttttattaacagacagagatcttctacagccatgacagtgatggccgacttgggtgaacggatggtcagagaaaacctaaaagtctggatttacccagaaggaactcgaaacgacaatggagatctgcttccctttaaaaaaggcgccttttacttggccgtgcaggcacaggtgcctatcgttcccgtggtctacagctcattttcaagcttctacaacacaaaaaagaaatttttcacatctgggaccgtgactgtgcaggttctcgaggctataccgaccagcggtctgactgcagcagacgttcctgccctcgtcgatacatgtcatcgcgccatgcgcaccaccttcctgcacatctccaaaacgcctcaagaaaatggcgctacagccgggagtggtgtgcaacccgctcaatag

SEQ ID NO: 164751 - DNA, 837 bp, Artificial Sequence
  derived and/or modified sequence
atggagctgtggccctgcctggccgccgccctgctgctgctgctgcttctggtccagctgtcaagggccgcggagttctacgccaaggtcgccctttattgcgccctttgtttcacggtcagcgcggtggcttccctcgtgtgtctgctgaggcatggcggacggaccgtggagaatatgagcatcatcggatggtttgtgcggagtttcaagtatttctacgggttacggtttgaggtgcgcgatccgaggcgtttgcaggaagcccggccttgtgtcattgtgtccaaccatcagtctattctggatatgatgggactgatggaggtgctgccagaaaggtgcgtgcaaatagccaagagggaattgctgtttttgggccctgtgggtctcataatgtatcttgggggcgtatttttcatcaacagacagaggtctagtacagctatgacagtcatggccgacttaggggagaggatggttcgcgagaacctgaaggtttggatctatccagaggggacaaggaacgacaatggagaccttcttcccttcaagaagggggccttctacctggcagtgcaggcccaggttcccatcgtccctgtggtctactctagtttttccagtttttacaacaccaagaagaagttcttcacctctggtaccgttacggtgcaggtgctggaggccatccctaccagcgggcttactgctgccgatgtccctgctcttgtcgatacttgccacagggccatgagaacaacattccttcacataagcaagactccacaggagaacggcgcaactgcaggttctggtgtccagccggcacagtag

SEQ ID NO: 164752 - DNA, 837 bp, Artificial Sequence
  derived and/or modified sequence
atggaattatggccctgtctggcggcagccctgctgttgctgctgctccttgtccagctctctcgtgccgctgaattttacgctaaagttgcgctttattgcgccttgtgttttactgtgagcgctgtcgcctccttggtgtgccttttgcgacatgggggtcggactgtggagaatatgtccataattggatggtttgtccgaagcttcaagtatttttacggcctcagattcgaagtgcgggaccctcgccgacttcaggaagcaaggccatgcgtgatcgtctctaatcatcagtctatcttagatatgatggggctcatggaagtgttaccagaaagatgtgtccaaattgcaaagagggagctgctattcctcgggccagttggactgattatgtatttaggaggagtgtttttcataaatcgacagagatctagcaccgcaatgaccgtgatggctgatttgggcgagagaatggtgagagagaatcttaaggtgtggatatacccagaggggacaagaaatgataacggggacttactacccttcaaaaagggtgccttctaccttgcagtgcaggctcaggtccccattgtacctgtggtttatagctctttctcttcattctacaatactaaaaaaaaatttttcacgagcggaacagttacagttcaggtgttggaagcaatcccaacgtcgggcctgaccgccgcagacgtgccagcattggtcgatacctgtcatagggccatgcgaactacgttcctgcatatctccaaaacccctcaggagaacggggctacagctggatctggagtgcagccagctcagtag

SEQ ID NO: 164753 - DNA, 837 bp, Artificial Sequence
  derived and/or modified sequence
atggaactgtggccttgcctagccgcagccctgctgctgcttctgctgctggtccagctgagccgcgcagctgagttctacgcaaaagtcgccctatattgcgcactatgttttacagtaagtgctgtggcctcattagtatgcctgctgagacacggcggacgcaccgttgagaacatgtcaattatcgggtggtttgtgcgttctttcaaatacttctacgggctgcgttttgaggtcagagacccaagacgactgcaggaagcaaggccatgtgttatagtgtcgaaccatcagtccatactagatatgatggggcttatggaagtgctccctgaaaggtgcgttcagatagcaaaacgagagctgctctttcttgggccagtaggactgatcatgtatttgggcggtgtgttttttatcaaccgtcagagaagctcaacagccatgacagtgatggccgacttaggcgaacggatggttcgggagaatctgaaggtgtggatctaccccgaaggaactagaaatgataacggcgacctcttgcccttcaaaaagggggctttctacctggccgttcaagctcaggtccccatcgtgcccgtggtctactcctctttctcctccttttacaatactaaaaagaagttctttacaagcggtaccgtcactgtgcaggtgctggaggccatcccgacctcaggactgactgccgctgatgtccccgcactggtggatacttgccaccgggctatgaggactactttcctacatattagcaagactccacaggagaacggagccacagcaggctccggtgtccagcctgcacaatag

SEQ ID NO: 164754 - DNA, 1512 bp, Artificial Sequence
  derived and/or modified sequence
cgcgggggagaagcgggagcgggagcgggagcgagctggcggcgccgtcgggcgccgggccgggccatggagctgtggccgtgtctggccgcggcgctgctgttgctgctgctgctggtgcagctgagccgcgcggccgagttctacgccaaggtcgccctgtactgcgcgctgtgcttcacggtgtccgccgtggcctcgctcgtctgcctgctgcgccacggcggccggacggtggagaacatgagcatcatcggctggttcgtgcgaagcttcaagtacttttacgggctccgcttcgaggtgcgggacccgcgcaggctgcaggaggcccgtccctgtgtcatcgtctccaaccaccagagcatcctggacatgatgggcctcatggaggtccttccggagcgctgcgtgcagatcgccaagcgggagctgctcttcctggggcccgtgggcctcatcatgtacctcgggggcgtcttcttcatcaaccggcagcgctctagcactgccatgacagtgatggccgacctgggcgagcgcatggtcagggagaacctcaaagtgtggatctatcccgagggtactcgcaacgacaatggggacctgctgccttttaagaagggcgccttctacctggcagtccaggcacaggtgcccatcgtccccgtggtgtactcttccttctcctccttctacaacaccaagaagaagttcttcacttcaggaacagtcacagtgcaggtgctggaagccatccccaccagcggcctcactgcggcggacgtccctgcgctcgtggacacctgccaccgggccatgaggaccaccttcctccacatctccaagaccccccaggagaacggggccactgcggggtctggcgtgcagccggcccagtagcccagaccacggcagggcatgacctggggagggcaggtggaagccgatggctggaggatgggcagaggggactcctcccggcttccaaataccactctgtccggctcccccagctctcactcagcccgggaagcaggaagccccttctgtcactggcctcagacacaggcccctggtgtcccctgcagggggctcagctggaccctccccgggctcgagggcagggactcgcgcccacggcacctctgggagctgggatgataaagatgaggcttgcggctgtggcccgctggtgggctgagccacaaggcccccgatggcccaggagcagatgggaggaccccgaggccagacgcacactgtccgagccctctgctcagccgcctgggacccaccagggtgcagctgggctccagggtccagcccacaagctgcatcaggctctctgggagaggaggggcctggagggccaggagtcccagactcacgcaccctgggccacagggagccgggaatcggggcctgctgctcctgctggcctggaagactctgtggggtcagcactgtactccgttgctgtttttttataaacacactcttggaagtggc

SEQ ID NO: 164755 - DNA, 1357 bp, Artificial Sequence
  derived and/or modified sequence
ggagcgagctggcggcgccgtcgggcgccgggccgggccatggagctgtggccgtgtctggccgcggcgctgctgttgctgctgctgctggtgcagctgagccgcgcggccgagttctacgccaaggtcgccctgtactgcgcgctgtgcttcacggtgtccgccgtggcctcgctcgtctgcctgctgcgccacggcggccggacggtggagaacatgagcatcatcggctggttcgtgcgaagcttcaagtacttttacgggctccgcttcgaggtgcgggacccgcgcaggctgcaggaggcccgtccctgtgtcatcgtctccaaccaccagagcatcctggacatgatgggcctcatggaggtccttccggagcgctgcgtgcagatcgccaagcgggagctgctcttcctggggcccgtgggcctcatcatgtacctcgggggcgtcttcttcatcaaccggcagcgctctagcactgccatgacagtgatggccgacctgggcgagcgcatggtcagggagaacctcaaagtgtggatctatcccgagggtactcgcaacgacaatggggacctgctgccttttaagaagggcgccttctacctggcagtccaggcacaggtgcccatcgtccccgtggtgtactcttccttctcctccttctacaacaccaagaagaagttcttcacttcaggaacagtcacagtgcaggtgctggaagccatccccaccagcggcctcactgcggcggacgtccctgcgctcgtggacacctgccaccgggccatgaggaccaccttcctccacatctccaagaccccccaggagaacggggccactgcggggtctggcgtgcagccggcccagtagcccagaccacggcagggcatgacctggggagggcaggtggaagccgatggctggaggatgggcagaggggactcctcccggcttccaaataccactctgtccggctcccccagctctcactcagcccgggaagcaggaagccccttctgtcactggcctcagacacaggcccctggtgtcccctgcagggggctcagctggaccctccccgggctcgagggcagggactcgcgcccacggcacctctgggagctgggatgataaagatgaggcttgcggctgtggcccgctggtgggctgagccacaaggcccccgatggcccaggagcagatgggaggaccccgaggccaggagtcccagactcacgcaccctgggccacagggagccgggaatcggggcctgctgctcctgctggcctggaagactctgtggggtcagcactgtactccgttgctgtttttttataaacacactcttgg

SEQ ID NO: 164756 - DNA, 837 bp, Artificial Sequence
  derived and/or modified sequence
atggagctgtggccctgcctggccgccgccctgctgctgctgctgctgctggtgcagctgagcagagccgccgagttctacgccaaggtggccctgtactgcgccctgtgcttcaccgtgagcgccgtggccagcctggtgtgcctgctgagacacggcggcagaaccgtggagaacatgagcatcatcggctggttcgtgagaagcttcaagtacttctacggcctgagattcgaggtgagagaccccagaagactgcaggaggccagaccctgcgtgatcgtgagcaaccaccagagcatcctggacatgatgggcctgatggaggtgctgcccgagagatgcgtgcagatcgccaagagagagctgctgttcctgggccccgtgggcctgatcatgtacctgggcggcgtgttcttcatcaacagacagagaagcagcaccgccatgaccgtgatggccgacctgggcgagagaatggtgagagagaacctgaaggtgtggatctaccccgagggcaccagaaacgacaacggcgacctgctgcccttcaagaagggcgccttctacctggccgtgcaggcccaggtgcccatcgtgcccgtggtgtacagcagcttcagcagcttctacaacaccaagaagaagttcttcaccagcggcaccgtgaccgtgcaggtgctggaggccatccccaccagcggcctgaccgccgccgacgtgcccgccctggtggacacctgccacagagccatgagaaccaccttcctgcacatcagcaagaccccccaggagaacggcgccaccgccggcagcggcgtgcagcccgcccagtag

SEQ ID NO: 164757 - protein, 473 aa, Artificial Sequence
  derived and/or modified sequence
MATATEQWVLVEMVQALYEAPAYHLILEGILILWIIRLLFSKTYKLQERSDLTVKEKEELIEEWQPEPLVPPVPKDHPALNYNIVSGPPSHKTVVNGKECINFASFNFLGLLDNPRVKAAALASLKKYGVGTCGPRGFYGTFDVHLDLEDRLAKFMKTEEAIIYSYGFATIASAIPAYSKRGDIVFVDRAACFAIQKGLQASRSDIKLFKHNDMADLERLLKEQEIEDQKNPRKARVTRRFIVVEGLYMNTGTICPLPELVKLKYKYKARIFLEESLSFGVLGEHGRGVTEHYGINIDDIDLISANMENALASIGGFCCGRSFVIDHQRLSGQGYCFSASLPPLLAAAAIEALNIMEENPGIFAVLKEKCGQIHKALQGISGLKVVGESLSPAFHLQLEESTGSREQDVRLLQEIVDQCMNRSIALTQARYLEKEEKCLPPPSIRVVVTVEQTEEELERAASTIKEVAQAVLL

SEQ ID NO: 164758 - protein, 143 aa, Artificial Sequence
  derived and/or modified sequence
MATATEQWVLVEMVQALYEAPAYHLILEGILILWIIRLLFSKTYKLQERSDLTVKEKEELIEEWQPEPLVPPVPKDHPALNYNIVSGPPSHKTVVNGKECINFASFNFLGLLDNPRVKAAALASLKKYGVGTCGPRGFYGTFE

SEQ ID NO: 164759 - DNA, 1422 bp, Artificial Sequence
  derived and/or modified sequence
atggccacggcgaccgagcagtgggtgttagtggagatggtgcaggccctttacgaagcgcctgcctatcatttaattctggagggcatccttattctgtggattatcaggctcctgttctcaaagacttataagcttcaagaacggagcgacctaactgttaaggagaaagaagagctgattgaagaatggcagcccgagcccttagttccaccggtgcccaaggaccacccagccttgaattataatatagtgagcggccctccgagtcacaagacagtggttaacggcaaagaatgtatcaacttcgcatcctttaacttccttggtctgttggacaatcctcgagtgaaggcagccgctctcgcatctctgaagaagtatggcgtgggcacctgtggccctaggggattttacggtacctttgatgtccacctggacttggaggaccgactggctaaattcatgaagaccgaggaggccatcatttattcatatggcttcgccaccatcgcctccgcgattcctgcttattcaaagagaggcgacatcgtgttcgtggaccgcgccgcctgtttcgcaatacagaaagggttacaggcatctagatcggatatcaagctctttaagcataacgacatggctgatctggagaggttgctaaaggagcaagagattgaggatcagaaaaacccacgtaaggcgcgagtcacacgccggttcattgtggtagagggtctgtatatgaatacagggaccatctgtcctctgcccgagttagtgaagctcaaatacaaatataaggctaggatctttctggaggagtcactttctttcggggtgctgggagagcatggaaggggggtcactgagcactacggcataaatattgacgatatcgacttgatctccgccaacatggaaaatgccctcgcttccattggtggtttctgttgcggtaggagcttcgttattgaccaccagcggctgagcggtcagggttattgtttctcagcgtccctgcctccactgcttgccgcagcagccatagaggctctaaatatcatggaggaaaaccctggaattttcgccgtcctgaaggagaagtgtggacagattcataaggccctgcaggggatctcagggttaaaagtggtgggcgagtctctctcccctgctttccatttgcagctggaggaatcaacagggagtcgggagcaggatgttaggcttctgcaggaaatagtggaccagtgcatgaataggtcaatcgcactcacacaggcccgctatttagaaaaagaagagaaatgcctgccgccacctagcatccgcgtcgttgtgaccgtcgagcagaccgaggaagagttggagcgagccgcctctaccataaaggaggttgctcaggccgtgctcctgtag

SEQ ID NO: 164760 - DNA, 1422 bp, Artificial Sequence
  derived and/or modified sequence
atggccacagccacagagcagtgggtgctggtggagatggtgcaggccctgtatgaggccccagcctaccacctgatcctggagggcatcctgatcctgtggatcatccggctgctcttcagcaagacctacaagctgcaggagaggagtgacctgactgtgaaggagaaggaggagctgattgaggagtggcagcctgagcccctggtgccccctgtgcccaaggaccacccagccctgaactacaacatcgtgtctggcccccccagccacaagacagtggtgaatggcaaggagtgcatcaactttgccagcttcaacttcctgggcctgctggacaacccccgggtgaaggccgccgccctggccagcctgaagaagtatggagtgggcacctgtggcccccggggcttctacggcacctttgatgtgcacctggacctggaggaccggctggccaagttcatgaagacagaggaggccatcatctacagctatggctttgccaccatcgccagcgccatcccagcctacagcaagagaggagacatcgtgtttgtggaccgggccgcctgctttgccatccagaagggcctgcaggccagcagaagtgacatcaagctgttcaagcacaatgacatggctgacctggagcggctgctgaaggagcaggagattgaggaccagaagaaccccaggaaggcccgggtgacccggcgcttcatcgtggtggagggcctgtacatgaacacaggcaccatctgccccctgcctgagctggtgaagctgaagtacaagtacaaggcccgcatcttcctggaggagagcctgagctttggagtgctgggggagcacggccggggcgtgacagagcactacggcatcaacattgatgacatcgacctgatcagcgccaacatggagaatgccctggccagcatcggcggcttctgctgcggccgcagctttgtgattgaccaccagaggctgagcggccagggctactgcttcagcgccagcctgccccccctgctggccgccgccgccatcgaggccctgaacatcatggaggagaaccctggcatctttgctgtgctgaaggagaagtgtggccagatccacaaggccctgcagggcatcagcggcctgaaggtggtgggggagagcctgagccctgccttccacctgcagctggaggagagcacaggcagccgggagcaggatgtgcggctgctgcaggagatcgtggaccagtgcatgaacagaagcatcgccctgacccaggcccgctacctggagaaggaggagaagtgcctgcccccacccagcatccgggtggtggtgacagtggagcagacagaggaggagctggagcgggccgccagcaccatcaaggaggtggcccaggccgtgctgctgtag

SEQ ID NO: 164761 - DNA, 1422 bp, Artificial Sequence
  derived and/or modified sequence
atggccaccgccaccgagcagtgggtgctggtggagatggtgcaggcactgtacgaggcccctgcataccacctgattctggaaggaattctcattttgtggattatccggctcctttttagtaagacctacaaactgcaggaaaggtctgacctgaccgtcaaggaaaaagaggagctgatcgaggagtggcagcccgagcctctggtaccccctgtgcccaaagatcacccggcacttaattacaatattgtctctggccctccctcgcataaaaccgtggttaacgggaaggagtgcattaacttcgcatccttcaactttctaggccttctggataatcccagagtgaaagcagcggctctcgcgtccctcaaaaagtacggcgtgggaacctgcggccctagaggattttatgggacatttgatgttcacctggatctggaagaccggctggccaagtttatgaaaacggaagaggccattatctattcctacggattcgccaccatcgccagcgctatcccagcctattcaaagaggggagacattgtgttcgtggaccgggcagcatgcttcgcaattcagaagggactccaagccagcagatccgacatcaagctgtttaagcataacgatatggccgacctggaaagactcctaaaagaacaggaaatagaggaccagaagaatccgcgtaaggcgcgggtcactcgtcggttcattgtcgtggaaggattgtacatgaatactgggacgatctgtccgctcccagagctagtgaagctcaagtataagtacaaggcccggatcttcctggaggagtccctttcgtttggcgttcttggcgaacacggtagaggggtgacagaacattacggcataaatatcgacgatattgatctcatcagcgctaatatggagaacgctttggcttccatcggagggttctgttgtgggcgaagttttgtcatcgaccatcagagactgtctggccagggttactgcttctctgcaagtctgcctcctctacttgcagctgcagctatagaggccctgaatattatggaagaaaatcccgggattttcgcagtgcttaaagagaagtgtgggcagatccataaggcacttcagggcattagtggacttaaggtggtgggggagagcctgagcccagcctttcaccttcagctggaggagtctaccggcagtcgggagcaagatgttagacttttgcaagagatagttgaccagtgcatgaatcgttctattgctcttacccaggccaggtacttagagaaggaagaaaaatgcctgccgcccccatcaataagagtggtggtgacggtcgagcaaactgaggaagaactcgaaagggcggccagcacaatcaaagaggtggcccaggcagtgctcttgtag

SEQ ID NO: 164762 - DNA, 1422 bp, Artificial Sequence
  derived and/or modified sequence
atggccactgcgaccgaacagtgggtactcgttgaaatggtgcaggctctgtacgaggcgccagcgtaccacctcatcttagaggggatcctgatcttatggatcattcggctacttttctcaaagacctataaacttcaggaacgttccgacttgacggtgaaagagaaggaagaactaattgaagagtggcagcctgaacccctggtcccacccgtcccgaaggaccatcctgcgctaaattataatatcgtctctggaccgccaagccacaaaacagtagtaaatggcaaggagtgtataaattttgcatcattcaacttcttagggcttttggacaatcccagagtcaaggcagctgcccttgcctccctcaagaagtatggcgtcggcacttgtgggcctcgtggcttctacggaacctttgatgtacaccttgacctggaagaccgcttggccaagtttatgaagacagaagaagctatcatctactcatacgggttcgctaccatcgcttcagccattcccgcatattctaaacggggagatatcgttttcgtggatagagcagcatgctttgctatccaaaagggtttgcaggccagtcggtctgacattaagctcttcaagcataatgatatggctgacttggagagattactgaaagagcaggaaatcgaagatcagaagaatcctaggaaggcccgagttacgcgccgttttattgtggtggaaggcctgtacatgaacactggtaccatttgcccgctgcctgagcttgtgaagctaaaatacaaatataaggccagaatctttcttgaagaatcattgagttttggagttcttggggagcacggccgaggcgtgaccgaacattatgggattaatatcgatgatatcgatctcatttccgctaacatggagaacgccctggcgtccatagggggattttgctgtgggagatctttcgtgattgaccatcagagactctccggtcaaggatactgttttagcgcaagcctcccgcctctcctagcagctgcagccattgaggcattgaacatcatggaggaaaatcctggcatcttcgccgtgcttaaagagaaatgcggccaaattcacaaggcccttcaaggaatttccggcctgaaagtggtcggcgagtctctgtctcctgcgttccaccttcagctcgaggagtccacaggatccagggagcaagatgtgaggctgttgcaggaaattgtagaccagtgtatgaacagaagcatcgcccttacacaagccagatatctggagaaagaagagaagtgtctccccccaccttccattagagtcgttgtgacggtggagcagacggaagaagagttggagagagcggcttcaaccatcaaagaagtggcccaagctgttctgttgtag

SEQ ID NO: 164763 - DNA, 1894 bp, Artificial Sequence
  derived and/or modified sequence
ctaactatggcgaccgccacggagcagtgggttctggtggagatggtacaggcgctttacgaggctcctgcttaccatcttattttggaagggattctgatcctctggataatcagacttcttttctctaagacttacaaattacaagaacgatctgatcttacagtcaaggaaaaagaagaactgattgaagagtggcaaccagaacctcttgttcctcctgtcccaaaagaccatcctgctctcaactacaacatcgtttcaggccctccaagccacaaaactgtggtgaatggaaaagaatgtataaacttcgcctcatttaattttcttggattgttggataaccctagggttaaggcagcagctttagcatctctaaagaagtatggcgtggggacttgtggacccagaggattttatggcacatttgatgttcatttggatttggaagaccgcctggcaaaatttatgaagacagaagaagccattatatactcatatggatttgccaccatagccagtgctattcctgcttactctaaaagaggggacattgtttttgtagatagagctgcctgctttgctattcagaaaggattacaggcatcccgtagtgacattaagttatttaagcataatgacatggctgacctcgagcgactactaaaagaacaagagatcgaagatcaaaagaatcctcgcaaggctcgtgtaactcggcgtttcattgtagtagaaggattgtatatgaatactggaactatttgtcctcttccagaattggttaagttaaaatacaaatacaaagcaagaatcttcctggaggaaagcctttcatttggagtcctaggagagcatggccgaggagtcactgaacactatggaatcaatattgatgatattgatcttatcagtgccaacatggagaatgcacttgcttctattggaggtttctgctgtggcaggtcttttgtaattgaccatcagcgactttccggccagggatactgcttttcagcttcgttacctcccctgttagctgctgcagcaattgaggccctcaacatcatggaagagaatccaggtatttttgcagtgttgaaggaaaagtgcggacaaattcataaagctttacaaggcatttctggattaaaagtggtgggggagtccctttctccagcctttcacctacaactggaagagagcactgggtctcgcgagcaagatgtcagactgcttcaggaaattgtagatcaatgcatgaacagaagtattgcattaactcaggcgcgctacttggagaaagaagagaagtgtctccctcctcccagcattcgggttgtggtcacggtggaacaaacagaggaagaactggagagagctgcgtccaccatcaaggaggtagcccaggccgtcctgctctaggcagagtcccgggaccatggcctcctgccacacaacacgcagagaggactcaagactcccgctggccatggagtggcctgaaagagagcaagaacatgtggatctttgataggattgttaccaaatggtgtcagtatggaccaattgtgtgaccatgagaaggatgcttattttttttaaaaagaaaacacatctaaaagcccaggaactgatttttttaagaggaaaactaatgacagtgtataactgatgtttaaattgtgcatttagtactatttaaatgttttcttatactagtattttatattcttttgttgtcgtttaaaactggagcttcagtgtctcttccctccctctaatagtaatggttcagtaagcactccttaactccttagtatttcatagaaaaatgactgcaacattaaagctaagaggaacacttcaacatatgtggtacaaatttata

SEQ ID NO: 164764 - DNA, 1422 bp, Artificial Sequence
  derived and/or modified sequence
atggccaccgccaccgagcagtgggtgctggtggagatggtgcaggccctgtacgaggcccccgcctaccacctgatcctggagggcatcctgatcctgtggatcatcagactgctgttcagcaagacctacaagctgcaggagagaagcgacctgaccgtgaaggagaaggaggagctgatcgaggagtggcagcccgagcccctggtgccccccgtgcccaaggaccaccccgccctgaactacaacatcgtgagcggcccccccagccacaagaccgtggtgaacggcaaggagtgcatcaacttcgccagcttcaacttcctgggcctgctggacaaccccagagtgaaggccgccgccctggccagcctgaagaagtacggcgtgggcacctgcggccccagaggcttctacggcaccttcgacgtgcacctggacctggaggacagactggccaagttcatgaagaccgaggaggccatcatctacagctacggcttcgccaccatcgccagcgccatccccgcctacagcaagagaggcgacatcgtgttcgtggacagagccgcctgcttcgccatccagaagggcctgcaggccagcagaagcgacatcaagctgttcaagcacaacgacatggccgacctggagagactgctgaaggagcaggagatcgaggaccagaagaaccccagaaaggccagagtgaccagaagattcatcgtggtggagggcctgtacatgaacaccggcaccatctgccccctgcccgagctggtgaagctgaagtacaagtacaaggccagaatcttcctggaggagagcctgagcttcggcgtgctgggcgagcacggcagaggcgtgaccgagcactacggcatcaacatcgacgacatcgacctgatcagcgccaacatggagaacgccctggccagcatcggcggcttctgctgcggcagaagcttcgtgatcgaccaccagagactgagcggccagggctactgcttcagcgccagcctgccccccctgctggccgccgccgccatcgaggccctgaacatcatggaggagaaccccggcatcttcgccgtgctgaaggagaagtgcggccagatccacaaggccctgcagggcatcagcggcctgaaggtggtgggcgagagcctgagccccgccttccacctgcagctggaggagagcaccggcagcagagagcaggacgtgagactgctgcaggagatcgtggaccagtgcatgaacagaagcatcgccctgacccaggccagatacctggagaaggaggagaagtgcctgcccccccccagcatcagagtggtggtgaccgtggagcagaccgaggaggagctggagagagccgccagcaccatcaaggaggtggcccaggccgtgctgctgtag

SEQ ID NO: 164765 - protein, 337 aa, Artificial Sequence
  derived and/or modified sequence
MAAPRDNVTLLFKLYCLAVMTLMAAVYTIALRYTRTSDKELYFSTTAVCITEVIKLLLSVGILAKETGSLGRFKASLRENVLGSPKELLKLSVPSLVYAVQNNMAFLALSNLDAAVYQVTYQLKIPCTALCTVLMLNRTLSKLQWVSVFMLCAGVTLVQWKPAQATKVVVEQNPLLGFGAIAIAVLCSGFAGVYFEKVLKSSDTSLWVRNIQMYLSGIIVTLAGVYLSDGAEIKEKGFFYGYTYYVWFVIFLASVGGLYTSVVVKYTDNIMKGFSAAAAIVLSTIASVMLFGLQITLTFALGTLLVCVSIYLYGLPRQDTTSIQQGETASKERVIGV

SEQ ID NO: 164766 - protein, 178 aa, Artificial Sequence
  derived and/or modified sequence
MAAPRDNVTLLFKLYCLAVMTLMAAVYTIALRYTRTSDKELYFSTTAVCITEVIKLLLSVGILAKETGSLGRFKASLRENVLGSPKELLKLSVPSLVYAVQNNMAFLALSNLDAAVYQVTYQLKIPCTALCTVLMLNRTLSKLQKKDFSMVTHIMSGLSSVSIQELKVLSRSFIFFLS

SEQ ID NO: 164767 - protein, 203 aa, Artificial Sequence
  derived and/or modified sequence
MLNRTLSKLQWVSVFMLCAGVTLVQWKPAQATKVVVEQNPLLGFGAIAIAVLCSGFAGVYFEKVLKSSDTSLWVRNIQMYLSGIIVTLAGVYLSDGAEIKEKGFFYGYTYYVWFVIFLASVGGLYTSVVVKYTDNIMKGFSAAAAIVLSTIASVMLFGLQITLTFALGTLLVCVSIYLYGLPRQDTTSIQQGETASKERVIGV

SEQ ID NO: 164768 - DNA, 1014 bp, Artificial Sequence
  derived and/or modified sequence
atggccgctcccagggacaacgtgactctcctgtttaaactgtattgcctggcggtgatgactctgatggcagccgtgtacactatcgctctgagatacacccggacttcagacaaagagctgtacttcagcactacggccgtgtgcattactgaagtgatcaaactcctgctgtcagtgggcattctggcaaaggagactgggtcccttgggcggtttaaagctagcctccgcgagaacgtgctcggctcccccaaagaactgttgaaactgtccgttccaagcctggtttatgccgtccagaataatatggcatttttggccctcagtaacctcgacgctgccgtgtaccaggtgacttaccaactaaagataccctgtactgccctgtgcaccgtgctcatgctgaatagaacactttctaagctgcagtgggtgagcgtgttcatgctctgcgctggcgttaccctggtccagtggaagcccgcccaggccacaaaagtagtggtggagcagaaccctctgctgggctttggtgctatagcaatcgccgtcctctgctccggcttcgccggggtgtattttgaaaaagtcctaaaatcttcagacaccagtctgtgggtccgcaacattcagatgtatttgtcaggcataatcgtcacgctggccggtgtctacctgtctgacggagccgagattaaggaaaagggttttttttacgggtacacttattacgtatggtttgttattttcctcgcttctgtgggtgggctgtataccagcgttgtcgtgaagtataccgacaatataatgaagggtttctcggccgcagctgctattgtgctgtccactatcgcgagcgtgatgctcttcggactgcagatcacgctgacctttgcattgggaacgcttctggtgtgtgtttctatttacctctacggcctcccccgccaggacacgacgtcaattcagcagggcgagacagcctccaaggagcgtgtgatcggcgtatag

SEQ ID NO: 164769 - DNA, 612 bp, Artificial Sequence
  derived and/or modified sequence
atgttgaatcggacactgtccaagctgcagtgggtttcagttttcatgttgtgtgctggagtgaccttagtgcagtggaaacctgcccaggccacaaaggtggttgtcgagcagaacccactgcttggcttcggagccatagcaatcgctgtcctgtgctccgggtttgccggcgtgtacttcgagaaggtgcttaaaagtagtgacacaagtttatgggtacgcaacatacagatgtatctgagcgggataatcgtcacattggccggtgtgtacctgtccgacggcgctgagattaaggagaaaggatttttctacgggtatacttactacgtgtggtttgtgatattcctggcgagtgtcggaggcctttacacttctgtcgtagttaaatacaccgataatattatgaaaggattcagcgcagcagcagcaattgtcttgtccacgatcgctagtgtcatgctgtttggcttgcagattacccttacattcgcgctgggtactctcctcgtgtgcgttagtatctatctgtatggcttgccccggcaggacaccacctccatccaacagggtgagacggccagcaaagagagagttataggtgtttag

SEQ ID NO: 164770 - DNA, 1014 bp, Artificial Sequence
  derived and/or modified sequence
atggccgccccccgggacaacgtgaccctgctcttcaagctgtactgcctggccgtgatgaccctgatggctgctgtgtacaccatcgccctgcgctacaccaggaccagtgacaaggagctgtacttcagcaccacagctgtgtgcatcacagaggtgatcaagctgctgctgtctgtgggcatcctggccaaggagaccggcagcctgggccgcttcaaggccagcctgagagaaaatgtgctgggcagccccaaggagctgctgaagctgtctgtgcccagcctggtgtatgctgtgcagaacaacatggccttcctggccctgagcaacctggatgctgctgtgtaccaggtgacctaccagctgaagatcccctgcacagccctgtgcaccgtgctgatgctgaacagaaccctgagcaagctgcagtgggtgtctgtgttcatgctgtgtgccggcgtgaccctggtgcagtggaagccagcccaggccaccaaggtggtggtggagcagaaccccctgctgggctttggagccatcgccatcgctgtgctgtgcagcggctttgctggggtgtactttgagaaggtgctgaagagcagtgacaccagcctgtgggtgaggaacatccagatgtacctgagcggcatcatcgtgaccctggccggcgtgtacctgagtgatggagctgagatcaaggagaagggcttcttctacggctacacctactacgtgtggtttgtgatcttcctggcctctgtgggcggcctgtacacctctgtggtggtgaagtacacagacaacatcatgaagggcttctctgctgctgctgccatcgtgctgagcaccatcgcctctgtgatgctgtttggcctgcagatcaccctgacctttgccctgggcaccctgctggtgtgtgtgtccatctacctgtatggcctgccccggcaggacaccaccagcatccagcagggcgagacagccagcaaggagcgggtgattggagtgtag

SEQ ID NO: 164771 - DNA, 612 bp, Artificial Sequence
  derived and/or modified sequence
atgctgaacagaaccctgagcaagctgcagtgggtgtctgtgttcatgctgtgtgccggcgtgaccctggtgcagtggaagccagcccaggccaccaaggtggtggtggagcagaaccccctgctgggctttggagccatcgccatcgctgtgctgtgcagcggctttgctggggtgtactttgagaaggtgctgaagagcagtgacaccagcctgtgggtgaggaacatccagatgtacctgagcggcatcatcgtgaccctggccggcgtgtacctgagtgatggagctgagatcaaggagaagggcttcttctacggctacacctactacgtgtggtttgtgatcttcctggcctctgtgggcggcctgtacacctctgtggtggtgaagtacacagacaacatcatgaagggcttctctgctgctgctgccatcgtgctgagcaccatcgcctctgtgatgctgtttggcctgcagatcaccctgacctttgccctgggcaccctgctggtgtgtgtgtccatctacctgtatggcctgccccggcaggacaccaccagcatccagcagggcgagacagccagcaaggagcgggtgattggagtgtag

SEQ ID NO: 164772 - DNA, 1014 bp, Artificial Sequence
  derived and/or modified sequence
atggccgccccccgggacaacgtgaccctgctgttcaagctgtactgtttggccgtgatgaccctgatggctgcagtttatacaatcgctttgcgctatacgcggacctcagataaggagttatatttcagtacaaccgctgtttgtattacagaagtcatcaagcttctcctctccgttgggattctcgctaaggagaccggctcattaggcagattcaaggcaagtctgcgtgagaatgtgctcggaagtcctaaggaactgcttaaattaagcgtacccagcttggtgtacgctgtccagaataacatggcttttctcgcgttgagtaatctagatgcagccgtataccaagtgacttaccagcttaagatcccctgtacagccttgtgcactgtcctcatgcttaatagaacactgagtaaattacaatgggtctcggtatttatgctttgtgcaggagtgaccctagtgcagtggaaaccagcccaggcgacaaaagtcgttgtggaacaaaaccccctgctgggatttggcgccatcgcaatcgcagtgctgtgctccggtttcgccggcgtctatttcgagaaggtgctcaagtccagcgatacctccctgtgggttcggaatattcaaatgtacttgtccggaatcatcgtgaccttagcaggtgtgtacttaagcgatggtgcagaaatcaaggagaagggctttttttatggttacacatactacgtctggttcgtgatttttctcgcgtccgtcggtggactgtacaccagtgtggtcgttaagtacacggacaacattatgaaaggctttagcgcagcagccgccatcgtgctctcgaccatagccagcgtgatgcttttcggcctgcaaatcactctcacctttgcactgggaactttgctggtgtgtgtttccatctacctttacgggctccctcgacaagacaccacttcgatccagcaaggggagacggcaagcaaagaacgcgtaattggagtttag

SEQ ID NO: 164773 - DNA, 612 bp, Artificial Sequence
  derived and/or modified sequence
atgctgaaccggaccctgagcaagctgcagtgggtgagcgtgttcatgctgtgcgctggtgtcactcttgttcagtggaagccagcccaagcgacaaaagttgtggtggaacaaaatcccctactcggtttcggcgctattgccattgcagtcttgtgttctggctttgctggcgtgtatttcgagaaggtactgaagagcagtgacaccagtctgtgggtgcgtaatatccaaatgtacttgtctggcatcattgtcactcttgccggagtgtatctgtccgacggcgccgaaatcaaggagaaggggttcttttacggatacacatactatgtgtggttcgtcattttccttgctagtgtgggcggactatacacgagcgttgtggtcaaatacaccgacaatattatgaaaggattcagtgctgcagctgctatcgtgctgtcaaccatcgctagcgttatgctgttcgggctgcagatcaccctgactttcgcccttggtactcttctagtgtgcgtttcgatctacctgtatggactcccgaggcaggataccacatctatccagcaaggagagactgcctctaaagagagagtaatcggggtctag

SEQ ID NO: 164774 - DNA, 1014 bp, Artificial Sequence
  derived and/or modified sequence
atggctgctccacgggataatgtgactttattgtttaaattatattgcctggcagtgatgactttgatggccgctgtgtatacgatcgctttaaggtatacaagaacatccgataaggaactctatttcagtacaaccgccgtctgcatcactgaggtgattaagctgctcctgagtgttggaatcctggccaaagagactgggtctctcggaaggttcaaggcttctctccgagagaatgtacttgggtccccaaaagagttgcttaagctgtcagtgcccagcctcgtttacgccgtccagaataacatggccttcttggctctttcaaatctcgatgccgctgtctaccaggtgacttaccaactgaaaattccatgtacagctttgtgtacggtgctgatgctaaatcgcaccctaagtaagctgcagtgggtcagcgtgtttatgctttgtgcaggagtcaccttggtccagtggaagcctgcccaggcaacaaaggtggtggtggaacaaaacccacttctgggattcggggctatcgccatcgccgtgctatgctctggctttgccggtgtgtacttcgagaaggtgctgaagtcaagcgatacgagcctttgggtgcggaacatccagatgtatctctccggcatcatcgtgacccttgctggagtttaccttagtgacggagctgagatcaaggagaaggggtttttttatgggtacacttactacgtctggtttgtgatcttccttgcttcagtgggcggactgtatacatccgtggtcgtgaagtacactgacaatatcatgaagggcttttcagccgctgcggctatcgttctatctacaatcgcctcagtcatgttattcgggctgcagattactctgactttcgccctgggtaccctattagtttgtgtcagtatctatttgtatggtctcccacgccaggacacaaccagcatccagcaaggagaaaccgccagcaaggagcgggtcattggagtgtag

SEQ ID NO: 164775 - DNA, 612 bp, Artificial Sequence
  derived and/or modified sequence
atgcttaaccgtaccctgtccaaactgcagtgggtttcagtgttcatgctctgtgctggggtgacacttgtgcaatggaaaccagctcaggcaaccaaggtggtggtggagcagaatcctctccttgggttcggcgcaattgcaattgccgtgttgtgtagcggattcgcaggagtatactttgaaaaggtccttaaaagctcagacaccagtttatgggtgcggaacatccagatgtacctgtccggcattatcgttactttggcaggagtgtacctgagcgacggcgcagagatcaaggagaagggcttcttttacggatatacttattatgtgtggttcgttatctttctagcttcagtggggggtctttacacttccgtggtggtcaaatataccgacaatatcatgaagggattctccgccgctgccgcaatagtcttgtccaccattgccagcgtgatgctattcgggttgcaaatcacgcttacctttgcgctggggacgctgttggtatgtgtgtctatctatctgtacgggctgccccgacaggatactacctccattcagcagggcgagacagcctccaaagagagggtgatcggagtgtag

SEQ ID NO: 164776 - DNA, 1206 bp, Artificial Sequence
  derived and/or modified sequence
acaatgtcactttattattcaagttatactgcttggcagtgatgaccctgatggctgcagtctataccatagctttaagatacacaaggacatcagacaaagaactctacttttcaaccacagccgtgtgtatcacagaagttataaagttattgctaagtgtgggaattttagctaaagaaactggtagtctgggtagattcaaagcatctttaagagaaaatgtcttggggagccccaaggaactgttgaagttaagtgtgccatcgttagtgtatgctgttcagaacaacatggctttcctagctcttagcaatctggatgcagcagtgtaccaggtgacctaccagttgaagattccgtgtactgctttatgcactgttttaatgttaaaccggacactcagcaaattacagtgggtttcagtttttatgctgtgtgctggagttacgcttgtacagtggaaaccagcccaagctacaaaagtggtggagtatattttgaaaaagtttaaagagttcagatacttctctttgggtgagaaacattcaaatgtatctatcagggattattgtgacattagctggcgtctacttgtcagatggagctgaaattaaagaaaaaggatttttctatggttacacatattatgtctggtttgtcatctttcttgcaagtgttggtggcctctacacttctgttgtggttaagtacacagacaacatcatgaaaggcttttctgcagcagcggccattgtcctttccaccattgcttcagtaatgctgtttggattacagataacactcacctttgccctgggtactcttcttgtatgtgtttccatatatctctatggattacccagacaagacactacatccatccaacaaggagaaacagcttcaaaggagagagttattggtgtgtgattttagcctcacgtgagactccttttaagactaaaccatttgcattaaactagagccttaagtcaatctcagaaggtagcataaacaaataaaaattaactgtatggcatgatcagtgcggttatgtggaaacaacaacaaacaaacgaagctatctgagtgaactgctaatacagaaacttaatgtagacctgtttggggtctactattgttttagaatgaaggaattgtattattgtgtgtatatataatttgtaaataaaaagtatggagatg

SEQ ID NO: 164777 - DNA, 1851 bp, Artificial Sequence
  derived and/or modified sequence
agttccgcggggggctgtcggggaaccatggctgccccgagagacaatgtcactttattattcaagttatactgcttggcagtgatgaccctgatggctgcagtctataccatagctttaagatacacaaggacatcagacaaagaactctacttttcaaccacagccgtgtgtatcacagaagttataaagttattgctaagtgtgggaattttagctaaagaaactggtagtctgggtagattcaaagcatctttaagagaaaatgtcttggggagccccaaggaactgttgaagttaagtgtgccatcgttagtgtatgctgttcagaacaacatggctttcctagctcttagcaatctggatgcagcagtgtaccaggtgacctaccagttgaagattccgtgtactgctttatgcactgttttaatgttaaaccggacactcagcaaattacagtgggtttcagtttttatgctgtgtgctggagttacgcttgtacagtggaaaccagcccaagctacaaaagtggtggtggaacaaaatccattattagggtttggcgctatagctattgctgtattgtgctcaggatttgcaggagtatattttgaaaaagttttaaagagttcagatacttctctttgggtgagaaacattcaaatgtatctatcagggattattgtgacattagctggcgtctacttgtcagatggagctgaaattaaagaaaaaggatttttctatggttacacatattatgtctggtttgtcatctttcttgcaagtgttggtggcctctacacttctgttgtggttaagtacacagacaacatcatgaaaggcttttctgcagcagcggccattgtcctttccaccattgcttcagtaatgctgtttggattacagataacactcacctttgccctgggtactcttcttgtatgtgtttccatatatctctatggattacccagacaagacactacatccatccaacaaggagaaacagcttcaaaggagagagttattggtgtgtgattttagcctcacgtgagactccttttaagactaaaccatttgcattaaactagagccttaagtcaatctcagaaggtagcataaacaaataaaaattaactgtatggcatgatcagtgcggttatgtggaaacaacaacaaacaaacgaagctatctgagtgaactgctaatacagaaacttaatgtagacctgtttggggtctactattgttttagaatgaaggaattgtattattgtgtgtatatataatttgtaaataaaaagtatggagatgatacggtgttaaaaaaaatcatggtaaggctacaatactcaagtaacaaggtttgggacaatgtctaagggttaaagtgccaaagccatttctgtactaactgttctcttgttccggtaccggggagaaggatgacccctccttattctccaattcatgtacagtattttgtcctagcagcataaagacctagctcttttcttacaagaggcagaaacaagacaggctagttcataaacaaactgtgtaacttctcaaaatgaatctatttcataactcggacaatttctgggtggtgactgagtacccctttagtgagtacccctttagtgctatatttgtgccattcattatctggttcatatttcttttctgttagatgatacacatttcttcaaaaaaatttctaatgtcacttttgtacttttttaaataaagtatgtttaactgttgggctctcaataatttgtgaaatttcagtgttttctataatgttaatggggaaattcagcaataaactttatttgtaagaaa

SEQ ID NO: 164778 - DNA, 1207 bp, Artificial Sequence
  derived and/or modified sequence
gtcagttccgcggggggctgtcggggaaccatggctgccccgagagacaatgtcactttattattcaagttatactgcttggcagtgatgaccctgatggctgcagtctataccatagctttaagatacacaaggacatcagacaaagaactctacttttcaaccacagccgtgtgtatcacagaagttataaagttattgctaagtgtgggaattttagctaagtgacctaccagttgaagattccgtgtactgctttatgcactgttttaatgttaaaccggacactcagcaaattacagtgggtttcagtttttatgctgtgtgctggagttacgcttgtacagtggaaaccagcccaagctacaaaagtggtggtggaacaaaatccattattagggtttggcgctatagctattgctgtattgtgctcaggatttgcaggagtatattttgaaaaagttttaaagagttcagatacttctctttgggtgagaaacattcaaatgtatctatcagggattattgtgacattagctggcgtctacttgtcagatggagctgaaattaaagaaaaaggatttttctatggttacacatattatgtctggtttgtcatctttcttgcaagtgttggtggcctctacacttctgttgtggttaagtacacagacaacatcatgaaaggcttttctgcagcagcggccattgtcctttccaccattgcttcagtaatgctgtttggattacagataacactcacctttgccctgggtactcttcttgtatgtgtttccatatatctctatggattacccagacaagacactacatccatccaacaaggagaaacagcttcaaaggagagagttattggtgtgtgattttagcctcacgtgagactccttttaagactaaaccatttgcattaaactagagccttaagtcaatctcagaaggtagcataaacaaataaaaattaactgtatggcatgatcagtgcggttatgtggaaacaacaacaaacaaacgaagctatctgagtgaactgctaatacagaaacttaatgtagacctgtttggggtctactattgttttagaatgaaggaattgtattattgtgtgtatatataatttgtaaataaaaagtatggagatgatacggtgttaaaaaaaatcatggtaaggctacaatactcaagtaac

SEQ ID NO: 164779 - DNA, 1014 bp, Artificial Sequence
  derived and/or modified sequence
atggccgcccccagagacaacgtgaccctgctgttcaagctgtactgcctggccgtgatgaccctgatggccgccgtgtacaccatcgccctgagatacaccagaaccagcgacaaggagctgtacttcagcaccaccgccgtgtgcatcaccgaggtgatcaagctgctgctgagcgtgggcatcctggccaaggagaccggcagcctgggcagattcaaggccagcctgagagagaacgtgctgggcagccccaaggagctgctgaagctgagcgtgcccagcctggtgtacgccgtgcagaacaacatggccttcctggccctgagcaacctggacgccgccgtgtaccaggtgacctaccagctgaagatcccctgcaccgccctgtgcaccgtgctgatgctgaacagaaccctgagcaagctgcagtgggtgagcgtgttcatgctgtgcgccggcgtgaccctggtgcagtggaagcccgcccaggccaccaaggtggtggtggagcagaaccccctgctgggcttcggcgccatcgccatcgccgtgctgtgcagcggcttcgccggcgtgtacttcgagaaggtgctgaagagcagcgacaccagcctgtgggtgagaaacatccagatgtacctgagcggcatcatcgtgaccctggccggcgtgtacctgagcgacggcgccgagatcaaggagaagggcttcttctacggctacacctactacgtgtggttcgtgatcttcctggccagcgtgggcggcctgtacaccagcgtggtggtgaagtacaccgacaacatcatgaagggcttcagcgccgccgccgccatcgtgctgagcaccatcgccagcgtgatgctgttcggcctgcagatcaccctgaccttcgccctgggcaccctgctggtgtgcgtgagcatctacctgtacggcctgcccagacaggacaccaccagcatccagcagggcgagaccgccagcaaggagagagtgatcggcgtgtag

SEQ ID NO: 164780 - DNA, 612 bp, Artificial Sequence
  derived and/or modified sequence
atgctgaacagaaccctgagcaagctgcagtgggtgagcgtgttcatgctgtgcgccggcgtgaccctggtgcagtggaagcccgcccaggccaccaaggtggtggtggagcagaaccccctgctgggcttcggcgccatcgccatcgccgtgctgtgcagcggcttcgccggcgtgtacttcgagaaggtgctgaagagcagcgacaccagcctgtgggtgagaaacatccagatgtacctgagcggcatcatcgtgaccctggccggcgtgtacctgagcgacggcgccgagatcaaggagaagggcttcttctacggctacacctactacgtgtggttcgtgatcttcctggccagcgtgggcggcctgtacaccagcgtggtggtgaagtacaccgacaacatcatgaagggcttcagcgccgccgccgccatcgtgctgagcaccatcgccagcgtgatgctgttcggcctgcagatcaccctgaccttcgccctgggcaccctgctggtgtgcgtgagcatctacctgtacggcctgcccagacaggacaccaccagcatccagcagggcgagaccgccagcaaggagagagtgatcggcgtgtag

SEQ ID NO: 164781 - protein, 510 aa, Artificial Sequence
  derived and/or modified sequence
MRPGLSFLLALLFFLGQAAGDLGDVGPPIPSPGFSSFPGVDSSSSFSSSSRSGSSSSRSLGSGGSVSQLFSNFTGSVDDRGTCQCSVSLPDTTFPVDRVERLEFTAHVLSQKFEKELSKVREYVQLISVYEKKLLNLTVRIDIMEKDTISYTELDFELIKVEVKEMEKLVIQLKESFGGSSEIVDQLEVEIRNMTLLVEKLETLDKNNVLAIRREIVALKTKLKECEASKDQNTPVVHPPPTPGSCGHGGVVNISKPSVVQLNWRGFSYLYGAWGRDYSPQHPNKGLYWVAPLNTDGRLLEYYRLYNTLDDLLLYINARELRITYGQGSGTAVYNNNMYVNMYNTGNIARVNLTTNTIAVTQTLPNAAYNNRFSYANVAWQDIDFAVDENGLWVIYSTEASTGNMVISKLNDTTLQVLNTWYTKQYKPSASNAFMVCGVLYATRTMNTRTEEIFYYYDTNTGKEGKLDIVMHKMQEKVQSINYNPFDQKLYVYNDGYLLNYDLSVLQKPQ

SEQ ID NO: 164782 - DNA, 1533 bp, Artificial Sequence
  derived and/or modified sequence
atgaggcctgggctgtcatttctgttagccctgctgtttttcctgggccaggccgcaggggacctcggtgacgtgggtcctccaattccgagtcctggttttagctcctttcctggcgttgactcttcaagctctttcagtagctctagcagatctggcagctcctcttctcgcagcttagggagcgggggtagcgtgtcacagctgtttagcaacttcaccggatccgtggacgatcgaggaacatgccaatgttcagtcagcttgcccgataccacatttccagtggatcgggttgagcggctcgaatttaccgcgcatgtgctttcccagaaattcgagaaggagctgtccaaggtgcgcgagtacgtccagctgattagcgtgtatgaaaaaaaactcctgaatctcactgtgagaatcgacatcatggaaaaagacactatttcttatactgaactggattttgagttaatcaaagtagaggtgaaggagatggagaagctcgtgattcagctcaaagaatcatttggcgggagcagtgagatcgttgaccagctggaggttgaaatccgaaatatgacgctgctggtggagaagctcgagactctcgacaagaacaacgtgctagccattagacgcgagatcgtggcgttaaaaacaaagctaaaagagtgcgaggcctctaaagatcaaaacactcctgtggttcacccgcctcccaccccagggtcctgcggccatggtggtgttgtgaacatttccaagccatccgtggtgcagctgaactggcgcggcttctcttatctgtatggcgcctggggcagggattattcccctcagcaccctaacaaggggctctattgggtggcgcctctgaatactgacggccggctccttgaatattatagactctataacaccctggatgatctcctgttatacatcaacgccagggaactccgcattacatacggacagggctctggcactgctgtgtacaacaacaacatgtacgtcaacatgtacaatacagggaatatcgccagggtgaacctgactaccaacacgatcgctgtgacccaaaccctccccaacgccgcctacaataatcgcttcagttacgctaacgtggcctggcaagatatcgacttcgcagtggatgagaacgggctgtgggtgatttattctaccgaagcttcaacaggcaacatggtaatctccaagctcaacgatacaactctccaggtgctgaatacatggtataccaagcagtacaaaccctctgcatcaaacgcctttatggtctgcggtgtgctgtatgcgacacgtacaatgaatacaaggaccgaggaaattttctattattacgacactaatacaggaaaggagggcaaactggatatcgtcatgcacaaaatgcaggagaaagttcagagtataaactataaccctttcgaccagaagctctacgtgtataacgatggatatctcctgaattatgatctgagcgtgctgcaaaagccgcagtag

SEQ ID NO: 164783 - DNA, 1533 bp, Artificial Sequence
  derived and/or modified sequence
atgaggcctggcctgtccttcctgctggccctgctcttcttcctgggccaggccgccggggacctgggagatgtgggcccccccatccccagccctggcttcagcagcttccctggggtggacagcagcagcagcttcagcagcagcagccgcagcggcagcagcagcagccgcagcctgggcagcggcggctctgtgtcccagctgttcagcaacttcaccggctctgtggatgaccggggcacctgccagtgcagcgtgtccctgcctgacaccaccttccctgtggacagagtggagcggctggagttcaccgcccacgtgctgagccagaagtttgagaaggagctgagcaaggtgcgggagtatgtgcagctgatctctgtgtatgagaagaagctgctgaacctgactgtgagaattgacatcatggagaaggacaccatctcctacacagagctggactttgagctgatcaaggtggaggtgaaggagatggagaagctggtgatccagctgaaggagagctttggaggcagcagcgagatcgtggaccagctggaggtggagatccggaacatgaccctgctggtggagaagctggagaccctggacaagaacaacgtgctggccatcagaagagagatcgtggccctgaagaccaagctgaaggaatgtgaggccagcaaggaccagaacacccctgtggtgcaccccccacccaccccaggcagctgtggccacggcggcgtggtgaacatcagcaagcccagcgtggtgcagctgaactggaggggcttctcctacctgtatggagcctggggccgggactacagcccccagcaccccaacaagggcctgtactgggtggcccccctgaacacagatggccgcctgctggagtactaccgcctgtacaacaccctggatgacctgctgctgtacatcaatgcccgggagctgcgcatcacctacggccagggcagcggcacagctgtgtacaacaacaacatgtatgtgaacatgtacaacacaggcaacatcgcccgggtgaacctgaccaccaacaccatcgctgtgacccagaccctgcccaatgctgcctacaacaaccgcttctcctatgccaacgtggcctggcaggacatcgactttgctgtggatgaaaatggcctgtgggtgatctacagcacagaggccagcacaggcaacatggtgatcagcaagctgaatgacaccaccctgcaggtgctgaacacctggtacaccaagcagtacaagcccagcgccagcaatgccttcatggtgtgtggggtgctgtatgccaccaggaccatgaacaccaggacagaggagatcttctactactatgacaccaacacaggcaaggagggcaagctggacatcgtgatgcacaagatgcaggagaaggtgcagagcatcaactacaacccctttgaccagaagctgtatgtgtacaatgatggctacctgctgaactatgacctgtctgtgctgcagaagccccagtag

SEQ ID NO: 164784 - DNA, 1533 bp, Artificial Sequence
  derived and/or modified sequence
atgcggcccggcctgagcttcctgctggccctgctgttcttcctgggtcaagcggcgggcgacctgggggatgtgggtccacctatcccatctccaggcttttcatctttcccaggcgtggacagttcctcttcattttcctcgtccagtcgatcagggagctcctctagcaggtcgctggggtctggcggtagcgtgtcacagctttttagcaatttcaccggctccgtagacgatagaggaacttgccagtgttctgtcagtctccccgatacaacttttcctgtcgacagggtagaacgccttgaatttaccgcacacgttctatcccagaagtttgagaaggagctgagtaaagtgcgggagtatgtacagcttatctctgtttatgaaaaaaagctgttaaatctgactgtacgaattgatatcatggagaaagatactattagctatactgaactagacttcgagctcatcaaggtggaggtgaaagaaatggagaagttggtcatacagctcaaagagtcattcggcgggagctctgagatcgtcgaccagctggaagtcgagattcggaatatgacccttttagtggaaaagctggaaacccttgacaagaacaacgtgctggctatccgaagagagattgtggcattgaagactaagctgaaggagtgcgaagcctctaaagaccagaatactcccgtcgtgcatcctccaccaacaccaggatcctgcggtcacggtggcgtggtcaatatcagcaaaccatccgttgttcaactgaactggagagggtttagttacctgtacggcgcttggggcagagactactcgccccagcacccaaataaaggcctgtactgggtggcacccttaaataccgatgggaggctgctggaatattacagactgtacaacacactcgatgatctgctgctctacatcaatgctagagaactccggattacttacggtcaaggcagcggaactgccgtttacaacaacaatatgtatgttaatatgtataacacaggcaacatcgcacgcgtcaatctgaccacaaatactattgccgtgactcaaacattacccaatgcagcgtacaataaccgcttttcctatgccaacgttgcctggcaggatatcgattttgccgtcgatgaaaacggcctgtgggtgatctatagtacggaagcttctacagggaatatggtcattagcaaacttaatgacacaaccctacaagtgctgaatacatggtatacgaagcagtacaagccttcggcttccaacgcctttatggtgtgtggcgttctctacgcaacccggacaatgaacaccagaactgaggaaattttctactactacgatactaacactgggaaggaaggaaaacttgacattgtgatgcataagatgcaggaaaaggtacaatcgatcaactacaacccatttgatcagaaactgtacgtttataatgacggttacctcctgaactatgacctaagcgtattgcagaaacctcaatag

SEQ ID NO: 164785 - DNA, 2897 bp, Artificial Sequence
  derived and/or modified sequence
atggggaaatcaccactgggcactataagaagcccctgggctctctgcagagccagcggctccagctaagaggacaagatgaggcccggcctctcatttctcctagcccttctgttcttccttggccaagctgcaggggatttgggggatgtgggacctccaattcccagccccggcttcagctctttcccaggtgttgactccagctccagcttcagctccagctccaggtcgggctccagctccagccgcagcttaggcagcggaggttctgtgtcccagttgttttccaatttcaccggctccgtggatgaccgtgggacctgccagtgctctgtttccctgccagacaccacctttcccgtggacagagtggaacgcttggaattcacagctcatgttctttctcagaagtttgagaaagaactttccaaagtgagggaatatgtccaattaattagtgtgtatgaaaagaaactgttaaacctaactgtccgaattgacatcatggagaaggataccatttcttacactgaactggacttcgagctgatcaaggtagaagtgaaggagatggaaaaactggtcatacagctgaaggagagttttggtggaagctcagaaattgttgaccagctggaggtggagataagaaatatgactctcttggtagagaagcttgagacactagacaaaaacaatgtccttgccattcgccgagaaatcgtggctctgaagaccaagctgaaagagtgtgaggcctctaaagatcaaaacacccctgtcgtccaccctcctcccactccagggagctgtggtcatggtggtgtggtgaacatcagcaaaccgtctgtggttcagctcaactggagagggttttcttatctatatggtgcttggggtagggattactctccccagcatccaaacaaaggactgtattgggtggcgccattgaatacagatgggagactgttggagtattatagactgtacaacacactggatgatttgctattgtatataaatgctcgagagttgcggatcacctatggccaaggtagtggtacagcagtttacaacaacaacatgtacgtcaacatgtacaacaccgggaatattgccagagttaacctgaccaccaacacgattgctgtgactcaaactctccctaatgctgcctataataaccgcttttcatatgctaatgttgcttggcaagatattgactttgctgtggatgagaatggattgtgggttatttattcaactgaagccagcactggtaacatggtgattagtaaactcaatgacaccacacttcaggtgctaaacacttggtataccaagcagtataaaccatctgcttctaacgccttcatggtatgtggggttctgtatgccacccgtactatgaacaccagaacagaagagattttttactattatgacacaaacacagggaaagagggcaaactagacattgtaatgcataagatgcaggaaaaagtgcagagcattaactataacccttttgaccagaaactttatgtctataacgatggttaccttctgaattatgatctttctgtcttgcagaagccccagtaagctgtttaggagttagggtgaaagagaaaatgtttgttgaaaaaatagtcttctccacttacttagatatctgcaggggtgtctaaaagtgtgttcattttgcagcaatgtttaggtgcatagttctaccacactagagatctaggacatttgtcttgatttggtgagttctcttgggaatcatctgcctcttcaggcgcattttgcaataaagtctgtctagggtgggattgtcagaggtctaggggcactgtgggcctagtgaagcctactgtgaggaggcttcactagaagccttaaattaggaattaaggaacttaaaactcagtatggcgtctagggattctttgtacaggaaatattgcccaatgactagtcctcatccatgtagcaccactaattcttccatgcctggaagaaacctggggacttagttaggtagattaatatctggagctcctcgagggaccaaatctccaacttttttttcccctcactagcacctggaatgatgctttgtatgtggcagataagtaaatttggcatgcttatatattctacatctgtaaagtgctgagttttatggagagaggcctttttatgcattaaattgtacatggcaaataaatcccagaaggatctgtagatgaggcacctgctttttcttttctctcattgtccaccttactaaaagtcagtagaatcttctacctcataacttccttccaaaggcagctcagaagattagaaccagacttactaaccaattccaccccccaccaacccccttctactgcctactttaaaaaaattaatagttttctatggaactgatctaagattagaaaaattaattttctttaatttcattatgaacttttatttacatgactctaagactataagaaaatctgatggcagtgacaaagtgctagcatttattgttatctaataaagaccttggagcatatgtgcaacttatgagtgtatcagttgttgcatgtaatttttgcctttgtttaagcctggaacttgtaagaaaatgaaaatttaatttttttttctaggacgagctatagaaaagctattgagagtatctagttaatcagtgcagtagttggaaaccttgctggtgtatgtgatgtgcttctgtgcttttgaatgactttatcatctagtctttgtctatttttcctttgatgttcaagtcctagtctataggattggcagtttaaatgctttactcccccttttaaaataaatgattaaaatgtgctttgaaaaaa

SEQ ID NO: 164786 - DNA, 1533 bp, Artificial Sequence
  derived and/or modified sequence
atgcgacccggtctaagctttctcctggcactgctgttcttcctggggcaggcagctggcgatctcggtgatgtcgggccacctataccatcgcccggattctcttcattccctggcgtggattcatcaagttccttttctagcagcagccgatccggttccagcagttcacggtctctgggatctggcggtagcgtgtcacagctcttttcaaacttcacagggagcgtggacgatcgtggcacgtgtcagtgctcagtctctttgccggatacgacctttcctgtggatagggttgaaagattggagttcacggcccatgtgctctctcaaaaattcgaaaaagaactctctaaggtgagagagtacgtacagctgatctcagtgtatgagaagaagctgctgaatctcaccgtccggattgatattatggagaaggacacaatatcttatactgaactggatttcgagctgatcaaggtggaagtaaaggaaatggagaaactcgtcatccagttgaaagaaagtttcggagggagcagtgaaattgtcgatcaacttgaagtagaaatacggaatatgactctgctggtcgagaagctcgagaccttggacaaaaataatgtcttagccatccggagagagattgtagcactgaaaacaaagttaaaagagtgcgaagcatcaaaagatcaaaacacgccagtagtccacccaccccctacccccggttcctgcggtcacggtggggttgtcaatatcagcaaacctagcgttgttcagcttaattggcgcggattttcttacctgtacggcgcttgggggagggattactccccacagcatccgaataaaggactgtattgggtggccccactgaacaccgacggacgccttctcgaatactatcgtttatataatacactggacgatctcctgctgtacattaatgccagagagttgcggatcacatatggccaggggtccgggaccgcggtgtacaacaacaacatgtacgtgaacatgtataacacgggtaacattgcacgggttaacttgaccaccaatacaatcgccgtgacccagacactgcctaatgctgcgtataataaccggttttcctacgctaatgtggcttggcaggacattgactttgctgtggacgagaacggactgtgggtcatatattccactgaggcttctacgggaaacatggtaatatccaaactgaatgatacgaccttacaggtgctcaacacctggtacacgaaacagtacaagcctagcgcgtcaaacgcatttatggtgtgcggagtcctgtacgcaacccgcactatgaacaccagaactgaagagatcttttattattacgataccaatactggtaaagagggcaagctggatatagtgatgcacaagatgcaagagaaggtgcagagcataaattacaacccgtttgaccagaaattgtatgtctataatgacggttatctactcaactacgacctctccgtgctgcagaagccgcagtag

SEQ ID NO: 164787 - DNA, 1533 bp, Artificial Sequence
  derived and/or modified sequence
atgagacccggcctgagcttcctgctggccctgctgttcttcctgggccaggccgccggcgacctgggcgacgtgggcccccccatccccagccccggcttcagcagcttccccggcgtggacagcagcagcagcttcagcagcagcagcagaagcggcagcagcagcagcagaagcctgggcagcggcggcagcgtgagccagctgttcagcaacttcaccggcagcgtggacgacagaggcacctgccagtgcagcgtgagcctgcccgacaccaccttccccgtggacagagtggagagactggagttcaccgcccacgtgctgagccagaagttcgagaaggagctgagcaaggtgagagagtacgtgcagctgatcagcgtgtacgagaagaagctgctgaacctgaccgtgagaatcgacatcatggagaaggacaccatcagctacaccgagctggacttcgagctgatcaaggtggaggtgaaggagatggagaagctggtgatccagctgaaggagagcttcggcggcagcagcgagatcgtggaccagctggaggtggagatcagaaacatgaccctgctggtggagaagctggagaccctggacaagaacaacgtgctggccatcagaagagagatcgtggccctgaagaccaagctgaaggagtgcgaggccagcaaggaccagaacacccccgtggtgcaccccccccccacccccggcagctgcggccacggcggcgtggtgaacatcagcaagcccagcgtggtgcagctgaactggagaggcttcagctacctgtacggcgcctggggcagagactacagcccccagcaccccaacaagggcctgtactgggtggcccccctgaacaccgacggcagactgctggagtactacagactgtacaacaccctggacgacctgctgctgtacatcaacgccagagagctgagaatcacctacggccagggcagcggcaccgccgtgtacaacaacaacatgtacgtgaacatgtacaacaccggcaacatcgccagagtgaacctgaccaccaacaccatcgccgtgacccagaccctgcccaacgccgcctacaacaacagattcagctacgccaacgtggcctggcaggacatcgacttcgccgtggacgagaacggcctgtgggtgatctacagcaccgaggccagcaccggcaacatggtgatcagcaagctgaacgacaccaccctgcaggtgctgaacacctggtacaccaagcagtacaagcccagcgccagcaacgccttcatggtgtgcggcgtgctgtacgccaccagaaccatgaacaccagaaccgaggagatcttctactactacgacaccaacaccggcaaggagggcaagctggacatcgtgatgcacaagatgcaggagaaggtgcagagcatcaactacaaccccttcgaccagaagctgtacgtgtacaacgacggctacctgctgaactacgacctgagcgtgctgcagaagccccagtag

SEQ ID NO: 164788 - protein, 109 aa, Artificial Sequence
  derived and/or modified sequence
MKFISTSLLLMLLVSSLSPVQGVLEVYYTSLRCRCVQESSVFIPRRFIDRIQILPRGNGCPRKEIIVWKKNKSIVCVDPQAEWIQRMMEVLRKRSSSTLPVPVFKRKIP

SEQ ID NO: 164789 - DNA, 330 bp, Artificial Sequence
  derived and/or modified sequence
atgaagttcatcagcaccagcctgctgctgatgctgctggtgagcagcctgagccccgtgcagggcgtgctggaggtgtactacaccagcctgagatgcagatgcgtgcaggagagcagcgtgttcatccccagaagattcatcgacagaatccagatcctgcccagaggcaacggctgccccagaaaggagatcatcgtgtggaagaagaacaagagcatcgtgtgcgtggacccccaggccgagtggatccagagaatgatggaggtgctgagaaagagaagcagcagcaccctgcccgtgcccgtgttcaagagaaagatcccctag

SEQ ID NO: 164790 - DNA, 1203 bp, Artificial Sequence
  derived and/or modified sequence
gagaagatgtttgaaaaaactgactctgctaatgagcctggactcagagctcaagtctgaactctacctccagacagaatgaagttcatctcgacatctctgcttctcatgctgctggtcagcagcctctctccagtccaaggtgttctggaggtctattacacaagcttgaggtgtagatgtgtccaagagagctcagtctttatccctagacgcttcattgatcgaattcaaatcttgccccgtgggaatggttgtccaagaaaagaaatcatagtctggaagaagaacaagtcaattgtgtgtgtggaccctcaagctgaatggatacaaagaatgatggaagtattgagaaaaagaagttcttcaactctaccagttccagtgtttaagagaaagattccctgatgctgatatttccactaagaacacctgcattcttcccttatccctgctctggattttagttttgtgcttagttaaatcttttccaggaaaaagaacttccccatacaaataagcatgagactatgtaaaaataaccttgcagaagctgatggggcaaactcaagcttcttcactcacagcaccctatatacacttggagtttgcattcttattcatcagggaggaaagtttctttgaaaatagttattcagttataagtaatacaggattattttgattatatacttgttgtttaatgtttaaaatttcttagaaaacaatggaatgagaatttaagcctcaaatttgaacatgtggcttgaattaagaagaaaattatggcatatattaaaagcaggcttctatgaaagactcaaaaagctgcctgggaggcagatggaacttgagcctgtcaagaggcaaaggaatccatgtagtagatatcctctgcttaaaaactcactacggaggagaattaagtcctacttttaaagaatttctttataaaatttactgtctaagattaatagcattcgaagatccccagacttcatagaatactcagggaaagcatttaaagggtgatgtacacatgtatcctttcacacatttgccttgacaaacttctttcactcacatctttttcactgactttttttgtggggggcggggccggggggactctggtatctaattctttaatgattcctataaatctaatgacattcaataaagttgagcaaacattttacttaa

SEQ ID NO: 164791 - DNA, 330 bp, Artificial Sequence
  derived and/or modified sequence
atgaagttcatcagtacatcgctgttactcatgctcttggtttcctccctcagccccgtgcagggtgtattggaggtgtattacacctctctgcggtgtcgctgcgtgcaggaatcgagtgtgtttatcccacggagattcatagataggatccagatactgcccaggggaaatggctgcccgagaaaagagatcattgtgtggaaaaagaataagagtatagtgtgcgtggatcctcaagccgagtggatccagcgtatgatggaggttctgcgcaagcggtcaagctcaaccctgccggtgcctgtgttcaagcgcaagatcccgtag

SEQ ID NO: 164792 - DNA, 330 bp, Artificial Sequence
  derived and/or modified sequence
atgaagttcatcagcaccagcctgctgctgatgctgctggtgagcagcctgagccctgtgcagggcgtgctggaggtgtactacaccagcctgcgctgccgctgtgtgcaggagagcagcgtcttcatcccccggcgcttcatcgaccgcatccagatcctgcccagaggaaatggctgccccaggaaggagatcatcgtgtggaagaagaacaagagcatcgtgtgtgtggacccccaggccgagtggatccagaggatgatggaggtgctgaggaagaggagcagcagcaccctgcctgtgcctgtgttcaagaggaagatcccctag

SEQ ID NO: 164793 - DNA, 330 bp, Artificial Sequence
  derived and/or modified sequence
atgaagttcatcagcaccagcctgctgctgatgctgctggtgagctcactgtcccccgtccagggggtgctggaagtttactacacttcgctgcggtgtaggtgcgttcaggagtcctcggtgtttattcctcggagattcatcgatcgaatccaaatactgccacgaggtaatggctgcccccggaaggaaataattgtctggaagaagaacaaatctattgtgtgcgtggatcctcaagcagagtggatacagcgcatgatggaggttctgcggaagcggtcttccagtacgctaccagtgcccgttttcaaaagaaagatcccctag

SEQ ID NO: 164794 - DNA, 330 bp, Artificial Sequence
  derived and/or modified sequence
atgaaattcatcagtaccagtctcctgttgatgctgctcgtgagctccttgagccccgttcagggggtcttggaagtttactatacctccctgcgatgccgttgtgttcaggagagtagcgttttcattccaagacggttcatcgaccgcatccaaattctcccccgaggtaatggatgccctcgaaaagagatcattgtctggaaaaagaataaatcgattgtatgcgtcgatccgcaggcagagtggatccagcgcatgatggaggtgttacggaaacgatcgagctcgaccctgccggtgcctgtgtttaaaagaaagataccttag

SEQ ID NO: 164795 - protein, 1785 aa, Artificial Sequence
  derived and/or modified sequence
MQESQTKSMFVSRALEKILADKEVKRPQHSQLRRACQVALDEIKAEIEKQRLGTAAPPKANFIEADKYFLPFELACQSKSPRVVSTSLDCLQKLIAYGHITGNAPDSGAPGKRLIDRIVETICSCFQGPQTDEGVQLQIIKALLTAVTSPHIEIHEGTILQTVRTCYNIYLASKNLINQTTAKATLTQMLNVIFTRMENQVLQEARELEKPIQSKPQSPVIQAAAVSPKFVRLKHSQAQSKPTTPEKTDLTNGEHARSDSGKVSTENGDAPRERGSSLSGTDDGAQEVVKDILEDVVTSAIKEAAEKHGLTEPERVLGELECQECAIPPGVDENSQTNGIADDRQSLSSADNLESDAQGHQVAARFSHVLQKDAFLVFRSLCKLSMKPLGEGPPDPKSHELRSKVVSLQLLLSVLQNAGPVFRTHEMFINAIKQYLCVALSKNGVSSVPDVFELSLAIFLTLLSNFKMHLKMQIEVFFKEIFLNILETSTSSFEHRWMVIQTLTRICADAQCVVDIYVNYDCDLNAANIFERLVNDLSKIAQGRSGHELGMTPLQELSLRKKGLECLVSILKCMVEWSKDLYVNPNHQTSLGQERLTDQEIGDGKGLDMARRCSVTSMESTVSSGTQTTVQDDPEQFEVIKQQKEIIEHGIELFNKKPKRGIQFLQEQGMLGTSVEDIAQFLHQEERLDSTQVGDFLGDSARFNKEVMYAYVDQLDFCEKEFVSALRTFLEGFRLPGEAQKIDRLMEKFAARYIECNQGQTLFASADTAYVLAYSIIMLTTDLHSPQVKNKMTKEQYIKMNRGINDSKDLPEEYLSSIYEEIEGKKIAMKETKELTIATKSTKQNVASEKQRRLLYNLEMEQMAKTAKALMEAVSHAKAPFTSATHLDHVRPMFKLVWTPLLAAYSIGLQNCDDTEVASLCLEGIRCAIRIACIFGMQLERDAYVQALARFSLLTASSSITEMKQKNIDTIKTLITVAHTDGNYLGNSWHEILKCISQLELAQLIGTGVKTRYLSGSGREREGSLKGHTLAGEEFMGLGLGNLVSGGVDKRQMASFQESVGETSSQSVVVAVDRIFTGSTRLDGNAIVDFVRWLCAVSMDELASPHHPRMFSLQKIVEISYYNMNRIRLQWSRIWHVIGDHFNKVGCNPNEDVAIFAVDSLRQLSMKFLEKGELANFRFQKDFLRPFEHIMKKNRSPTIRDMAIRCIAQMVNSQAANIRSGWKNIFAVFHQAASDHDGNIVELAFQTTCHIVTTIFQHHFPAAIDSFQDAVKCLSEFACNAAFPDTSMEAIRLIRFCGKYVSERPRVLQEYTSDDMNVAPGDRVWVRGWFPILFELSCIINRCKLDVRTRGLTVMFEIMKSYGHTFEKHWWQDLFRIVFRIFDNMKLPEQLSEKSEWMTTTCNHALYAICDVFTQFYEALNEVLLSDVFAQLQWCVKQDNEQLARSGTNCLENLVISNGEKFSPEVWDETCNCMLDIFKTTIPHVLLTWRPVGMEEDSSEKHLDVDLDRQSLSSIDKNPSERGQSQLSNPTDDSWKGRPYANQKLFASLLIKCVVQLELIQTIDNIVFYPATSKKEDAEHMVAAQQDTLDADIHIETEDQGMYKYMSSQHLFKLLDCLQESHSFSKAFNSNYEQRTVLWRAGFKGKSKPNLLKQETSSLACCLRILFRMYVDENRRDSWEEIQQRLLTVCSEALAYFITVNSESHREAWTSLLLLLLTKTLKINDEKFKAHASMYYPYLCEIMQFDLIPELRAVLRKFFLRIGVVYKIWIPEEPSQVPAALSPVW

SEQ ID NO: 164796 - protein, 832 aa, Artificial Sequence
  derived and/or modified sequence
MQESQTKSMFVSRALEKILADKEVKRPQHSQLRRACQVALDEIKAEIEKQRLGTAAPPKANFIEADKYFLPFELACQSKSPRVVSTSLDCLQKLIAYGHITGNAPDSGAPGKRLIDRIVETICSCFQGPQTDEGVQLQIIKALLTAVTSPHIEIHEGTILQTVRTCYNIYLASKNLINQTTAKATLTQMLNVIFTRMENQVLQEARELEKPIQSKPQSPVIQAAAVSPKFVRLKHSQAQSKPTTPEKTDLTNGEHARSDSGKVSTENGDAPRERGSSLSGTDDGAQEVVKDILEDVVTSAIKEAAEKHGLTEPERVLGELECQECAIPPGVDENSQTNGIADDRQSLSSADNLESDAQGHQVAARFSHVLQKDAFLVFRSLCKLSMKPLGEGPPDPKSHELRSKVVSLQLLLSVLQNAGPVFRTHEMFINAIKQYLCVALSKNGVSSVPDVFELSLAIFLTLLSNFKMHLKMQIEVFFKEIFLNILETSTSSFEHRWMVIQTLTRICADAQCVVDIYVNYDCDLNAANIFERLVNDLSKIAQGRSGHELGMTPLQELSLRKKGLECLVSILKCMVEWSKDLYVNPNHQTSLGQERLTDQEIGDGKGLDMARRCSVTSMESTVSSGTQTTVQDDPEQFEVIKQQKEIIEHGIELFNKKPKRGIQFLQEQGMLGTSVEDIAQFLHQEERLDSTQVGDFLGDSARFNKEVMYAYVDQLDFCEKEFVSALRTFLEGFRLPGEAQKIDRLMEKFAARYIECNQGQTLFASADTAYVLAYSIIMLTTDLHSPQVKNKMTKEQYIKMNRGINDSKDLPEEYLSSIYEEIEGKKIAIKKN

SEQ ID NO: 164797 - DNA, 5358 bp, Artificial Sequence
  derived and/or modified sequence
atgcaggaaagccagacaaaaagcatgttcgtgtccagggccctcgagaagatccttgctgataaggaagtgaagcgtcctcagcactctcagctcagaagagcatgccaagttgcccttgacgagataaaggcagaaatcgagaagcagcggctaggcacagccgctccaccgaaagcgaattttattgaggctgacaagtacttcctgcctttcgagctagcctgccagtcgaagtctccgcgcgtcgtgagtaccagcttagactgcttgcaaaaattaatcgcatatggtcacattaccggcaatgcccctgactcaggcgcacccggcaaaagactcatcgatagaattgtggaaactatttgtagttgctttcaaggcccacagactgacgagggcgtgcagctgcagatcataaaggccctgcttacagccgttacctctccccacatcgagatccatgaaggtacaattttacagaccgtgcggacatgttataacatttatctggcttctaagaatttgattaatcagactaccgctaaagccacactgacccagatgctcaatgtgatcttcacccggatggaaaaccaggtgcttcaagaagccagagaattagaaaaacccatccagtccaaacctcaatcacccgtcatccaggccgccgccgtatcccccaagtttgtgcggctcaaacattcgcaagcccaaagcaagcctaccacacctgagaagaccgatctaaccaacggagaacatgcaaggtcagattccgggaaggtctccacagagaatggcgatgctccacgcgagcgcggctcaagcctgagtggcactgatgatggcgcgcaggaggtcgtcaaggacattctggaggatgtggtgacctctgctatcaaggaagctgccgaaaaacatggactgaccgaacccgaaagagttcttggagaattggagtgtcaggagtgcgcgatccccccaggagtggacgaaaattcccaaacaaacgggatcgccgatgatcgacagagcttaagttctgctgacaacctagaatccgatgcgcagggacaccaggtcgccgcaaggttttctcatgttctccagaaagacgcatttctcgttttccggagcctttgcaagctgagcatgaaaccattaggggagggtcctccagatccaaagtcacatgaattgaggtctaaagttgtctcacttcagttgctgctctcagtcctgcagaacgccggccccgtttttaggactcacgagatgtttatcaacgctattaagcagtatctttgtgtcgccctgagcaaaaatggagtgtctagtgtgcccgatgtgtttgagctcagcttggccatctttttaaccttactcagtaacttcaagatgcacctgaagatgcagattgaagtcttttttaaagaaatttttctgaacatccttgaaacttccaccagctccttcgagcaccggtggatggtgatccagacgttaacaaggatatgcgcagacgcgcaatgcgtggttgacatctacgtgaactacgattgtgacttgaacgctgccaacattttcgagagactggtgaacgacttgagcaagatcgcccagggtaggtcagggcatgaactcggcatgacaccgctgcaagaactatctcttcgaaagaagggcctggagtgtttggtttccatccttaaatgtatggtcgaatggtctaaagatctgtacgttaaccctaatcaccagacttccttgggacaggaacgccttacggaccaagagattggggacggaaaagggctcgacatggctcggcgatgcagcgtaacgtcgatggagagcactgtgtcctcaggcactcaaacgaccgtgcaggatgatcccgagcagttcgaggtgataaagcaacagaaagagatcattgaacacggtattgagctgttcaataagaaacctaaacgtgggatccagtttctacaggagcagggcatgctggggacgtcagtcgaagacatagcacagttcctgcatcaggaagaaaggctagatagcacacaggttggcgatttcctaggggacagcgcgcgctttaataaggaggtgatgtatgcttatgtggaccaattggacttctgcgagaaagaattcgtcagtgccctgcgcaccttcttagagggatttcgtctgcccggagaagcccagaagatagacagactgatggaaaagttcgctgcccggtacatcgaatgtaaccagggacaaactctgtttgctagtgctgataccgcttatgtactcgcgtacagcatcatcatgttaaccactgacctgcatagccctcaagtgaagaataaaatgactaaagaacagtacataaagatgaaccgagggatcaatgactccaaagacctgcccgaagagtacctctcttctatttacgaagagatcgaaggcaagaagatcgccatgaaggagacaaaggagcttaccatcgcaaccaagtcaaccaaacagaatgttgcgtccgagaagcagagaaggcttttgtacaatcttgagatggaacagatggctaagacagcaaaggccttgatggaagcagtgagtcatgcaaaagccccatttacaagtgccacgcatctggaccatgtccgcccaatgtttaagctagtttggactccccttctagcggcctattccattgggttgcagaactgcgatgacaccgaagtggcctctctatgtcttgaggggatacgatgtgctatccgcatcgcttgcatttttggtatgcaactcgagagagatgcctatgtgcaggcgttggcacgcttcagcctcctaacggcctcttcaagtattaccgaaatgaagcagaagaatatcgataccatcaagacactgatcaccgtagctcacaccgacggtaattacctgggaaatagctggcacgaaattttaaagtgcatatcacagttggaacttgctcagctcattggtacgggagttaagactagatacctttctggaagcgggagagaacgggaaggcagtttgaagggtcatactctagctggtgaggaatttatgggtctcgggttggggaacctagtaagtggaggagtggacaagcgacagatggccagcttccaggagtcagtgggcgagacctcaagtcagtcagtggtggtggctgtcgatagaattttcactggatcaacaagattggacggaaatgccatcgtggatttcgttagatggctgtgcgccgtgtctatggatgaattggcatccccccatcatccccggatgttcagcctgcaaaagattgtagaaatctcatattataacatgaacagaatccgccttcagtggtcccgaatttggcacgtcataggggaccactttaataaagtagggtgtaatcctaatgaagatgtcgcaattttcgctgtcgattcattgcgacagcttagtatgaagtttctcgaaaagggagagctggcgaactttagattccaaaaagattttctccggcccttcgagcacatcatgaagaagaaccgctctcccactatccgagatatggccatcagatgtatcgctcagatggttaacagtcaagccgccaatattcgcagtggttggaaaaacattttcgcagtatttcatcaggcagcctctgaccacgacgggaatatcgtagagcttgcatttcagacgacctgtcatatcgtgacgacgatttttcaacatcactttccggcagctattgactcattccaggacgcagtcaagtgtttatctgagtttgcctgtaacgcagcgttccctgacacctccatggaagctatacgccttatccgcttctgtgggaagtatgtgagtgaacggccgcgtgttttacaggagtacacttccgacgacatgaatgtagcacccggggatcgagtatgggtacgtgggtggttccccatcctgtttgagttgagttgtatcatcaatcgatgcaagctggatgtccgcacccgcggactgactgtaatgtttgagatcatgaagagctacggacacactttcgagaaacactggtggcaagatctgtttcgaattgttttcaggatctttgacaacatgaagttgccggaacagctgtcagagaaaagcgaatggatgaccaccacctgcaaccacgctctgtacgccatctgtgatgtattcactcaattctatgaggcactgaacgaggttctgctatcagacgtatttgcgcaactgcagtggtgtgtgaagcaggacaatgaacaactggcacgttccggcacgaattgtctcgaaaacctggtgatttccaatggcgagaagttctcccctgaggtgtgggacgagacatgcaactgtatgctggacatctttaaaacaaccatcccgcatgtcctgctcacatggcggccagttggtatggaggaggactcttctgagaagcacttggatgtggatcttgatcgccagtccctgtcttcaatcgacaagaacccgagcgagcgcggtcagagtcaactgagtaatccgacagatgactcctggaagggccgcccatatgccaaccagaagctgtttgccagcctactgattaaatgcgtagtgcaattagagctgattcagacgatcgacaacattgtcttttatcctgcaactagcaaaaaagaagacgccgagcacatggtagccgcccagcaagatacattagacgccgatatccatattgaaaccgaggatcagggaatgtacaagtacatgtcctctcagcatctgttcaagctgcttgactgcttgcaggaatcccactctttttcgaaagcctttaactctaactatgagcaacgaaccgtgctttggagggcagggtttaaggggaagagcaagccaaaccttcttaaacaagagacctctagtctcgcatgttgtttgcgcattctgttccgcatgtacgtcgatgaaaataggcgcgattcatgggaagagatacagcagcgtctcctgaccgtgtgctcagaagccctggcttacttcattacagtgaactcagagagtcaccgagaggcctggacctcactgttactcctgctgctgactaagacactgaaaattaacgacgagaagttcaaggcccacgcctcaatgtattatccctatttgtgcgaaatcatgcagttcgatctaatcccagagcttagagccgtccttagaaagtttttcctgcgtatcggagttgtgtacaagatctggattcccgaagaacctagtcaggtgcctgctgctctctcacccgtgtggtag

SEQ ID NO: 164798 - DNA, 2499 bp, Artificial Sequence
  derived and/or modified sequence
atgcaggaaagccagacgaaaagcatgttcgtctctagggcactggagaaaatcctagccgacaaggaagtgaagcggccacagcactcccaactgaggcgggcctgccaggttgccctcgatgaaatcaaggccgaaatagagaagcagcgtttagggaccgccgcccctcctaaggccaactttatcgaggcggacaaatacttcctgccatttgagctggcctgccagagcaaatcgccgcgggtcgtatccacaagcttggactgtttgcagaagcttatagcttatggccacatcaccggaaatgcccctgatagcggcgcccccggcaagaggctgattgatagaattgtggaaacaatttgctcttgcttccagggtccgcagaccgatgagggtgtccagctgcagatcattaaagccctgctgaccgctgtgaccagcccccacatcgagattcacgaagggaccattctccagacagtgcgaacatgttataacatctacctggcatctaagaatctgatcaaccagaccacagccaaagcaactctgacccaaatgctgaacgtcatattcactaggatggaaaatcaagtgttgcaggaagctcgggagctcgagaagcctattcagagtaagccccagagtcctgtcatccaggcggccgcagtaagtccaaagttcgtgaggctgaaacactcgcaagcacaatctaaacctacgacgcctgaaaagacggatttgaccaacggtgagcatgcccggtccgactccggaaaagtaagcactgagaacggagatgcgccacgggagcgggggagctcactgtctggaaccgatgatggtgcccaggaggtggtaaaggatattctggaagatgttgtgacgagtgcaatcaaagaggccgcagaaaagcacggactaactgagcctgaacgagtcctgggcgagctggagtgccaggagtgcgcaatccccccaggggtagacgagaacagccagaccaacggcattgcggacgataggcagtcactgtcatctgcagataatttagaatctgacgctcaaggccatcaggttgcggctaggttctcgcacgttctgcagaaagacgcttttttggtgtttcgatctctgtgcaaactgagtatgaagcctttgggagagggacctccagatcctaagtcacacgaactccggagcaaggtcgtgtccctgcagttgctgttatccgtcctccaaaatgcgggacccgtcttccgtactcacgaaatgttcatcaacgcgattaagcagtatctgtgcgtggcgctatcaaaaaacggggtctcaagcgtgcccgacgtgtttgaactgtccttggccatatttctgacactgttgagcaactttaagatgcatcttaagatgcagatcgaagttttttttaaggagatctttcttaatatcttggaaacctctacaagttcctttgagcaccgttggatggtgatccaaacactcactcgcatatgtgcggatgcacagtgcgtggtggatatttacgtaaactacgactgcgacctcaatgctgcgaacatttttgagcgactcgtcaacgacctatccaaaatagcccaaggacgctctggacacgagctgggcatgacccctctgcaggaactctctctcagaaaaaagggcttagagtgccttgtgagtatattgaagtgcatggtggaatggtctaaggacctgtatgtgaaccctaaccaccaaactagcctggggcaggaacgccttaccgatcaggaaattggggacggcaagggtctagacatggccagacgatgctccgttacatctatggaaagtactgttagctccggtacgcagacaacggtccaagacgacccagaacaattcgaggtgatcaagcagcagaaggaaatcatcgagcatggaattgaactgttcaataagaagcccaagaggggcatccagtttttgcaagaacagggaatgctggggacctccgtcgaggacattgcccagtttctacatcaagaagaacgcctggattccacccaggtgggtgacttcttgggagattcagctcgttttaataaagaggtaatgtacgcatacgtggaccagctggacttctgcgagaaggaattcgtttccgccctccgaacctttcttgaaggattccgcctgcccggcgaagcccagaagattgacagactgatggaaaaatttgcggcaaggtatatcgagtgtaaccagggtcagactctcttcgctagcgcggataccgcatatgtgttagcctactccatcatcatgctaactactgaccttcactccccccaggtaaagaataaaatgacaaaagaacagtacattaaaatgaacaggggaataaacgattcgaaggatctgcccgaggagtatttatcatcaatctatgaggaaatcgagggtaaaaagattgccattaaaaagaattag

SEQ ID NO: 164799 - DNA, 8852 bp, Artificial Sequence
  derived and/or modified sequence
atgcaggagagccagaccaagagcatgttcgtgtcccgggccctggagaagatcctagccgacaaggaggtgaagcggccccagcactcccagctgcgcagggcctgccaggtggcgctcgatgaaattaaagcagaaatagaaaagcagaggcttggcactgctgcaccaccaaaggcaaacttcattgaagctgacaagtattttcttccattcgagctagcttgccagtccaagtccccaagggtagtcagcacatcccttgactgcttgcagaaactcatcgcatacgggcacatcactggcaacgcccctgacagtggagcccctgggaagcggctgatcgacagaattgttgaaaccatttgcagttgttttcagggccctcagactgatgaaggggttcagttacaaataattaaggctcttctgactgcagtgacttccccacacattgaaattcatgagggtactatcctgcagacagtgagaacatgttacaatatctatttggccagcaaaaatctcatcaatcaaaccactgccaaggctacccttactcagatgctgaacgtcattttcacccgcatggaaaaccaagtgttgcaggaggccagagaactggaaaaaccaatccagtcaaaaccccagtcccctgtgatccaagctgcagcagtatccccaaagttcgttcgtttgaagcacagtcaggcacaaagcaaaccaacaactcccgaaaaaacagatttaaccaacggtgaacatgccaggagtgattctggaaaagtaagcacagaaaatggagacgcacccagagaaagaggctcatcactgtcagggactgatgacggagcccaggaggtggtgaaggacatcttggaagatgtagtcacatctgccattaaagaagcagcggaaaagcatggtctgacagaacctgagagagttctaggtgaactggagtgccaggaatgtgctattcccccaggagttgatgaaaactcacagaccaacgggatagccgatgacaggcagtccttgtcgtcagcagataatctggaatcggatgcacaaggacatcaagtggctgccaggttctcccacgttctgcagaaggatgccttccttgtgttccgctccctgtgcaagctgtccatgaaaccccttggtgaaggccctccagacccaaaatcccatgagctgcgttccaaggtggtttccctgcagctgctcctctctgtgttgcaaaatgctggccccgtattcaggactcacgagatgttcatcaatgcaatcaagcaatatctctgtgtggccttgtccaaaaacggcgtctcttcagtgcctgatgtctttgagctctctcttgccatttttcttactcttctttcaaactttaaaatgcacttgaaaatgcagatagaggtctttttcaaagagattttcctgaacattttagaaacatcaacaagttcttttgagcacaggtggatggtcattcagactctgacgaggatctgtgcagatgcccagtgtgttgtggatatttatgtcaactacgactgtgatttaaatgctgctaacatttttgagcgccttgtaaatgatttatccaaaattgctcagggaagaagtggacatgagctgggaatgacacctctgcaggagctcagcctgaggaagaaaggcctggagtgcctcgtgtccattctcaagtgcatggtggagtggagcaaagacctgtatgtgaatcccaaccaccagaccagcctcggtcaggagaggctcacggatcaggaaataggggatgggaaaggccttgacatggcaagacggtgtagtgtgacgtccatggagtccacagtgtcctcggggacccagacaactgttcaggatgaccctgagcaatttgaggtcatcaagcaacaaaaagaaatcattgaacacggcatcgagctgttcaacaagaaacccaagagggggatccagtttctccaggagcagggcatgctgggaacgtcagttgaagacatagcccaattcctgcaccaggaggagcgcctggattccacccaagtaggcgattttctgggagatagcgcaaggttcaacaaggaggtgatgtatgcctacgtggaccaacttgacttctgtgaaaaagaatttgtctcagccctgcggacattcctagaaggtttccgcctacctggagaagcccaaaagattgaccgattaatggagaagtttgccgcaagatacatagaatgcaaccaagggcaaactctgtttgctagtgctgacactgcttatgtcctagcgtattcaattattatgctgactacagacttgcacagtcctcaggtaaaaaataaaatgacgaaagagcagtatattaaaatgaatcggggtatcaatgatagtaaagatctgccagaagagtatctctcaagcatctatgaagagatagaaggcaagaaaattgcaatgaaagaaacaaaagagctaacgattgcaaccaaatctactaagcagaatgtagctagtgaaaagcagcggcggctgctgtacaacttagagatggagcaaatggctaaaacagccaaagctctgatggaggctgtgagccatgccaaagccccgtttaccagtgccactcacctggaccatgtccggccaatgttcaaactggtgtggacgccactattggcagcctacagcatcggactccagaactgtgatgacactgaagtggcctccttgtgtttggaaggcatccgatgtgcaatccgaatcgcctgcatctttggaatgcagctggaacgagatgcctatgttcaggctcttgctcgcttctccctactcacagccagctccagcatcacagaaatgaagcagaaaaacatcgacaccattaagacgcttatcacagtggctcacaccgatggcaactaccttgggaattcctggcatgagatcttgaaatgcatcagccagctggagctcgctcagctgataggaaccggtgtgaagacgcgctacctgtctggatctgggcgtgaaagagaagggagcctgaagggccacacattggcaggagaagagttcatgggccttggcctcggtaatttggtgagtggcggagtggataaaagacagatggccagcttccaagaatcggttggtgagaccagctcgcagagtgtggttgtagctgtggacaggatttttactgggtctaccagactggatggaaatgcaatagttgactttgtccgctggctgtgtgctgtgtccatggatgaactggcttccccccaccatcctcgcatgttcagcttgcagaagattgtggagatatcatactacaacatgaatcggatccgactacagtggtctcgaatatggcatgtgattggagatcacttcaataaggttggctgcaaccctaatgaagatgtggctatctttgctgttgactcattaaggcaactctccatgaagtttcttgagaagggtgaattagccaacttccgtttccagaaagattttctgaggccctttgagcatattatgaagaaaaacaggtctcccaccatccgggacatggcgatccgctgcattgcccagatggtgaactcccaggcggccaacatccgctcaggttggaagaacatctttgccgtgttccaccaggcagcctctgatcatgatgggaacattgtggagctggccttccagaccacttgccacattgtcacaactattttccagcaccattttcctgcagccatcgattcctttcaggatgctgtgaagtgcttatcagagttcgcctgcaacgccgctttccctgacacgagcatggaagcgattcggctcatccgcttctgtggcaaatacgtctctgagaggcctcgggtgctacaagaatacacaagtgatgacatgaatgtagctcctggtgacagagtctgggtccgaggctggttccccatcttattcgaactctcctgcatcattaatagatgcaagttagatgtacgaacaaggggactcacagtcatgtttgagatcatgaagagctatggccacacctttgaaaagcactggtggcaggacctgttcagaatcgtgtttcggatttttgacaatatgaaactccctgagcaactgtcagagaaatctgagtggatgacaacaacctgcaatcacgcactttatgctatttgtgatgtttttacccagttttatgaagctttgaatgaagttcttctttctgatgtatttgcacaattgcagtggtgtgtcaaacaagataatgaacagttggcgcgatcaggtacaaattgcttagaaaacttagtaatatccaatggagagaaattcagtcctgaagtctgggatgaaacctgcaactgtatgttggatattttcaaaacaaccatcccacatgttttgctgacatggagacctgtaggaatggaggaagattcatcagaaaagcatttggatgtggatctggaccgccagtctttaagcagcatagataaaaatccctctgagaggggacagagccagctctctaacccaacagatgacagctggaagggtagaccatacgcaaatcagaaactgtttgccagcctcctcatcaagtgtgtggtccagttggaattgatacagaccattgacaacattgtgttctaccctgcgacgagcaaaaaggaggatgcagagcacatggttgccgcccagcaagacacgctggatgcagatatccacatagagacggaggatcagggcatgtataagtacatgtcttcccagcacctcttcaagctgttggactgtttgcaggaatcccattcattctcaaaggccttcaactccaattacgagcagcggactgtcctgtggcgagcaggttttaagggcaagtctaaacccaatcttctaaaacaagaaaccagcagcctggcctgttgtttgaggatcctgtttcgaatgtatgttgatgagaaccgcagggattcctgggaagaaatacagcagagacttttaactgtttgcagtgaagctcttgcctatttcatcactgtgaattctgagagccatcgggaggcctggacaagtctcttgttgttacttctaactaaaaccctcaaaataaatgatgaaaagttcaaagcacatgcttcaatgtactacccctacttgtgtgaaattatgcagtttgacctgatccctgagctccgagcagttctgcggaagttcttcctacggataggtgttgtgtataagatatggataccagaagagccatcacaggtaccagcagcactgtcaccagtgtggtagccctggctgcccaggccagtgctgcagctctgcagaatgttcagcatgccatttctgactggcacatctcgtgaagtttcatagaaacaaggagttggcatcttggatctcagaatggcctggaaacggatggcctctacgctgttccatcacagtctccaactaaggcttatggtatttcattaaactgttgcatacccagttagcacagtaggtggggagtctgcttcatttctatcattccatttttctgattaaactgtcaaatctgtcattgcatatgccatcgttttctagcaaaatcccatgattggctataaacgttttgtaagaagtcactctccttgaaaatactgaacatagctgtataggtttgtgattattagagaatatgttaataaaacttcttgtaacggctaactgccacctaaaatatgctgggttttctgttgtttgagtgtgttagagaaatttgaatgtttttgtcagttacgagtcagccgtaattagattagtttaaggacaggtcaggattagagaagagttgtttttgtgttttgttaatgtctgagtgatttttaaagtattttacaaaaagatattgaaaatttggttgaaggcagagtttagtaattaagttagaattaagagttttgcgaggttaaaaaaatgtgcctcgtggatctccctgttttagtaacatggagagaaaaagtctacacgaaaaagtgaacaatttaatgaagatgattagccttccttgaaataagtatttgtggatgggtgttaaattaaaatttccagaatacactgtccatctcacacactctgaaatctaatatatgaagtagtaatgaaaatgaagtagtaatttaaccagagttcatttatccttgaataaacctttttattttcacctcagaaaagtgagtgtactggcagttagtgtcactgctttgcacagtccccattaaaggaccctccagagagggacagtaactgtgcatgagaagccgctcccataagcctcctcagccagatgtcatgggtggaactggagctgtgtcggggccagcacagctgaactgtgacaatggcaggaggtggcatgtgcccagcacttccattaatctgagcctaggagttgaattctttggcaaggttggattctgaggtccttattatgttaatgatggtgcaatactctcacctgcagtagaactgagttctgctgcagcttgtgtaaaagtgggcagtacacaagtacgtcccaaagcctgtgagcagtatacgtggatgctcacccatgagaaggagcacacacgcctcattctctgccctcacccactgctcacctagagcatcgctgagcgttagacaaagtgttacacagaatgattaaaactttcagacttctacctatgctctttagtcctgtaaattgggttgtattgatgtcaactctggtgccttagaagttagtagtttgggaacctatctgtaaaatcagatgttttttctttgtagagaaggatttctggtgcttttgcttactaagagaccgatattcttaagttgttttcttgttttaacagccttgagaaatgtttggttttggccagcagaattcttgtctacttttttctttcccaaaaagtgttttttaatttctctaccaaagaaaaaatgagcaggtttaggtttttacatgacttatatacattagataaaaggagctgtataatttagcaggaagggactatgggagaatactttactgtgagtggaaaatgttagcacatttgactggtttgccctggaatccactgcacctttacactgcaccatgaaacctacactccctggtatcatagcgcgtcatcacctcaacaagtcagtcgtctccattgatatttgtacaaaaggtatacatggggaacacgtgttcattcattaagtccatcttgcgtgcagctatatccctgattggttatttttcctttccttctgaggttctcatgtcattttcttcatcggatgtgactaaaatttttctggtgtcttctgccctctctttaattttgcctcttgaggggtagcagatgtgtcagtgcattttattacttgctgaaacattcaggcttacatttcttattagtttagtattttaaaagatttaattttctgaatgaggcatttgaattgtaccagcaatggacttttaaaaaattggatgtaaaaccattcagggtgatttttcttgtcagtggacagtgacgaacagagatttgaaatcccttacctccaataataagccattcagcctaaattcatttttatgaataaatctcttctttctcatggtaaatgtggcttgtgccactcaaacactagtgaaagggtatgtacaaccgcaacatcaggccaggacaccatttatttaaccaagtaatggaggagagtgaaacattttccaaggccttatttctttttcagaatgctttaagtgttgattatatgtgctgggtctctagagaagtttttatttgttacaatactgctgctttgagcaattttgtttctcttcattgtctgttagggaaatcaccagctttggcatcttaacaacaaacagtggatgggtaatttttatttctgatacgcatctttagagtcaaatatatcttttccctgtactcctcatgtacaaccaaagaacatacattatgaaaattgtattataatatctggaaacacaacattttcctctggcaggtgacttttgtacgaaatgaaaaaaaaaaaacctgtattttttttgttgttcttttgtgattaaggatatacatttagtagtctttgttattaaaggaacctgctgataagtacaagtgtgaccatctcattcaaatgtttgttgttatgatgcaaatggatattggtttcaatagaagctggatccttaatactgcattttctgaattctgttttaatatttgtgttaaagtagacatagctgaactcacatggaatcctggagttttgttatcagcagctttgcagtttgggaaacaaagaaaccaaagctgagtgttttaaagaatgaacatatctggaaatccttgctctcaaaacaaaacaatataatctatcaaaggtgttttactcagtgttctaatttttaaaaaattttatctgcatatttgcatcaaatatttatgtgtaaaatgtatgttttacctccttaaaatgcctaaaagttagttaatagttactttggtttaacctatacacaatgattaagtgcatttaatattggtaatttaatgaaaaccattccttgcccaatggatgtataaatttttgaaagaataagcagaattatataatatgaaatgctatgtaaagttttctatgtaaaaatattatgtataatactattaaaatatcccatgctttgatcaggtggtacatcaataaaattttaaaaagta

SEQ ID NO: 164800 - DNA, 2651 bp, Artificial Sequence
  derived and/or modified sequence
ggcggcgccgtggggccgaggtgtcgcttcctgacggggcggcgcggacggacgcggccggtgccggccgggacgccgggcccgcagcctagctcgccatctcgctcacgccgcccgcccgcggggccgtcagcccccgccgggccggggccatgcaggagagccagaccaagagcatgttcgtgtcccgggccctggagaagatcctagccgacaaggaggtgaagcggccccagcactcccagctgcgcagggcctgccaggtggcgctcgatgaaattaaagcagaaatagaaaagcagaggcttggcactgctgcaccaccaaaggcaaacttcattgaagctgacaagtattttcttccattcgagctagcttgccagtccaagtccccaagggtagtcagcacatcccttgactgcttgcagaaactcatcgcatacgggcacatcactggcaacgcccctgacagtggagcccctgggaagcggctgatcgacagaattgttgaaaccatttgcagttgttttcagggccctcagactgatgaaggggttcagttacaaataattaaggctcttctgactgcagtgacttccccacacattgaaattcatgagggtactatcctgcagacagtgagaacatgttacaatatctatttggccagcaaaaatctcatcaatcaaaccactgccaaggctacccttactcagatgctgaacgtcattttcacccgcatggaaaaccaagtgttgcaggaggccagagaactggaaaaaccaatccagtcaaaaccccagtcccctgtgatccaagctgcagcagtatccccaaagttcgttcgtttgaagcacagtcaggcacaaagcaaaccaacaactcccgaaaaaacagatttaaccaacggtgaacatgccaggagtgattctggaaaagtaagcacagaaaatggagacgcacccagagaaagaggctcatcactgtcagggactgatgacggagcccaggaggtggtgaaggacatcttggaagatgtagtcacatctgccattaaagaagcagcggaaaagcatggtctgacagaacctgagagagttctaggtgaactggagtgccaggaatgtgctattcccccaggagttgatgaaaactcacagaccaacgggatagccgatgacaggcagtccttgtcgtcagcagataatctggaatcggatgcacaaggacatcaagtggctgccaggttctcccacgttctgcagaaggatgccttccttgtgttccgctccctgtgcaagctgtccatgaaaccccttggtgaaggccctccagacccaaaatcccatgagctgcgttccaaggtggtttccctgcagctgctcctctctgtgttgcaaaatgctggccccgtattcaggactcacgagatgttcatcaatgcaatcaagcaatatctctgtgtggccttgtccaaaaacggcgtctcttcagtgcctgatgtctttgagctctctcttgccatttttcttactcttctttcaaactttaaaatgcacttgaaaatgcagatagaggtctttttcaaagagattttcctgaacattttagaaacatcaacaagttcttttgagcacaggtggatggtcattcagactctgacgaggatctgtgcagatgcccagtgtgttgtggatatttatgtcaactacgactgtgatttaaatgctgctaacatttttgagcgccttgtaaatgatttatccaaaattgctcagggaagaagtggacatgagctgggaatgacacctctgcaggagctcagcctgaggaagaaaggcctggagtgcctcgtgtccattctcaagtgcatggtggagtggagcaaagacctgtatgtgaatcccaaccaccagaccagcctcggtcaggagaggctcacggatcaggaaataggggatgggaaaggccttgacatggcaagacggtgtagtgtgacgtccatggagtccacagtgtcctcggggacccagacaactgttcaggatgaccctgagcaatttgaggtcatcaagcaacaaaaagaaatcattgaacacggcatcgagctgttcaacaagaaacccaagagggggatccagtttctccaggagcagggcatgctgggaacgtcagttgaagacatagcccaattcctgcaccaggaggagcgcctggattccacccaagtaggcgattttctgggagatagcgcaaggttcaacaaggaggtgatgtatgcctacgtggaccaacttgacttctgtgaaaaagaatttgtctcagccctgcggacattcctagaaggtttccgcctacctggagaagcccaaaagattgaccgattaatggagaagtttgccgcaagatacatagaatgcaaccaagggcaaactctgtttgctagtgctgacactgcttatgtcctagcgtattcaattattatgctgactacagacttgcacagtcctcaggtaaaaaataaaatgacgaaagagcagtatattaaaatgaatcggggtatcaatgatagtaaagatctgccagaagagtatctctcaagcatctatgaagagatagaaggcaagaaaattgcaataaaaaaaaattaa

SEQ ID NO: 164801 - DNA, 5358 bp, Artificial Sequence
  derived and/or modified sequence
atgcaggagagccagaccaagtccatgtttgtgtcccgggccctggagaagatcctggccgacaaggaggtgaagaggccccagcacagccagctgcggcgggcctgccaggtggccctggatgagatcaaggccgagattgagaagcagaggctgggcacagctgccccacccaaggccaacttcattgaagctgacaagtacttcctgccctttgagctggcctgccagagcaagagcccccgggtggtgtccaccagcctggactgcctgcagaagctgattgcctacggccacatcactggaaatgccccagattctggggcccctgggaagaggctgattgaccgcatcgtggagaccatctgcagctgcttccagggcccccagacagatgagggcgtgcagctgcagatcatcaaggccctgctgacagctgtgaccagcccccacatcgagatccacgagggcaccatcctgcagacagtgaggacctgctacaacatctacctggccagcaagaacctgatcaaccagaccacagccaaggccaccctgacccagatgctgaatgtcatcttcaccaggatggagaaccaggtgctgcaggaggcccgggagctggagaagcccatccagagcaagccccagagccctgtgatccaggccgctgctgtgagccccaagtttgtgcggctgaagcacagccaggcccagagcaagcccaccaccccagagaagacagacctgaccaacggggagcacgcccggagtgacagcggcaaggtgtccacagaaaatggagatgccccccgggagcggggcagcagcctgtctggaacagatgatggagcccaggaggtggtgaaggacatcctggaggatgtggtgaccagcgccatcaaggaggccgctgagaagcacggcctgacagagcctgagcgggtgctgggggagctggagtgccaggagtgtgccatccccccaggagtggatgagaacagccagaccaacggcattgctgatgaccggcagagcctgagcagcgctgacaacctggagagtgatgcccagggccaccaggtggccgcccgcttcagccacgtgctgcagaaggatgccttcctggtgttccgcagcctgtgcaagctgtccatgaagcccctgggggagggccccccagaccccaagagccatgagctgcggagcaaggtggtgtccctgcagctgctgctgtctgtgctgcagaatgccggccctgtgttccgcacccatgagatgttcatcaatgccatcaagcagtacctgtgtgtggccctgagcaagaatggagtgtcctctgtgcctgatgtgtttgagctgagcctggccatcttcctgaccctgctgagcaacttcaagatgcacctgaagatgcagatcgaggtgttcttcaaggagatcttcctgaacatcctggagaccagcaccagcagctttgagcaccgctggatggtgatccagaccctgacccgcatctgtgctgatgcccagtgtgtggtggacatctacgtgaactatgactgtgacctgaatgctgccaacatctttgagcggctggtgaatgacctgagcaagatcgcccagggccgcagcggccacgagctgggcatgacccccctgcaggagctgagcctgaggaagaagggcctggagtgcctggtgtccatcctgaagtgcatggtggagtggagcaaggacctgtatgtgaaccccaaccaccagaccagcctgggccaggagcggctgacagaccaggagattggagatggcaagggcctggacatggcccggcgctgcagcgtgacctccatggagagcacagtgagcagcggcacccagaccaccgtgcaggatgatcctgagcagtttgaagtcatcaagcagcagaaggagatcattgaacatggaattgagctgttcaacaagaagcccaagaggggcatccagttcctgcaggagcagggcatgctgggcacctctgtggaggacatcgcccagttcctgcaccaggaggagcggctggacagcacccaggtgggggacttcctgggggacagcgcccgcttcaacaaggaggtgatgtatgcctacgtggaccagctggacttctgtgagaaggagtttgtgtctgccctgcggaccttcctggagggcttccggctgcccggggaggcccagaagattgaccggctgatggagaagtttgctgcccgctacatcgagtgcaaccagggccagaccctgtttgccagcgctgacacagcctacgtgctggcctacagcatcatcatgctgaccacagacctgcacagcccccaggtgaagaacaagatgaccaaggagcagtacatcaagatgaacagaggcatcaatgacagcaaggacctgcctgaggagtacctgagcagcatctatgaggagattgagggcaagaagatcgccatgaaggagaccaaggagctgaccatcgccaccaagagcaccaagcagaatgtggccagcgagaagcagaggcggctgctgtacaacctggagatggagcagatggccaagacagccaaggccctgatggaggccgtgagccacgccaaggcccccttcaccagcgccacccacctggaccacgtgcggcccatgttcaagctggtgtggacccccctgctggccgcctacagcatcggcctgcagaactgtgatgacacagaggtggccagcctgtgcctggagggcatccgctgtgccatcagaattgcctgcatcttcggcatgcagctggagagagatgcctacgtgcaggccctggcccgcttcagcctgctgacagccagcagcagcatcacagagatgaagcagaagaacatcgacaccatcaagaccctcatcaccgtggcccacacagatggcaactacctgggcaacagctggcatgagatcctgaagtgcatcagccagctggagctggcccagctgattggaactggagtgaagacccgctacctgagcggcagcggccgggagcgggagggcagcctgaagggccacaccctggccggggaggagttcatgggcctgggcctgggcaacctggtgtctggaggagtggacaagaggcagatggccagcttccaggagagcgtgggggagaccagcagccagagcgtggtggtggccgtggaccgcatcttcaccggcagcacccggctggatggaaatgccatcgtggactttgtgcgctggctgtgtgctgtgtccatggatgagctggccagcccccaccaccccaggatgttcagcctgcagaagatcgtggagatctcctactacaacatgaaccgcatccggctgcagtggagccgcatctggcacgtgattggagaccacttcaacaaggtgggctgcaaccccaatgaagatgtggccatctttgctgtggacagcctgcggcagctgtccatgaagttcctggagaagggggagctggccaacttccgcttccagaaggacttcctgcggccctttgagcacatcatgaagaagaacagaagccccaccatccgggacatggccatccgctgcatcgcccagatggtgaacagccaggccgccaacatccgcagcggctggaagaacatctttgctgtgttccaccaggccgccagtgaccatgatggcaacatcgtggagctggccttccagaccacctgccacatcgtgaccaccatcttccagcaccacttccctgctgccatcgacagcttccaggatgctgtgaagtgcctgtctgaatttgcctgcaatgctgccttcccagacacctccatggaggccatccgcctcatccgcttctgtgggaagtatgtgtctgagcggccccgggtgctgcaggagtacaccagtgatgacatgaatgtggcccctggggacagagtgtgggtgcggggctggttccccatcctgtttgagctgagctgcatcatcaaccgctgcaagctggatgtgaggacccggggcctgactgtgatgtttgagatcatgaagagctatggccacacctttgagaagcactggtggcaggacctcttcagaattgtgttccgcatctttgacaacatgaagctgcctgagcagctgtctgagaagtctgagtggatgaccaccacctgcaaccacgccctgtatgccatctgtgatgtgttcacccagttctatgaggccctgaatgaggtgctgctgagtgatgtgtttgcccagctgcagtggtgtgtgaagcaggacaatgagcagctggcccggagcggcaccaactgcctggagaacctggtgatcagcaatggagagaagttcagccctgaggtgtgggatgagacctgcaactgcatgctggacatcttcaagaccaccatcccccacgtgctgctgacctggaggcctgtgggcatggaggaggacagcagcgagaagcacctggatgtggacctggaccggcagagcctgagcagcattgacaagaaccccagcgagcggggccagagccagctgagcaaccccacagatgacagctggaagggccggccctatgccaaccagaagctgtttgccagcctgctgatcaagtgtgtggtgcagctggagctgatccagaccatcgacaacatcgtgttctacccagccaccagcaagaaggaggatgctgagcacatggtggccgcccagcaggacaccctggatgctgacatccacattgaaacagaggaccagggcatgtacaagtacatgagcagccagcacctgttcaagctgctggactgcctgcaggagagccacagcttcagcaaggccttcaacagcaactatgagcagaggacagtgctgtggagggctggcttcaagggcaagagcaagcccaacctgctgaagcaggagaccagcagcctggcctgctgcctgcgcatcctcttcaggatgtatgtggatgaaaatagaagagacagctgggaggagatccagcagaggctgctgactgtgtgcagcgaggccctggcctacttcatcaccgtgaacagcgagagccaccgggaggcctggaccagcctgctgctgctgctgctgaccaagaccctgaagatcaatgatgagaagttcaaggcccacgcctccatgtactacccctacctgtgtgagatcatgcagtttgacctgatccctgagctgcgggctgtgctgaggaagttcttcctgcgcatcggcgtggtgtacaagatctggatccctgaggagcccagccaggtgcctgctgccctgagccctgtgtggtag

SEQ ID NO: 164802 - DNA, 2499 bp, Artificial Sequence
  derived and/or modified sequence
atgcaggagagccagaccaagtccatgtttgtgtcccgggccctggagaagatcctggccgacaaggaggtgaagaggccccagcacagccagctgcggcgggcctgccaggtggccctggatgagatcaaggccgagattgagaagcagaggctgggcacagctgccccacccaaggccaacttcattgaagctgacaagtacttcctgccctttgagctggcctgccagagcaagagcccccgggtggtgtccaccagcctggactgcctgcagaagctgattgcctacggccacatcactggaaatgccccagattctggggcccctgggaagaggctgattgaccgcatcgtggagaccatctgcagctgcttccagggcccccagacagatgagggcgtgcagctgcagatcatcaaggccctgctgacagctgtgaccagcccccacatcgagatccacgagggcaccatcctgcagacagtgaggacctgctacaacatctacctggccagcaagaacctgatcaaccagaccacagccaaggccaccctgacccagatgctgaatgtcatcttcaccaggatggagaaccaggtgctgcaggaggcccgggagctggagaagcccatccagagcaagccccagagccctgtgatccaggccgctgctgtgagccccaagtttgtgcggctgaagcacagccaggcccagagcaagcccaccaccccagagaagacagacctgaccaacggggagcacgcccggagtgacagcggcaaggtgtccacagaaaatggagatgccccccgggagcggggcagcagcctgtctggaacagatgatggagcccaggaggtggtgaaggacatcctggaggatgtggtgaccagcgccatcaaggaggccgctgagaagcacggcctgacagagcctgagcgggtgctgggggagctggagtgccaggagtgtgccatccccccaggagtggatgagaacagccagaccaacggcattgctgatgaccggcagagcctgagcagcgctgacaacctggagagtgatgcccagggccaccaggtggccgcccgcttcagccacgtgctgcagaaggatgccttcctggtgttccgcagcctgtgcaagctgtccatgaagcccctgggggagggccccccagaccccaagagccatgagctgcggagcaaggtggtgtccctgcagctgctgctgtctgtgctgcagaatgccggccctgtgttccgcacccatgagatgttcatcaatgccatcaagcagtacctgtgtgtggccctgagcaagaatggagtgtcctctgtgcctgatgtgtttgagctgagcctggccatcttcctgaccctgctgagcaacttcaagatgcacctgaagatgcagatcgaggtgttcttcaaggagatcttcctgaacatcctggagaccagcaccagcagctttgagcaccgctggatggtgatccagaccctgacccgcatctgtgctgatgcccagtgtgtggtggacatctacgtgaactatgactgtgacctgaatgctgccaacatctttgagcggctggtgaatgacctgagcaagatcgcccagggccgcagcggccacgagctgggcatgacccccctgcaggagctgagcctgaggaagaagggcctggagtgcctggtgtccatcctgaagtgcatggtggagtggagcaaggacctgtatgtgaaccccaaccaccagaccagcctgggccaggagcggctgacagaccaggagattggagatggcaagggcctggacatggcccggcgctgcagcgtgacctccatggagagcacagtgagcagcggcacccagaccaccgtgcaggatgatcctgagcagtttgaagtcatcaagcagcagaaggagatcattgaacatggaattgagctgttcaacaagaagcccaagaggggcatccagttcctgcaggagcagggcatgctgggcacctctgtggaggacatcgcccagttcctgcaccaggaggagcggctggacagcacccaggtgggggacttcctgggggacagcgcccgcttcaacaaggaggtgatgtatgcctacgtggaccagctggacttctgtgagaaggagtttgtgtctgccctgcggaccttcctggagggcttccggctgcccggggaggcccagaagattgaccggctgatggagaagtttgctgcccgctacatcgagtgcaaccagggccagaccctgtttgccagcgctgacacagcctacgtgctggcctacagcatcatcatgctgaccacagacctgcacagcccccaggtgaagaacaagatgaccaaggagcagtacatcaagatgaacagaggcatcaatgacagcaaggacctgcctgaggagtacctgagcagcatctatgaggagattgagggcaagaagatcgccatcaagaagaactag

SEQ ID NO: 164803 - DNA, 5358 bp, Artificial Sequence
  derived and/or modified sequence
atgcaggagagccagaccaagagcatgttcgtgagccgggccctggagaaaattctggcggataaggaggtgaaacgacctcagcactctcaactgaggcgtgcctgtcaagtcgcactggacgaaattaaggcagagatagaaaagcagcggctagggactgccgcccctcccaaagcgaattttatcgaagcagacaagtactttctgccgtttgaactagcatgccagtccaagagtcccagagttgtctcaacttcgttagactgcctacagaagctgatcgcctatgggcacatcacaggcaatgccccagattcaggtgcacccggcaaacggctcatcgaccgaatagttgaaaccatttgctcttgctttcaagggccacagaccgacgaaggtgtccagttacagattattaaagccctcctgacagctgtgacgagcccccatatcgagatacacgaaggtacaattcttcagactgtccggacctgctacaacatctatctggcgtccaagaaccttatcaaccaaaccacggccaaggcaactctgacacagatgctaaacgtcatcttcacccggatggaaaatcaagtacttcaggaggctcgggagttggaaaagccaattcagtctaaacctcagtcccccgtaattcaggctgccgccgtgagccccaaatttgtccgtctcaagcactcgcaggcccagtccaaaccaaccacgccagaaaagacagatcttacaaatggcgagcacgccagaagcgattctggtaaggtgtcaactgagaatggcgacgcgcctagggagaggggatcctctctctccggtacagacgacggggcccaggaggtggtgaaggacatcctcgaggacgtggtgacttctgctattaaggaggctgccgagaagcacgggttgacagagccggaacgcgttctgggcgaacttgagtgtcaggagtgcgctatcccacctggggtagatgagaactcccagactaacggaatcgccgatgatcgccagtccctgagttccgccgataacctggagtctgatgctcaagggcaccaggtggccgctaggtttagccatgttctgcagaaggatgcttttctagtgttcagaagtctgtgtaagctctcaatgaaacctctgggggaggggccgccggacccaaagtcacatgaacttcggtccaaggtggtgtcactgcaattgctactatctgttctgcagaatgctgggccggtttttcggacccacgagatgtttattaatgctattaagcagtatctttgtgtggctctgtccaaaaatggggtgagtagtgtgccagacgtgttcgaactctccttggcaatatttctgacactacttagcaattttaagatgcacctcaaaatgcagattgaagtgtttttcaaagaaatttttttgaatattctggagacctctacatcctctttcgaacataggtggatggtaatccaaacacttaccaggatctgtgctgacgcccagtgcgtggtggacatctatgtgaactatgattgcgacctaaatgctgctaacatctttgaacggctggtgaacgatctgtcgaagatagcacaggggcgctcagggcacgaactgggaatgactcccttacaggaactgtccctgagaaagaagggtcttgagtgcctggtttccatccttaaatgtatggtggaatggtccaaagacctatatgtcaatcccaatcaccaaacatccctcggccaagaaagactgaccgaccaggaaattggggacggcaaaggactggatatggctcgccggtgtagtgttacatctatggaatcaactgtctcctcaggcacccagaccacggtacaagatgaccccgaacagttcgaagttattaaacagcagaaagaaattatcgagcacggcatcgagttgtttaacaagaagcctaaaagagggatccagtttctccaggagcaggggatgcttggcacttcggtggaagacatcgctcagttcttgcaccaggaggagcgtctggacagtacccaggtcggggacttcctgggcgatagcgctaggttcaataaagaggtgatgtatgcctacgtcgaccagctggacttctgtgaaaaggagttcgtttcggctttaaggacctttctggaggggttcaggctgccaggcgaagcgcagaagattgatagactgatggagaaatttgccgctcggtacattgaatgtaaccagggccagacactgttcgcatcagcggatacggcctacgtcctcgcatatagcataattatgctgaccactgatctgcactctccacaggtgaagaacaagatgaccaaagaacagtatattaagatgaaccgggggatcaatgactccaaagacttgcccgaagaatacctttcgagcatttacgaagagatcgagggaaagaagattgcaatgaaagaaacaaaggagttaacaatcgccaccaaaagcacaaagcaaaacgttgcctctgaaaagcaaaggaggcttctctacaacctcgaaatggagcaaatggccaagacggccaaggccttaatggaagccgtgtcccacgctaaggcaccattcaccagcgccacccacctggatcacgtgcgcccaatgtttaagctcgtttggacccccttgctcgctgcctatagcatcgggctgcaaaactgtgacgacactgaggtagcctctctgtgtctcgagggaatcagatgcgccattcggattgcctgcatctttgggatgcagctggagagggatgcatacgtgcaggcactagctcgattttcactgctgactgccagcagtagtattaccgagatgaaacagaaaaatatcgatactatcaaaacactcatcaccgtggctcataccgacgggaattatctgggaaactcatggcatgaaatcttgaaatgtattagtcaactcgagctggcacagttaatcggaacaggcgtgaaaactcggtacctgtccggcagcggcagggagagagaaggatctcttaagggccacacattagccggcgaggagttcatgggccttggcctcgggaacttggtatcagggggggtcgataaacgtcagatggcatccttccaggaaagtgtgggagagaccagcagtcaaagcgtcgtcgtagctgttgatcgcatattcaccggatccaccaggttggatggaaacgcgattgtagattttgtgcggtggctgtgtgccgtatctatggatgagttggccagcccacatcacccgcgtatgttttcactccaaaagatagttgaaatctcttactataatatgaatcgcatccgtcttcagtggtcaagaatctggcatgtaattggcgaccactttaataaggtggggtgcaatcccaatgaggatgttgccatttttgcagtggattccctgcggcagcttagtatgaagttcctcgagaaaggagagctggctaattttcgatttcagaaagacttccttaggcctttcgaacacataatgaaaaagaatcgcagccccaccattcgagacatggctatcaggtgtatagcacaaatggtcaactcccaggctgcaaatattcggagtggttggaagaacatctttgccgtcttccatcaggccgccagcgatcacgacggaaatatagtcgagctggctttccagacgacatgccatatcgtgaccaccatttttcaacaccattttcccgccgctattgatagtttccaggacgctgttaaatgcctgagtgaatttgcttgtaatgcggcattccctgacacttcaatggaagctatccgcctgattagattttgtggaaagtatgtgagcgagaggcccagggtgctgcaggagtacactagtgacgatatgaatgtcgcccctggagacagagtctgggttcgagggtggttccctattctgtttgagctgagttgtataatcaatagatgtaagctagatgtccgtacgcgcggtctaacagtcatgtttgaaatcatgaagagttacgggcatacgtttgaaaaacattggtggcaggacctcttcaggatcgtgttccgcatctttgacaatatgaagcttccagaacaactgtccgaaaaaagcgaatggatgacgacaacctgcaaccacgctctgtatgctatttgtgatgtgttcacacaattttatgaagctctcaatgaggttctcctctctgatgtgtttgcccagctccagtggtgtgtcaaacaggacaatgagcagcttgcgagatccggtacaaattgtctcgagaacttggtgatttctaacggagagaagttctccccagaagtgtgggatgagacatgtaactgcatgctggacatattcaagaccacaatccctcacgtgttgctgacatggcggcccgtgggcatggaggaggattccagtgagaagcacttggacgtcgaccttgatcggcaatcattgtcttccattgacaaaaacccctctgagcgcggacagagccaactcagcaacccaactgacgactcttggaagggacggccttacgctaatcagaagctgttcgcctcactattgattaaatgtgtggtgcagctcgagcttatacagaccatcgataatatcgtcttttacccagccacttcaaagaaggaagacgctgaacacatggtggcggcgcagcaagatacattggacgcggacatccacattgagacagaggaccagggcatgtataagtatatgtccagtcagcacttattcaaactgctggattgcctgcaagagtctcacagtttcagcaaagccttcaactctaattacgagcaacggacagttttgtggcgggccggattcaaaggcaagtcgaaacctaacttgctaaagcaggaaacttcctcccttgcttgctgtctgcgtattctctttcgcatgtacgtggatgagaatcgtagggattcttgggaagagatccagcagaggctgttaaccgtgtgtagtgaggccttggcttatttcatcacagtgaacagtgagagccatcgagaagcatggacatccctgttgttgttgcttctcaccaagacactcaagatcaatgacgagaagtttaaagcccacgcttctatgtactatccctacttatgcgaaatcatgcagttcgacctcatcccagagctccgggctgttctgcgtaagttcttcttgagaatcggagtagtctacaaaatctggattcccgaggaacctagtcaggtgccagccgctctgagtcccgtctggtag

SEQ ID NO: 164804 - DNA, 2499 bp, Artificial Sequence
  derived and/or modified sequence
atgcaggagagccagaccaagagcatgttcgtgagccgggccctggaaaagatcctggcagataaggaagtgaagaggcctcagcattctcagttacgacgggcttgccaagttgcattagatgagataaaggcagaaattgagaagcagcggctcggtaccgctgcaccgccaaaggctaacttcattgaggcagacaagtattttctgcccttcgaactggcatgccaatcaaagagcccacgggtggtgtcaacatctcttgattgtcttcaaaaattaattgcttatggccatatcaccggaaacgcgccggattctggcgctcccgggaagcgactgatcgataggatcgttgaaactatatgttcctgcttccaaggtcctcaaacggacgagggcgttcagctgcagatcatcaaagctcttctgactgcagtgactagcccacacatcgagatccacgaaggcactattttgcagactgtgagaacttgttacaatatctaccttgcctcaaagaacttgatcaaccagaccactgccaaggctacactcacccagatgctgaatgtgatcttcacccgcatggagaaccaggtgttgcaggaggccagagagctggagaagcctatccagtcaaagccccagtctcccgtcatccaggcagcagctgtgtcccccaagttcgtgcgcttgaagcactctcaggcgcagagcaagcccactacacctgagaagactgatctgacgaacggtgaacatgcacgttctgattccggaaaggtaagtacggaaaacggggacgccccgcgagagcggggcagtagtttgagtggcacagatgatggagcacaggaggtcgttaaggacattctcgaggatgtggttacctcagccattaaggaggccgccgagaaacacggtttaacggagcccgagagagtactgggtgagttggagtgccaagaatgcgcgattccaccgggagtggatgaaaattctcagaccaatggtattgccgacgatagacagagcctgtcttctgccgataacctggagagcgatgctcagggacaccaggtcgccgctcgtttcagtcacgtccttcaaaaggatgccttcctggttttccggagcctctgcaagttgtccatgaaacccctgggggagggcccgcccgatccaaagagccacgagctgagaagtaaggtcgtatctttgcagctgctcttgagcgtccttcagaatgctggcccagtattcagaacacacgagatgttcatcaatgccatcaagcagtatctttgcgtcgctctgagcaagaatggcgtctcttccgtgcctgacgtctttgagcttagcctggcaatcttcttgacactgctgtccaatttcaagatgcatctgaaaatgcagattgaggtattctttaaggagatcttcttgaatatactcgagaccagcacatcctcctttgagcaccgctggatggtcattcagacacttacgcggatttgcgcggacgcacaatgtgtagttgatatttatgtgaactacgactgcgacttgaacgctgctaacatttttgagcgacttgtgaatgacctctccaagatcgcccagggccgttcaggtcacgagttaggaatgacacctttacaggaactaagccttagaaagaagggcctagagtgtctggtaagcatactaaagtgtatggtcgaatggtccaaagacctgtacgttaaccctaatcatcagacttcattaggccaagaaaggctgactgaccaggaaattggggatggcaaaggcttagatatggccaggaggtgctccgtaacgtctatggaatctaccgtgtcctctgggacccaaaccaccgttcaggacgatccagagcagtttgaggttatcaagcagcagaaggaaattatagagcacggaatagaactgttcaacaaaaagccaaagcgagggattcagtttctccaggagcagggtatgcttggaacctcggttgaggacatcgcacagttcctgcaccaggaagagcgcctggacagtactcaagtgggggactttctaggagattcggcacggttcaacaaagaggtcatgtacgcgtatgtcgatcagctcgacttttgcgagaaagaatttgtgtccgccctgagaacattcctcgaagggtttagactgcccggggaagctcaaaaaatcgaccgactgatggagaagtttgccgccaggtatatcgagtgtaaccaaggacaaactttgttcgcttctgccgatactgcatacgtcctggcatattctattatcatgctcacaacggacctccattcaccgcaggtaaaaaacaagatgacaaaggagcagtatatcaagatgaaccgcggcataaacgatagcaaagatctccctgaggagtacctttcttcaatttacgaggagattgaaggcaagaagatcgctataaaaaagaactag

SEQ ID NO: 164805 - DNA, 5357 bp, Artificial Sequence
  derived and/or modified sequence
atgcaagagtcacaaaccaaatccatgtttgttagtcgagccctcgaaaagatcttagctgacaaagaggtcaagaggcctcaacactcacagctgaggcgcgcatgtcaggtcgccctcgacgagatcaaggccgagattgagaaacagcggttgggcaccgccgctccccctaaagcaaatttcatcgaagcggacaagtacttccttccatttgagctggcctgtcagtctaaaagccctcgagtcgtatccactagcctggactgcctacagaagctcatcgcatatggacatattaccggaaatgcgcctgacagcggggcacccggaaaacggctgatcgaccgcatcgtcgaaaccatttgctcttgctttcaagggccacagacagatgaaggggtacagcttcagattatcaaagccctgctcacagctgttacgtcaccacacatcgaaattcatgagggaactatcctccagacagttcggacgtgttacaatatctacttggctagtaaaaatctaattaatcagacaaccgccaaagccacgctcacccagatgttgaatgtaatctttacacggatggagaatcaggtactgcaggaagctagagagctggaaaagccgatccaaagcaaaccccagtctccagtaatacaggctgccgctgtctcacctaagtttgtgcgtctaaaacattctcaggcgcagagtaagcctactacacccgagaaaacggacctgactaatggcgagcacgccaggagcgactccggcaaagtgagtactgagaatggtgacgcacctcgcgagcggggttcatccttatccggcacagatgatggggcacaagaggttgtcaaagatattctggaagacgtcgtgacttccgctattaaggaggctgccgaaaaacacggccttactgaaccagagcgagttcttggggagctggagtgtcaagaatgcgctatcccccctggtgtggatgaaaactcacaaactaacggcatcgcagatgataggcagtcgctctccagtgctgacaatctggagagtgatgcccagggccatcaggtggccgcaaggttctctcacgtcctgcagaaagacgccttccttgttttccgcagcctgtgcaagctgtccatgaaaccactgggggaaggaccgccagaccccaagtcacacgaacttcgatccaaggtcgtctccctgcaactgctgctctcggtgctgcaaaacgccggaccggtgtttcgcacccacgaaatgttcataaacgcaataaaacagtacctctgcgttgccttatctaagaatggcgtttcctctgtgccagacgtgtttgagctgtcgcttgctatttttctgaccttgctctcaaattttaaaatgcacctgaagatgcagattgaggtcttctttaaggagatcttcttgaatattttggagacttcaactagctcctttgagcaccgatggatggtgattcaaacactcacgagaatctgcgccgatgcacagtgtgtggttgatatctacgtgaactacgactgtgacctcaacgccgcaaacatcttcgagcgcctggtcaacgacctgagtaaaatagctcagggaagatctggtcacgaattagggatgacacccctgcaggagctctcccttcggaaaaagggactggaatgcctggtgtcaatactgaagtgcatggtggagtggtcaaaggatctctacgtcaatccaaatcaccagaccagcttagggcaggagcgcttaacagaccaggagatcggcgatggcaagggcctggacatggcccgacgatgctctgtgactagtatggagtccactgtgagctcaggcacacagacaactgttcaagacgacccagagcagtttgaagttattaaacaacaaaaagagatcatcgagcacggcatcgaactgttcaacaaaaagccaaaaaggggaattcagtttctccaagagcagggcatgctagggacctctgttgaagatatcgcacaattcctgcatcaggaagaacggctcgattcaacacaagttggagattttctgggggatagcgctcggttcaataaggaagtgatgtatgcatacgtcgaccagctcgatttctgcgaaaaggaattcgtttccgctcttaggaccttcttagagggcttcaggctcccaggagaggcccaaaagatcgatagattgatggagaagttcgcagctaggtacatcgagtgtaatcaggggcagacactcttcgcatctgcggacacggcttacgtcttggcgtacagcatcatcatgctcacgaccgacctgcattcgccgcaggtgaaaaacaagatgacaaaggagcagtacatcaaaatgaacagaggcattaatgacagtaaagatctgcccgaagagtatctgtcctctatttatgaggaaatagagggtaaaaagattgcaatgaaagagacgaaagaactgacaatcgcaactaagtcaactaaacaaaatgtggcgtctgagaagcagcgcagattgctgtacaacttggagatggaacagatggccaaaactgctaaggctctcatggaagccgttagtcacgccaaggccccatttacctccgctacacacctggaccacgttcggcctatgtttaagttagtctggacccccctgctcgccgcttattctatcggcctgcagaactgcgatgacaccgaggtcgcaagtctgtgtctggaaggcattcggtgcgccatccgaatagcttgtatttttggaatgcagctagagagggacgcttacgtgcaggcccttgcacggttctcccttctcactgcctcctcatccattactgagatgaagcagaaaaatatcgacacgattaagaccttgatcactgtggcccatacagatggcaattatctaggcaactcgtggcacgaaatactgaagtgtatctcacagctcgagttagctcaactgatcggcacaggagtgaaaacgcgttatctgtctggaagtgggcgagaaagagagggcagccttaaggggcatacactggcaggggaggaattcatgggccttggattggggaatttggtgagtgggggagtggacaaacgtcagatggcaagcttccaagaatccgttggagagactagcagtcagagtgtggtggtggctgtggaccgcatctttaccgggagcaccagattggatggcaatgctattgtcgactttgttagatggctctgtgccgtgtctatggacgagcttgcttcccctcaccaccctagaatgttctcactacagaagatcgtggagatatcatactacaatatgaaccggattagactgcagtggtccaggatctggcacgtgatcggggaccattttaataaagtgggctgcaatcctaatgaagacgtcgctattttcgcagtggacagtctccggcagctgtccatgaaatttctcgagaaaggggagctcgccaatttcagattccaaaaagattttttaagaccattcgagcatattatgaagaaaaataggagccccacaattcgggacatggccattagatgtattgcccagatggtcaatagccaggctgctaacatcagaagcgggtggaagaacatcttcgccgtgtttcaccaggctgccagcgaccacgatgggaatatagtagaacttgcctttcaaaccacgtgccacatcgtcacaactattttccagcaccatttccctgctgccatcgactccttccaagacgctgttaagtgtctatcagaatttgcttgcaacgcggcttttcctgacacctctatggaggctatccgtttgatcagattttgcggcaagtacgtttcagagcgtcctcgcgttttacaggaatatacctctgatgatatgaacgttgctccgggagatcgcgtctgggtccgtggctggttcccaattctgtttgagctgtcttgtataatcaacaggtgcaagctggatgtccgcacccggggattgacagtgatgtttgaaattatgaagagttacggccacacattcgagaagcattggtggcaggacctatttagaattgttttcaggatcttcgataatatgaagttacccgagcagctttcagagaagagcgaatggatgaccaccacttgcaatcacgcactatacgcaatctgtgatgtttttacacagttctatgaagccctgaacgaggtgctactctcagacgtattcgctcaacttcagtggtgtgtgaagcaggataatgaacagctggctcggtccggtactaactgcctggagaatctggtcatttccaacggcgagaaatttagcccggaagtatgggacgagacttgtaattgcatgctggatatcttcaagactacaattccccatgttttgttgacatggaggcctgtaggaatggaagaagatagtagcgaaaagcacctggatgtagacctggacaggcaatcccttagtagtatagacaagaaccccagcgaacgaggccaaagtcagctgagcaatccaactgatgacagctggaaaggcagaccttacgctaatcaaaagcttttcgcgtccttgctcataaagtgcgttgtccagctggagctgatacagaccattgataacatcgtgttctacccggcaacgtctaagaaagaggacgcagagcacatggtggcggcacagcaggataccctggacgctgacatacatattgagacggaggatcagggcatgtataaatacatgtcttcccagcacctgttcaaactgctggactgcttgcaagaaagccatagtttctcgaaagcctttaactcaaactatgaacaacgcaccgtcctgtggcgggcaggtttcaagggcaaaagcaagcccaatctgttaaaacaggaaacctcttccctggcttgttgcctccgcattctcttccggatgtatgtggacgagaacagacgcgattcctgggaggagatccagcagcgactcctgacagtgtgttcggaagctctggcatacttcatcaccgtgaactccgaaagtcatcgcgaagcatggacatcactgctgctcctactgctcacaaagaccctcaagatcaatgatgagaaattcaaagctcacgcatccatgtactatccatacctgtgcgagatcatgcagtttgacctcatcccggagctccgagcggttttacgaaagtttttcctccgtataggggtggtgtacaaaatttggattcctgaagagccctctcaggtgccagctgctctgtctccagtgtggta

SEQ ID NO: 164806 - DNA, 2499 bp, Artificial Sequence
  derived and/or modified sequence
atgcaggagtcacagaccaagtcaatgtttgtgtctcgcgcattagaaaaaatcttggccgacaaagaggtgaaacggcctcagcactctcagcttcgacgcgcatgccaggttgcccttgacgagattaaagctgagatagagaaacagcgacttggaactgcagctccccctaaggcaaattttatcgaagcggataagtactttcttccttttgaattagcgtgtcagtctaagtcaccaagagtcgtgtccaccagcctcgattgtcttcaaaaacttatcgcttatggacacatcacggggaatgcccctgatagtggcgcacctggcaaaaggttaatcgacagaatcgttgagacaatatgtagttgctttcagggaccccagacagacgaaggtgtgcagctgcaaatcattaaggctctgcttactgcagtgaccagcccccacattgaaattcacgagggcacgattctgcagaccgtgaggacctgctataatatatacctggcctctaagaatctgattaatcagacaacggctaaagccactctcacgcagatgctgaacgtaatttttactcgtatggaaaatcaggtgctgcaggaggctcgtgaactggagaaacccatacagagtaagcctcagtctccggtgatacaggctgccgctgtgtctcccaaattcgtgagactaaagcactcacaggcccagtcaaagccgaccacgcccgagaagactgacctgacgaacggggagcatgcacgctctgactctggtaaagtctcgaccgagaacggtgatgctcccagagaaaggggatccagtctctcaggcactgacgatggtgcccaggaggtcgtcaaggatattctggaggacgtcgtgacttcggcaattaaggaggctgcagaaaaacatggattgacagagccagagcgggtcctgggagagctggagtgtcaggaatgtgccatccccccaggagtggacgagaactctcagaccaacggaatagctgatgataggcaaagtttgtcgagcgcagataatctggaatccgatgctcaaggccaccaggtggccgcaaggttcagccacgtacttcaaaaagacgcattcctggtgtttcgctcattatgcaagttatccatgaagccactaggggagggacccccagaccccaaatcccatgaacttcggtctaaagtagtgagcctgcaactcctgctttctgttctgcagaacgcaggacccgtctttagaacacacgagatgttcattaacgctattaagcagtatttgtgcgtagcattgtcaaagaacggggtgagcagtgtgccagacgtgtttgagctgagtcttgctattttcttgaccctgctgtctaattttaagatgcaccttaaaatgcagatcgaggtgtttttcaaggaaatttttctgaacatactggaaacctcaacaagttctttcgaacaccgctggatggtgatccaaacactgactcgcatttgtgccgacgctcaatgtgttgtggacatttatgtgaactacgattgcgatctcaatgctgcaaacatatttgaacgccttgttaacgatctgtccaaaatcgcccagggacgcagcggccatgaacttggcatgacacctctgcaggaactcagcctccggaaaaagggtcttgagtgcttggtgtccatcctgaagtgtatggtggagtggagtaaagatctatatgtaaatccaaatcatcagacatcactcgggcaggagcgactcaccgaccaagaaataggggacggcaaagggctcgatatggcaagaaggtgctctgtcacctctatggagtctaccgtgagctctgggacacagaccacggtccaggacgacccagaacagttcgaggtcataaagcaacagaaggagattatcgagcacggcatcgaactgtttaataagaaaccgaaacggggaatacagtttctgcaggaacaggggatgcttgggaccagcgttgaggacattgcccagttcctccatcaagaagaacgcctcgattcgactcaagtgggcgacttcctgggcgatagcgccaggttcaacaaagaggtgatgtatgcctacgtggaccagcttgatttctgtgaaaaggaattcgtatcagctttgagaaccttcctggaggggttccgactgcctggggaagcacagaagattgataggctgatggaaaagttcgcggctaggtacatagaatgcaatcagggccagacactcttcgcgtccgcagacactgcatacgtgcttgcctactccatcattatgctgaccaccgacttgcattcccctcaggttaagaataaaatgaccaaggagcagtacatcaagatgaaccgtggaatcaacgacagcaaggacctccctgaagagtacctctcaagcatctacgaagagatcgagggaaaaaaaatagctattaaaaagaattag

SEQ ID NO: 164807 - DNA, 5358 bp, Artificial Sequence
  derived and/or modified sequence
atgcaggagagccagaccaagagcatgttcgtgagcagagccctggagaagatcctggccgacaaggaggtgaagagaccccagcacagccagctgagaagagcctgccaggtggccctggacgagatcaaggccgagatcgagaagcagagactgggcaccgccgccccccccaaggccaacttcatcgaggccgacaagtacttcctgcccttcgagctggcctgccagagcaagagccccagagtggtgagcaccagcctggactgcctgcagaagctgatcgcctacggccacatcaccggcaacgcccccgacagcggcgcccccggcaagagactgatcgacagaatcgtggagaccatctgcagctgcttccagggcccccagaccgacgagggcgtgcagctgcagatcatcaaggccctgctgaccgccgtgaccagcccccacatcgagatccacgagggcaccatcctgcagaccgtgagaacctgctacaacatctacctggccagcaagaacctgatcaaccagaccaccgccaaggccaccctgacccagatgctgaacgtgatcttcaccagaatggagaaccaggtgctgcaggaggccagagagctggagaagcccatccagagcaagccccagagccccgtgatccaggccgccgccgtgagccccaagttcgtgagactgaagcacagccaggcccagagcaagcccaccacccccgagaagaccgacctgaccaacggcgagcacgccagaagcgacagcggcaaggtgagcaccgagaacggcgacgcccccagagagagaggcagcagcctgagcggcaccgacgacggcgcccaggaggtggtgaaggacatcctggaggacgtggtgaccagcgccatcaaggaggccgccgagaagcacggcctgaccgagcccgagagagtgctgggcgagctggagtgccaggagtgcgccatcccccccggcgtggacgagaacagccagaccaacggcatcgccgacgacagacagagcctgagcagcgccgacaacctggagagcgacgcccagggccaccaggtggccgccagattcagccacgtgctgcagaaggacgccttcctggtgttcagaagcctgtgcaagctgagcatgaagcccctgggcgagggcccccccgaccccaagagccacgagctgagaagcaaggtggtgagcctgcagctgctgctgagcgtgctgcagaacgccggccccgtgttcagaacccacgagatgttcatcaacgccatcaagcagtacctgtgcgtggccctgagcaagaacggcgtgagcagcgtgcccgacgtgttcgagctgagcctggccatcttcctgaccctgctgagcaacttcaagatgcacctgaagatgcagatcgaggtgttcttcaaggagatcttcctgaacatcctggagaccagcaccagcagcttcgagcacagatggatggtgatccagaccctgaccagaatctgcgccgacgcccagtgcgtggtggacatctacgtgaactacgactgcgacctgaacgccgccaacatcttcgagagactggtgaacgacctgagcaagatcgcccagggcagaagcggccacgagctgggcatgacccccctgcaggagctgagcctgagaaagaagggcctggagtgcctggtgagcatcctgaagtgcatggtggagtggagcaaggacctgtacgtgaaccccaaccaccagaccagcctgggccaggagagactgaccgaccaggagatcggcgacggcaagggcctggacatggccagaagatgcagcgtgaccagcatggagagcaccgtgagcagcggcacccagaccaccgtgcaggacgaccccgagcagttcgaggtgatcaagcagcagaaggagatcatcgagcacggcatcgagctgttcaacaagaagcccaagagaggcatccagttcctgcaggagcagggcatgctgggcaccagcgtggaggacatcgcccagttcctgcaccaggaggagagactggacagcacccaggtgggcgacttcctgggcgacagcgccagattcaacaaggaggtgatgtacgcctacgtggaccagctggacttctgcgagaaggagttcgtgagcgccctgagaaccttcctggagggcttcagactgcccggcgaggcccagaagatcgacagactgatggagaagttcgccgccagatacatcgagtgcaaccagggccagaccctgttcgccagcgccgacaccgcctacgtgctggcctacagcatcatcatgctgaccaccgacctgcacagcccccaggtgaagaacaagatgaccaaggagcagtacatcaagatgaacagaggcatcaacgacagcaaggacctgcccgaggagtacctgagcagcatctacgaggagatcgagggcaagaagatcgccatgaaggagaccaaggagctgaccatcgccaccaagagcaccaagcagaacgtggccagcgagaagcagagaagactgctgtacaacctggagatggagcagatggccaagaccgccaaggccctgatggaggccgtgagccacgccaaggcccccttcaccagcgccacccacctggaccacgtgagacccatgttcaagctggtgtggacccccctgctggccgcctacagcatcggcctgcagaactgcgacgacaccgaggtggccagcctgtgcctggagggcatcagatgcgccatcagaatcgcctgcatcttcggcatgcagctggagagagacgcctacgtgcaggccctggccagattcagcctgctgaccgccagcagcagcatcaccgagatgaagcagaagaacatcgacaccatcaagaccctgatcaccgtggcccacaccgacggcaactacctgggcaacagctggcacgagatcctgaagtgcatcagccagctggagctggcccagctgatcggcaccggcgtgaagaccagatacctgagcggcagcggcagagagagagagggcagcctgaagggccacaccctggccggcgaggagttcatgggcctgggcctgggcaacctggtgagcggcggcgtggacaagagacagatggccagcttccaggagagcgtgggcgagaccagcagccagagcgtggtggtggccgtggacagaatcttcaccggcagcaccagactggacggcaacgccatcgtggacttcgtgagatggctgtgcgccgtgagcatggacgagctggccagcccccaccaccccagaatgttcagcctgcagaagatcgtggagatcagctactacaacatgaacagaatcagactgcagtggagcagaatctggcacgtgatcggcgaccacttcaacaaggtgggctgcaaccccaacgaggacgtggccatcttcgccgtggacagcctgagacagctgagcatgaagttcctggagaagggcgagctggccaacttcagattccagaaggacttcctgagacccttcgagcacatcatgaagaagaacagaagccccaccatcagagacatggccatcagatgcatcgcccagatggtgaacagccaggccgccaacatcagaagcggctggaagaacatcttcgccgtgttccaccaggccgccagcgaccacgacggcaacatcgtggagctggccttccagaccacctgccacatcgtgaccaccatcttccagcaccacttccccgccgccatcgacagcttccaggacgccgtgaagtgcctgagcgagttcgcctgcaacgccgccttccccgacaccagcatggaggccatcagactgatcagattctgcggcaagtacgtgagcgagagacccagagtgctgcaggagtacaccagcgacgacatgaacgtggcccccggcgacagagtgtgggtgagaggctggttccccatcctgttcgagctgagctgcatcatcaacagatgcaagctggacgtgagaaccagaggcctgaccgtgatgttcgagatcatgaagagctacggccacaccttcgagaagcactggtggcaggacctgttcagaatcgtgttcagaatcttcgacaacatgaagctgcccgagcagctgagcgagaagagcgagtggatgaccaccacctgcaaccacgccctgtacgccatctgcgacgtgttcacccagttctacgaggccctgaacgaggtgctgctgagcgacgtgttcgcccagctgcagtggtgcgtgaagcaggacaacgagcagctggccagaagcggcaccaactgcctggagaacctggtgatcagcaacggcgagaagttcagccccgaggtgtgggacgagacctgcaactgcatgctggacatcttcaagaccaccatcccccacgtgctgctgacctggagacccgtgggcatggaggaggacagcagcgagaagcacctggacgtggacctggacagacagagcctgagcagcatcgacaagaaccccagcgagagaggccagagccagctgagcaaccccaccgacgacagctggaagggcagaccctacgccaaccagaagctgttcgccagcctgctgatcaagtgcgtggtgcagctggagctgatccagaccatcgacaacatcgtgttctaccccgccaccagcaagaaggaggacgccgagcacatggtggccgcccagcaggacaccctggacgccgacatccacatcgagaccgaggaccagggcatgtacaagtacatgagcagccagcacctgttcaagctgctggactgcctgcaggagagccacagcttcagcaaggccttcaacagcaactacgagcagagaaccgtgctgtggagagccggcttcaagggcaagagcaagcccaacctgctgaagcaggagaccagcagcctggcctgctgcctgagaatcctgttcagaatgtacgtggacgagaacagaagagacagctgggaggagatccagcagagactgctgaccgtgtgcagcgaggccctggcctacttcatcaccgtgaacagcgagagccacagagaggcctggaccagcctgctgctgctgctgctgaccaagaccctgaagatcaacgacgagaagttcaaggcccacgccagcatgtactacccctacctgtgcgagatcatgcagttcgacctgatccccgagctgagagccgtgctgagaaagttcttcctgagaatcggcgtggtgtacaagatctggatccccgaggagcccagccaggtgcccgccgccctgagccccgtgtggtag

SEQ ID NO: 164808 - DNA, 2499 bp, Artificial Sequence
  derived and/or modified sequence
atgcaggagagccagaccaagagcatgttcgtgagcagagccctggagaagatcctggccgacaaggaggtgaagagaccccagcacagccagctgagaagagcctgccaggtggccctggacgagatcaaggccgagatcgagaagcagagactgggcaccgccgccccccccaaggccaacttcatcgaggccgacaagtacttcctgcccttcgagctggcctgccagagcaagagccccagagtggtgagcaccagcctggactgcctgcagaagctgatcgcctacggccacatcaccggcaacgcccccgacagcggcgcccccggcaagagactgatcgacagaatcgtggagaccatctgcagctgcttccagggcccccagaccgacgagggcgtgcagctgcagatcatcaaggccctgctgaccgccgtgaccagcccccacatcgagatccacgagggcaccatcctgcagaccgtgagaacctgctacaacatctacctggccagcaagaacctgatcaaccagaccaccgccaaggccaccctgacccagatgctgaacgtgatcttcaccagaatggagaaccaggtgctgcaggaggccagagagctggagaagcccatccagagcaagccccagagccccgtgatccaggccgccgccgtgagccccaagttcgtgagactgaagcacagccaggcccagagcaagcccaccacccccgagaagaccgacctgaccaacggcgagcacgccagaagcgacagcggcaaggtgagcaccgagaacggcgacgcccccagagagagaggcagcagcctgagcggcaccgacgacggcgcccaggaggtggtgaaggacatcctggaggacgtggtgaccagcgccatcaaggaggccgccgagaagcacggcctgaccgagcccgagagagtgctgggcgagctggagtgccaggagtgcgccatcccccccggcgtggacgagaacagccagaccaacggcatcgccgacgacagacagagcctgagcagcgccgacaacctggagagcgacgcccagggccaccaggtggccgccagattcagccacgtgctgcagaaggacgccttcctggtgttcagaagcctgtgcaagctgagcatgaagcccctgggcgagggcccccccgaccccaagagccacgagctgagaagcaaggtggtgagcctgcagctgctgctgagcgtgctgcagaacgccggccccgtgttcagaacccacgagatgttcatcaacgccatcaagcagtacctgtgcgtggccctgagcaagaacggcgtgagcagcgtgcccgacgtgttcgagctgagcctggccatcttcctgaccctgctgagcaacttcaagatgcacctgaagatgcagatcgaggtgttcttcaaggagatcttcctgaacatcctggagaccagcaccagcagcttcgagcacagatggatggtgatccagaccctgaccagaatctgcgccgacgcccagtgcgtggtggacatctacgtgaactacgactgcgacctgaacgccgccaacatcttcgagagactggtgaacgacctgagcaagatcgcccagggcagaagcggccacgagctgggcatgacccccctgcaggagctgagcctgagaaagaagggcctggagtgcctggtgagcatcctgaagtgcatggtggagtggagcaaggacctgtacgtgaaccccaaccaccagaccagcctgggccaggagagactgaccgaccaggagatcggcgacggcaagggcctggacatggccagaagatgcagcgtgaccagcatggagagcaccgtgagcagcggcacccagaccaccgtgcaggacgaccccgagcagttcgaggtgatcaagcagcagaaggagatcatcgagcacggcatcgagctgttcaacaagaagcccaagagaggcatccagttcctgcaggagcagggcatgctgggcaccagcgtggaggacatcgcccagttcctgcaccaggaggagagactggacagcacccaggtgggcgacttcctgggcgacagcgccagattcaacaaggaggtgatgtacgcctacgtggaccagctggacttctgcgagaaggagttcgtgagcgccctgagaaccttcctggagggcttcagactgcccggcgaggcccagaagatcgacagactgatggagaagttcgccgccagatacatcgagtgcaaccagggccagaccctgttcgccagcgccgacaccgcctacgtgctggcctacagcatcatcatgctgaccaccgacctgcacagcccccaggtgaagaacaagatgaccaaggagcagtacatcaagatgaacagaggcatcaacgacagcaaggacctgcccgaggagtacctgagcagcatctacgaggagatcgagggcaagaagatcgccatcaagaagaactag

SEQ ID NO: 164809 - protein, 1849 aa, Artificial Sequence
  derived and/or modified sequence
MYEGKKTKNMFLTRALEKILADKEVKKAHHSQLRKACEVALEEIKAETEKQSPPHGEAKAGSSTLPPVKSKTNFIEADKYFLPFELACQSKCPRIVSTSLDCLQKLIAYGHLTGNAPDSTTPGKKLIDRIIETICGCFQGPQTDEGVQLQIIKALLTAVTSQHIEIHEGTVLQAVRTCYNIYLASKNLINQTTAKATLTQMLNVIFARMENQALQEAKQMEKERHRQHHHLLQSPVSHHEPESPQLRYLPPQTVDHISQEHEGDLDLHTNDVDKSLQDDTEPENGSDISSAENEQTEADQATAAETLSKNEVLYDGENHDCEEKPQDIVQNIVEEMVNIVVGDMGEGTTINASADGNIGTIEDGSDSENIQANGIPGTPISVAYTPSLPDDRLSVSSNDTQESGNSSGPSPGAKFSHILQKDAFLVFRSLCKLSMKPLSDGPPDPKSHELRSKILSLQLLLSILQNAGPIFRTNEMFINAIKQYLCVALSKNGVSSVPEVFELSLSIFLTLLSNFKTHLKMQIEVFFKEIFLYILETSTSSFDHKWMVIQTLTRICADAQSVVDIYVNYDCDLNAANIFERLVNDLSKIAQGRGSQELGMSNVQELSLRKKGLECLVSILKCMVEWSKDQYVNPNSQTTLGQEKPSEQEMSEIKHPETINRYGSLNSLESTSSSGIGSYSTQMSGTDNPEQFEVLKQQKEIIEQGIDLFNKKPKRGIQYLQEQGMLGTTPEDIAQFLHQEERLDSTQVGEFLGDNDKFNKEVMYAYVDQHDFSGKDFVSALRMFLEGFRLPGEAQKIDRLMEKFAARYLECNQGQTLFASADTAYVLAYSIIMLTTDLHSPQVKNKMTKEQYIKMNRGINDSKDLPEEYLSAIYNEIAGKKISMKETKELTIPTKSSKQNVASEKQRRLLYNLEMEQMAKTAKALMEAVSHVQAPFTSATHLEHVRPMFKLAWTPFLAAFSVGLQDCDDTEVASLCLEGIRCAIRIACIFSIQLERDAYVQALARFTLLTVSSGITEMKQKNIDTIKTLITVAHTDGNYLGNSWHEILKCISQLELAQLIGTGVKPRYISGTVRGREGSLTGTKDQAPDEFVGLGLVGGNVDWKQIASIQESIGETSSQSVVVAVDRIFTGSTRLDGNAIVDFVRWLCAVSMDELLSTTHPRMFSLQKIVEISYYNMGRIRLQWSRIWEVIGDHFNKVGCNPNEDVAIFAVDSLRQLSMKFLEKGELANFRFQKDFLRPFEHIMKRNRSPTIRDMVVRCIAQMVNSQAANIRSGWKNIFSVFHLAASDQDESIVELAFQTTGHIVTLVFEKHFPATIDSFQDAVKCLSEFACNAAFPDTSMEAIRLIRHCAKYVSDRPQAFKEYTSDDMNVAPEDRVWVRGWFPILFELSCIINRCKLDVRTRGLTVMFEIMKTYGHTYEKHWWQDLFRIVFRIFDNMKLPEQQTEKAEWMTTTCNHALYAICDVFTQYLEVLSDVLLDDIFAQLYWCVQQDNEQLARSGTNCLENVVILNGEKFTLEIWDKTCNCTLDIFKTTIPHALLTWRPNSGETAPPPPSPVSEKPLDTISQKSVDIHDSIQPRSVDNRPQAPLVSASAVNEEVSKIKSTAKFPEQKLFAALLIKCVVQLELIQTIDNIVFFPATSKKEDAENLAAAQRDAVDFDVRVDTQDQGMYRFLTSQQLFKLLDCLLESHRFAKAFNSNNEQRTALWKAGFKGKSKPNLLKQETSSLACGLRILFRMYMDESRVSAWEEVQQRLLNVCSEALSYFLTLTSESHREAWTNLLLLFLTKVLKISDNRFKAHASFYYPLLCEIMQFDLIPELRAVLRRFFLRIGVVFQISQPPEQELGINKQ

SEQ ID NO: 164810 - DNA, 5550 bp, Artificial Sequence
  derived and/or modified sequence
atgtatgagggcaagaagaccaaaaacatgtttcttacacgggcactggagaagatcttggccgacaaagaggttaagaaggcccaccatagtcagctccgcaaagcctgtgaagtggctctggaagaaattaaggctgaaacagaaaagcagtctcccccacacggagaagcaaaggctgggagcagcactctgccccccgttaaatccaagaccaacttcattgaggctgacaagtacttcttgccgtttgaactggcatgtcagagtaagtgtccacggatcgtttctacaagtctggactgccttcaaaagcttatcgcctatggacacctcaccggcaacgcgccagattccacgaccccaggtaagaaacttatagaccgcatcattgaaactatttgtgggtgttttcagggccctcagaccgacgagggagttcagcttcagatcattaaagctctgctgaccgccgtaacttcacagcacattgaaatccatgaagggaccgttctgcaggctgtgagaacctgttataacatttatttggcctctaaaaacctgattaatcagactacggcaaaggcgacattaacacagatgctcaacgttatcttcgcccgcatggaaaatcaggcactccaagaggcaaagcagatggaaaaggagcgacatagacagcaccatcacctcctccaatcgcctgtgagtcatcatgaacctgagtcgcctcagctgagatacctgcccccacagacggtggatcacatttctcaggagcatgaaggcgatctggatcttcacaccaacgatgtggataaatctttgcaggatgatacagagccagagaatggcagtgatattagttccgcagagaatgaacagacagaggctgaccaagccacggcagccgaaaccctgagtaaaaatgaagtactgtacgatggcgaaaatcatgactgtgaagagaaaccccaggatatcgtccaaaatattgtggaagaaatggttaatatcgttgtaggagatatgggcgaaggcacaactatcaacgcatcagcagacgggaacattggcacgattgaggacggatccgattctgaaaatatccaggccaacgggatcccaggtacccccatttctgtggcctacaccccaagcctgcctgacgatcgactttctgttagctccaacgacactcaggagtcagggaactcaagcggtccatctcccggcgctaagttctcccacattctccagaaagacgccttcttggtgttccgctcactctgcaagctgtctatgaagcccctctcggacggaccacccgatcccaagtctcacgagctgcggtccaagattttgtcacttcaactgctgctatccatcctccagaatgccggtcctatcttcagaactaacgagatgttcataaacgctataaagcagtacttatgcgtagccctgtctaagaatggggtatcgagcgtgccagaggttttcgagctgtctctgagcatttttcttacgcttctgagcaatttcaagactcatttgaagatgcaaattgaagtcttttttaaggagatatttctatacatcctggaaaccagcaccagctcgttcgaccacaaatggatggttatacaaaccctgacacggatctgcgcagatgcgcaaagtgtcgtggatatttacgtgaactacgattgtgatcttaacgcagcaaacattttcgagaggctggtgaatgacctgtctaaaatcgcccaggggagaggcagtcaagagctgggcatgtccaacgtccaggagctaagccttagaaagaagggtctggaatgcctggtgtccattcttaaatgtatggttgaatggtccaaggaccaatacgtcaacccgaatagccagaccacacttggccaggagaagccatctgagcaggagatgtctgagatcaagcaccccgaaacgattaaccgctatggtagtcttaattcccttgagagcacgagctcttccggcattggatcatattctacacagatgtctggaaccgataatccagagcagtttgaggtgctgaagcagcagaaggagattatcgagcaggggattgaccttttcaacaagaagccaaaacgggggattcagtatctgcaggaacagggtatgctgggaactacccctgaggatatagcccagtttcttcatcaagaggaacggctcgattctacgcaggtcggagagtttctgggcgacaatgataagttcaacaaagaagttatgtatgcttatgtggaccaacacgacttcagcggtaaagacttcgtgagcgccctgaggatgttcctggaaggattccgcctgcccggggaggcccagaagatagacaggctgatggagaaattcgccgcaagatatctggaatgtaaccaggggcagacattgttcgcatcggccgacacagcctatgtactggcgtatagcatcattatgctgactacagatcttcactcacctcaggtgaagaacaaaatgacaaaggagcagtatattaagatgaaccgcggcattaacgatagtaaagatctgcccgaggaatacctgtccgccatctacaatgagatcgctggtaaaaaaatctcaatgaaggagactaaagagttgacaatccccacaaagagttcaaaacagaacgtggcttcggagaaacagcggcgcctgctttataacctcgagatggagcagatggcaaaaactgcgaaggctcttatggaggctgttagccacgtccaggccccatttacctcggccactcacctggaacacgtgcgacccatgttcaagttggcctggactccttttctggctgctttctcagtgggcctgcaagactgcgacgatactgaggttgcctctctctgccttgagggcattcggtgcgctatccggattgcgtgtatttttagcatacagttggagagggacgcttatgtacaggctctggcacggtttacgttgctgacagttagctctggtattactgaaatgaagcagaaaaacattgacacaataaagacgctgataactgtggcccacaccgatgggaattacctaggtaattcttggcacgaaattctgaagtgcatcagtcagctggagctagcgcagttaattggtactggtgttaagcccagatacatctcaggcaccgtccgcggaagagaggggagcctcactggcaccaaagatcaagcacctgatgagtttgtgggattaggactagtggggggcaacgtcgattggaaacagatagcctctattcaggagtccatcggcgagacttcctctcagagcgtggtggtagctgtggatagaatctttacaggcagtacgcgtctggacggaaatgccattgtagatttcgtgagatggctctgtgctgtgagtatggatgagcttctgtcaacgacacacccgagaatgtttagcctgcaaaagattgtcgaaatcagctattacaatatgggaaggatcagactccaatggtcacgcatttgggaggtgatcggtgatcacttcaacaaggttggctgtaatccaaatgaggatgtggcaatctttgccgttgattcactgaggcaactgagtatgaagtttctggagaagggagagttggccaacttccggtttcagaaagatttcctacgccccttcgaacacatcatgaagagaaacaggagtcccactattcgggatatggtagtccggtgcatagcccaaatggttaattctcaagccgccaacattcggtccggttggaaaaatattttctccgtgtttcatctggcggctagcgaccaggacgagtctatcgtagagctcgccttccagacaacaggccacatcgtaactcttgtatttgagaagcattttccagctaccatcgactcgtttcaggacgcggtcaaatgtctcagtgagttcgcgtgcaatgctgcgttcccagacacatctatggaggccatacgactcatccgtcattgcgcaaaatacgtcagtgatcgcccacaggcctttaaggagtatacaagcgatgatatgaacgtggctccagaggatcgggtttgggtcagagggtggtttccaatactgtttgaactcagctgcatcatcaacagatgcaagttggatgtgcggacacgcgggctgactgtaatgtttgaaatcatgaaaacttatggacacacctacgagaagcattggtggcaggatctgttcaggattgtctttcgtatttttgataatatgaagctgccagagcagcagaccgagaaggctgagtggatgaccaccacctgcaaccacgccctgtatgcaatttgcgatgtgtttacccaatatctcgaagtgctgtccgacgtgctgctcgacgatatctttgcccagctttactggtgcgtccagcaagacaatgaacagctcgctaggtccggcactaattgcctggaaaatgtcgtgatcctgaatggcgagaagttcaccctggaaatttgggataaaacttgcaattgtactcttgatatattcaaaactacaatccctcacgcactgttgacctggaggccaaacagtggagaaaccgcgccgccccctccaagcccagtaagtgaaaaacctctggacactatctcacagaagagcgttgacatccacgacagcatccagcctagatccgtagacaacagacctcaggcccccttggtctccgcctcagcagtgaatgaggaggtatcaaagatcaagagcactgctaagttccctgaacagaagttgtttgctgccttgctgatcaagtgcgtcgtgcaacttgagctgatccagactattgataatatagtcttctttccggccaccagcaagaaagaagatgccgagaacctggccgccgctcagcgtgacgctgtcgacttcgatgttagagtggatacccaggaccagggcatgtaccgcttcctcaccagccagcagcttttcaagctcctggactgcctgctggaatcacaccgctttgctaaggcgttcaattccaataatgaacaacgaaccgcgctgtggaaggctggctttaagggcaaaagcaaacctaacctgctgaaacaggaaacaagttccctggcatgcggccttagaattctgttcaggatgtacatggacgagtcaagagttagcgcttgggaggaggtgcagcagcgcctccttaacgtgtgttccgaagcactgagctattttcttactctcaccagcgaaagtcatcgcgaggcatggacgaatcttttgctcttgttccttacgaaagtgttgaagatctcagacaatcgtttcaaagctcacgcatccttttattacccactgctgtgtgaaataatgcagtttgaccttattcctgagctgagggccgtgttgcgaagattctttctgagaataggagtcgtctttcagattagtcaaccacccgaacaagagcttggaatcaacaaacagtag

SEQ ID NO: 164811 - DNA, 7225 bp, Artificial Sequence
  derived and/or modified sequence
gcggtgcctctgagagccgccgccacctcgtccctcagttcccggcagacagccgcccgggccgggctccctcaccgccaccagggccggagggacgagtgagaggggcggccgggacgcgacccccgggccgggagaagcggaggcccgacgggcgcggccctcgaggtacggcttcttgggggcggcgaggacctcgacgcccttcgccgacaccgcggctggtcccgctcgcccgccccttcctgatcctgccgctgccctccacgcctccaatcccccacctccaccccctctcctttctctcttctcttccttcctctcctcctcctcccctccagccgctgggagccgcgggtcggacgagccgccgcctccttctctgcgtccatgtatgaggggaagaagacgaagaacatgttcctgacccgggctctggagaagatattggccgacaaggaagtgaagaaggcgcatcactcccagctgcgcaaagcttgcgaggtggcgttagaggaaataaaagcggaaactgaaaaacagagtcctcctcatggagaagcaaaagctggatcaagcacccttccaccagtgaaatcaaagacaaattttattgaagcagacaagtacttcttgccttttgagttggcatgccagtccaaatgtcctcgcatagttagtacatctctagattgcttacagaaacttattgcttatgggcacttgactggcaatgctccagatagtacaacaccaggcaaaaaattaattgatagaattattgaaacaatatgtggctgctttcagggccctcagacagatgaaggagttcagctgcagataataaaggctttacttactgcagtaacatcacaacacatagaaattcatgaagggactgtactgcaagctgtgagaacatgttacaatatctacttagcaagcaaaaatctcatcaatcagacaacagccaaagctactctcactcagatgctaaatgttatctttgcacgcatggaaaaccaagcattacaggaagcaaaacaaatggaaaaagaaaggcatcggcagcatcatcatctgttacagtctccagtaagccatcacgagcctgaatcacctcaacttagatatttgccacctcagactgttgatcatatatcccaagaacacgaaggggaccttgacctccatacaaatgatgtagataaaagtcttcaggatgacacagagcctgaaaatggatctgatatttccagtgcagaaaatgaacagactgaagctgatcaggcaactgcagctgaaacattatctaaaaatgaagtgttatatgacggagaaaaccatgattgtgaggaaaagccacaagacattgtacagaacattgtagaagaaatggtgaacattgttgttggagatatgggagaagggactactataaatgcaagtgcagatggcaacattggaactatagaggatggtagtgacagtgaaaatattcaagcaaatggaattccaggaacaccaatttctgttgcatatacaccatccttacctgatgatagattgtcagtctcttccaatgatactcaggaatctggaaattcttcaggaccttcacctggtgctaagttttcccacattttacaaaaggatgcctttctagtattcaggtcattgtgtaaactgtcaatgaaaccactgtcagatggaccaccagatccaaagtctcatgaactacgatccaagattctttcattgcagttacttctatccattctgcagaatgcaggacctattttcaggacaaatgagatgtttattaatgctattaagcagtatctttgtgttgcactctcaaaaaatggagtctcatctgttccagaggtttttgagctttctctttctatatttcttactttgttgtcaaatttcaagacacatctgaagatgcaaattgaggtgttctttaaagaaattttcttatacattttggaaacttctaccagctcatttgatcacaaatggatggttattcagacactgacgaggatttgtgcagatgctcagagtgtagtggatatttatgtaaactatgactgtgacttaaatgcagccaatatatttgaaagactagtaaatgatctatcaaaaattgctcaaggaaggggcagtcaagaacttggtatgagtaatgttcaggaattgagcctgaggaaaaaaggtttagaatgcttagtgtcgattttgaagtgtatggttgaatggagtaaggatcagtatgtgaatcccaactcccagacaactcttggtcaggaaaaaccctcagagcaagagatgagtgaaatcaaacaccctgagacaataaacagatacggaagtttaaattccctggagtcaacatcatcatcaggaataggcagctacagtacacagatgtctggcactgataatccagaacaatttgaggtcctaaagcaacaaaaagaaataatagaacaagggatagatttatttaataagaaaccaaagagaggaatacagtacctccaagaacaagggatgcttggcaccacacctgaagatattgcccaattcttacatcaagaggaaagattagactctactcaagtgggtgagttcctgggagataatgataaatttaacaaagaagtcatgtatgcatatgtggaccaacatgacttttcaggaaaagacttcgtttcagcccttcgtatgtttctagaaggatttcgtcttccaggggaagctcagaaaatcgatcgattaatggaaaaatttgctgcaagatacctagaatgcaaccaaggacaaactctctttgctagtgcggatacagcttatgttttggcttattcaattatcatgttgaccacagaccttcacagtccacaggtgaaaaataaaatgacaaaggaacaatacattaagatgaatagaggtatcaatgacagtaaagaccttcctgaagagtatctatcagccatctataatgaaatagctgggaaaaagatatcaatgaaagaaacaaaagaactaacaatccctacaaaatcaagtaaacagaatgtagccagtgaaaaacaaagaagacttctgtataacttagaaatggagcagatggccaagacagctaaagcactcatggaggccgtgagccatgttcaggcaccctttacaagtgcaacacatttggagcatgtgaggcccatgtttaagttggcttggacgccttttctggctgcattcagtgtgggtctacaagattgtgatgatactgaagtagcctctctttgcctggaaggtataagatgtgcaatcagaattgcatgcattttcagcattcagctggagagagatgcatatgtccaggcactagcaagatttaccttactcacagtgagttccggtattactgaaatgaaacagaagaacattgacacaataaaaacacttatcacagtggctcatacagatggaaattatttaggaaattcatggcatgagattctgaagtgcatcagtcagttggagctggcacagcttataggaactggagtgaaacctcgatacatttctggaacagtgcgaggcagagaaggatctcttactggaacaaaagatcaggctcctgatgaatttgtgggtttagggctagttggaggaaatgtggactggaaacagatagcaagtattcaggaatccattggagaaaccagttctcagagtgttgttgttgctgtagatagaatattcacaggatctacaaggctagatggaaatgccattgtggattttgtccgttggctctgtgctgtgtctatggatgaattactttccacgacacacccaagaatgtttagtctacaaaaaatagtagaaatatcatattacaacatgggaagaataagattacagtggtctcgaatttgggaagttattggagatcattttaataaggttgggtgtaatcctaatgaagatgtagctatttttgcagtagactccttgaggcagttgtcaatgaagttcttagagaaaggggagcttgctaacttcagattccagaaggatttcttaagaccttttgaacatataatgaaacggaacaggtctccaacaattcgagatatggttgtacggtgtatagcacagatggttaattctcaagctgctaacattcgatctggatggaagaacattttctctgtatttcatctagctgcatctgatcaagatgaaagcatagtggaacttgcattccaaacaaccgggcacattgtcacccttgtatttgaaaaacactttccagcgaccattgattctttccaggatgcagtgaagtgtttgtctgaatttgcgtgcaatgcagctttcccagacacaagtatggaagcaattcgacttattcgccattgtgcaaaatatgtgtctgatagacctcaggctttcaaggaatacacaagcgatgatatgaacgtagcacctgaagacagggtgtgggtgagaggatggttcccaattctctttgagttatcctgtatcatcaatagatgcaaattagatgtaagaaccaggggtttaacagtaatgtttgaaataatgaaaacatatggccacacttatgagaaacactggtggcaggatttatttagaattgttttcagaatctttgacaatatgaaattgccagaacaacagacagagaaagctgaatggatgacaacaacttgcaatcatgcactttatgcaatctgtgatgtattcactcagtatttagaagtactcagtgatgtacttttggatgacatttttgctcagctctactggtgtgtgcagcaagacaatgagcagttagcgcgatctggtacaaactgtttagagaatgttgttattctgaatggtgaaaaatttaccctagaaatctgggataaaacttgcaactgcacactggatatcttcaaaaccacaatcccacatgcgctgttgacctggcgacccaattctggagaaactgcccccccacctccatctcctgtaagtgaaaagccattggatacaatatcacagaagtctgtagatattcatgattctattcaaccaaggtctgtggataacagaccacaagcaccactggtttctgcgtctgctgttaatgaagaagtcagcaaaattaaatctacagcaaaatttccagaacaaaaattgtttgctgccctgttgattaaatgtgttgtgcagctggaactcatccagactatcgacaacattgtcttcttcccagccacaagtaagaaagaagatgcagaaaacttagctgcagcacagagagatgcggtggactttgatgttcgcgttgatactcaagaccaaggaatgtaccgctttttaacatcacaacaactttttaagctactggactgcttattagagtcacatagatttgcaaaagcgtttaattccaacaacgaacagaggactgccctgtggaaagcaggattcaaaggcaaatccaagcccaaccttctgaagcaggagaccagcagcctggcctgtgggctgcgcattctcttccggatgtacatggatgagagccgcgttagtgcctgggaggaggtccagcagaggcttttgaatgtctgcagtgaagcactaagttacttcctcactctaacatcagaaagtcatcgagaagcctggactaacttactgcttttgtttctaactaaagttctaaagataagtgataataggtttaaagctcatgcatcattctactaccctctcttatgtgaaattatgcaatttgacttgattcctgaacttcgtgctgttcttagaagattttttctgcgaatcggagtagtttttcagatatcacaaccacctgaacaggaacttggaataaacaagcaatgatgggaacttaatatttttgttggcatttacatccctctgctctttaaaaggacgctggagctgaggtttcctacctgaaaaatgatttctctggattgcagtgtctgagttactggtaaagatgcttagaagtcttactcaaacttgcaacactccagtcccttttagtgctggtggattttgtgtgttatattggcctcatgttgagcagaaagcctgtttaaacagtgtcagctcatgctcacgggtccttccctgtcttccacggcaggaaaagccccacgtttttggcaggtgtggaagtgaaacttacccaaagaactatagatgtaaagattgaacttctacaagaagtacaactcaggagagctgtattttgaaggataaaatgtttataattggggagtggggagagaagaagaaattattgttcatggtaaaagatatttagcaactatggtattcttattctgaagatttttgcacactcaggctatctgagatactggtaatcatcctgtgaaaaatgtacagagatgcaggtctgtaatataaaaatcttaaaacattatatagttcttcctgcactgttttctttattttcttattcatttgctaaatacccataatattttgtcaaatgcactaaacatttgggtggaactttcttttttattttatagggatttttagttttgccctttttggtaggtggtgattttgaggctgtaacatgcccagaagctgttgtggccgacacttcaacaatagggaaaaaaaggtagaaaatatccctactgacagtaactacctgtcacatatttctcttaggacttttaaagatgagccattaaaatagaatgatcctttatggaccaaaacttgaatcactgcaaaatgaatccagattgctgtcattttcttttcttttgggtggtggggcttgatgtagattttactctatgtacagaatttaacgttgaatatattaaaataacaaatctggcatggtttgcggaggttagatttactggaaatgtattcatactgtgaattgtgctctgatggttaaaagacaagattgtcaagcattccgtattaacagtggatgtagaaaattttttcagatggacaaaatgtatatggtacagatgtaaagttttctatgtaaaaaattctgtacaactttctgtacaatattgattcccatctggcatattctaatcaggttataggtcaataaagtttttgaattatttcatcagtgcaatcaaaacctgtataa

SEQ ID NO: 164812 - DNA, 5550 bp, Artificial Sequence
  derived and/or modified sequence
atgtatgagggcaagaagaccaagaacatgttcctgacccgggccctggagaagatcctggccgacaaggaggtgaagaaggcccaccacagccagctgaggaaggcctgtgaggtggccctggaggagatcaaggccgagacagagaagcagagcccccctcatggagaggccaaggccggcagcagcaccctgccccctgtgaagagcaagaccaacttcattgaagctgacaagtacttcctgccctttgagctggcctgccagagcaaatgtcccagaattgtgtccaccagcctggactgcctgcagaagctgattgcctacggccacctgactggaaatgccccagacagcaccacccctgggaagaagctgattgaccgcatcatcgagaccatctgtggctgcttccagggcccccagacagatgagggcgtgcagctgcagatcatcaaggccctgctgacagctgtgaccagccagcacatcgagatccacgagggcaccgtgctgcaggccgtgaggacctgctacaacatctacctggccagcaagaacctgatcaaccagaccacagccaaggccaccctgacccagatgctgaatgtcatctttgccaggatggagaaccaggccctgcaggaggccaagcagatggagaaggagcggcaccggcagcaccaccacctgctgcagagccctgtgagccaccacgagcctgagagcccccagctgcgctacctgcccccccagacagtggaccacatcagccaggagcatgaaggagacctggacctgcacaccaatgatgtggacaagagcctgcaggatgacacagagccagaaaatggaagtgacatcagcagcgcagaaaatgagcagacagaggccgaccaggccacagctgctgagaccctgagcaagaatgaggtgctgtatgatggagaaaatcatgactgtgaggagaagccccaggacatcgtgcagaacatcgtggaggagatggtgaacatcgtggtgggggacatgggagagggcaccaccatcaatgccagcgcagatggcaacatcggcaccattgaagatggcagtgacagcgagaacatccaggccaacggcatccctggcacccccatctctgtggcctacacccccagcctgcctgatgaccggctgtctgtgagcagcaatgacacccaggagagcggcaacagcagcggccccagccctggggccaagttcagccacatcctgcagaaggatgccttcctggtgttccgcagcctgtgcaagctgtccatgaagcccctgagtgatggccccccagaccccaagagccatgagctgcggagcaagatcctgagcctgcagctgctgctgagcatcctgcagaatgccggccccatcttccgcaccaatgagatgttcatcaatgccatcaagcagtacctgtgtgtggccctgagcaagaatggagtgtcctctgtgcctgaggtgtttgagctgagcctgagcatcttcctgaccctgctgagcaacttcaagacccacctgaagatgcagatcgaggtgttcttcaaggagatcttcctgtacatcctggagaccagcaccagcagctttgaccacaagtggatggtgatccagaccctgacccgcatctgtgctgatgcccagagcgtggtggacatctacgtgaactatgactgtgacctgaatgctgccaacatctttgagcggctggtgaatgacctgagcaagatcgcccagggccggggcagccaggagctgggcatgagcaatgtgcaggagctgagcctgaggaagaagggcctggagtgcctggtgtccatcctgaagtgcatggtggagtggagcaaggaccagtatgtgaaccccaacagccagaccaccctgggccaggagaagcccagcgagcaggagatgtctgagatcaagcaccctgagaccatcaacagatatggcagcctgaacagcctggagagcaccagcagcagcggcatcggcagctacagcacccagatgagcggcacagacaaccctgagcagtttgaggtgctgaagcagcagaaggagatcatcgagcagggcatcgacctcttcaacaagaagcccaagaggggcatccagtacctgcaggagcagggcatgctgggcaccaccccagaagatattgcccagttcctgcaccaggaggagcggctggacagcacccaggtgggggagttcctgggggacaatgacaagttcaacaaggaggtgatgtatgcctacgtggaccagcacgacttcagcggcaaggactttgtgtctgccctgaggatgttcctggagggcttccggctgcctggagaggcccagaagattgaccggctgatggagaagtttgctgcccgctacctggagtgcaaccagggccagaccctgtttgccagcgctgacacagcctacgtgctggcctacagcatcatcatgctgaccacagacctgcacagcccccaggtgaagaacaagatgaccaaggagcagtacatcaagatgaacagaggcatcaatgacagcaaggacctgcctgaggagtacctgagcgccatctacaatgaaattgctgggaagaagatctccatgaaggagaccaaggagctgaccatccccaccaagagcagcaagcagaatgtggccagcgagaagcagaggcggctgctgtacaacctggagatggagcagatggccaagacagccaaggccctgatggaggccgtgagccacgtgcaggcccccttcaccagcgccacccacctggagcacgtgcggcccatgttcaagctggcctggacccccttcctggccgccttctctgtgggcctgcaggactgtgatgacacagaggtggccagcctgtgcctggagggcatccgctgtgccatccgcatcgcctgcatcttcagcatccagctggagagagatgcctacgtgcaggccctggcccgcttcaccctgctgactgtgagcagcggcatcacagagatgaagcagaagaacatcgacaccatcaagaccctcatcaccgtggcccacacagatggcaactacctgggcaacagctggcatgagatcctgaagtgcatcagccagctggagctggcccagctgattggcaccggggtgaagccccgctacatcagcggcaccgtgcggggccgggagggcagcctgaccggcaccaaggaccaggccccagatgaatttgtgggcctgggcctggtgggcggcaatgtggactggaagcagatcgccagcatccaggagagcattggagagaccagcagccagagcgtggtggtggccgtggaccgcatcttcaccggcagcacccggctggatggaaatgccatcgtggactttgtgcgctggctgtgtgctgtgtccatggatgagctgctgagcaccacccaccccaggatgttcagcctgcagaagatcgtggagatctcctactacaacatgggccgcatccggctgcagtggagccgcatctgggaggtgattggagaccacttcaacaaggtgggctgcaaccccaatgaagatgtggccatctttgctgtggacagcctgcggcagctgtccatgaagttcctggagaagggggagctggccaacttccgcttccagaaggacttcctgcggccctttgagcacatcatgaagaggaacagaagccccaccatccgggacatggtggtgcgctgcatcgcccagatggtgaacagccaggccgccaacatccgcagcggctggaagaacatcttcagcgtcttccacctggccgccagtgaccaggatgagagcatcgtggagctggccttccagaccaccggccacatcgtgaccctggtgtttgagaagcacttccctgccaccatcgacagcttccaggatgctgtgaagtgcctgtctgaatttgcctgcaatgctgccttcccagacacctccatggaggccatccgcctcatccgccactgtgccaagtatgtgtctgaccggccccaggccttcaaggagtacaccagtgatgacatgaatgtggcccctgaggacagagtgtgggtgcggggctggttccccatcctgtttgagctgagctgcatcatcaaccgctgcaagctggatgtgaggacccggggcctgactgtgatgtttgagatcatgaagacctacggccacacctatgagaagcactggtggcaggacctcttccgcatcgtgttccgcatctttgacaacatgaagctgcctgagcagcagacagagaaggccgagtggatgaccaccacctgcaaccacgccctgtatgccatctgtgatgtgttcacccagtacctggaggtgctgagtgatgtgctgctggatgacatctttgcccagctgtactggtgtgtgcagcaggacaatgagcagctggcccggagcggcaccaactgcctggagaatgtggtgatcctgaatggagagaagttcaccctggagatctgggacaagacctgcaactgcaccctggacatcttcaagaccaccatcccccacgccctgctgacctggaggcccaacagcggggagacagcccctcctccacccagccctgtgtctgagaagcccctggacaccatcagccagaagtctgtggacatccatgacagcatccagcccaggtctgtggacaaccggccccaggcccccctggtgtctgccagcgctgtgaatgaggaggtgtccaagatcaagagcacagccaagtttcctgagcagaagctgtttgctgccctgctgatcaagtgtgtggtgcagctggagctgatccagaccatcgacaacatcgtgttcttccctgccaccagcaagaaggaggatgctgagaacctggccgccgcccagagagatgctgtggactttgatgtgcgggtggacacccaggaccagggcatgtaccgcttcctgaccagccagcagctgttcaagctgctggactgcctgctggagagccacagatttgccaaggccttcaacagcaacaatgagcagaggacagccctgtggaaggccggcttcaagggcaagagcaagcccaacctgctgaagcaggagaccagcagcctggcctgtggcctgcgcatcctcttcaggatgtacatggatgagagccgggtgtctgcctgggaggaggtgcagcagaggctgctgaatgtgtgcagcgaggccctgagctacttcctgaccctgaccagcgagagccaccgggaggcctggaccaacctgctgctgctcttcctgaccaaggtgctgaagatcagtgacaaccgcttcaaggcccacgccagcttctactaccccctgctgtgtgagatcatgcagtttgacctgatccctgagctgcgggctgtgctgcggcgcttcttcctgcgcatcggcgtggtgttccagatcagccagcccccagagcaggagctgggcatcaacaagcagtag

SEQ ID NO: 164813 - DNA, 5550 bp, Artificial Sequence
  derived and/or modified sequence
atgtacgagggcaagaagaccaagaacatgttcctgacccgggccctcgagaagatcttggccgacaaggaagtgaaaaaggcgcaccactcacaactgagaaaggcctgtgaggtggccctggaagagataaaggctgaaaccgagaaacaatcccctccgcatggagaggccaaagccgggtcctcaacgttacctcccgtgaagtcgaagaccaacttcatcgaggcagataagtactttctccccttcgagttggcctgtcagtctaaatgtccccgtatcgtgtccacatctctagactgcctccagaagctgatcgcctacgggcacctgaccggaaatgcacccgattccactactccaggcaagaaactgattgaccggattatcgagacaatatgcggctgttttcagggaccgcagactgacgaaggagtgcagctccaaataatcaaggctctccttacggcagtaaccagccagcatattgaaatccatgaaggcactgtgctgcaggccgtaagaacttgttataacatttacttggccagtaaaaacctgatcaaccaaactactgctaaagccactctcacacaaatgctgaatgttatttttgccagaatggaaaatcaagccctgcaggaggccaaacaaatggaaaaggaacggcaccgccaacaccatcatctcctccagtcacctgtcagccaccatgaacctgagtccccacagttgcggtatttaccacctcaaactgttgatcatattagccaggagcatgaaggggatcttgatttgcatacgaatgacgtggacaagtcattacaggatgataccgagcccgagaacgggtcagacatctcttcagcagagaacgagcagacagaagccgaccaggcaaccgctgccgaaactttgtccaagaacgaggtgctctatgatggggagaaccatgattgtgaagaaaaaccgcaggatatcgtgcagaatattgtggaagagatggttaatattgttgtgggtgatatgggagagggtactactataaacgcctctgccgacgggaatatcgggacaattgaggacggaagcgatagcgaaaatattcaggctaatggaattcccggcactcctattagtgtcgcatacaccccatccctgcccgatgatagactgtccgtctcatctaacgacacacaagagtccggaaattcatccggcccatccccgggcgcgaagttttctcacatccttcagaaggatgcgtttttggtttttcgatcgctctgcaaactctcaatgaaaccactgagcgacgggcccccggatcccaaaagccatgaactgcgcagcaagatactctcactgcagcttttgctttccatactccagaatgcaggtcccatttttaggaccaatgagatgtttataaacgcaataaaacagtacctgtgcgttgccctaagcaaaaacggagtctcatctgtccccgaagtgtttgaattgagcttaagtatttttctcaccttactgtctaactttaaaactcacttgaaaatgcagattgaggtgttttttaaagaaattttcctgtatatcctggagaccagcactagctcatttgaccataagtggatggtgatccagactcttactcggatatgtgccgatgctcagagcgttgtggatatttacgtgaattatgattgcgatttgaacgccgcaaacatttttgagaggctagtgaatgacctgtccaaaatcgctcagggccgtgggtcacaggagctcggcatgtctaatgttcaagaactgagcctgcggaaaaagggactcgagtgtcttgtttctatcctgaaatgcatggtggagtggtcaaaggatcagtatgtaaaccccaacagccagacaacactgggccaggaaaagccctccgaacaggagatgtccgagatcaagcatcccgagaccataaatcgttacggatctcttaactcgctggaatccaccagcagttccggtattgggtcttatagcactcagatgtctggaacagataatccggagcagttcgaggtgttaaaacaacagaaggaaattattgagcaaggcatcgacctgttcaataaaaagccaaagagaggcattcagtacttgcaggaacaaggtatgctgggcacaaccccagaggacatcgcgcagttcctgcaccaggaagagaggcttgactccacccaagtcggggagttcctgggcgataatgacaagttcaataaggaagtcatgtacgcatacgtggaccaacatgattttagtgggaaggattttgtgtccgctctgcggatgtttcttgaaggatttcgactgccaggcgaggcccagaagattgacaggctgatggaaaaatttgccgcgcgttacttggagtgcaaccagggccagactctcttcgcctcagctgacacagcgtatgtcctggcctactcaataattatgctcacaacagacctccacagcccacaggtgaagaataaaatgacaaaagagcagtatatcaagatgaatcgcggaattaacgatagcaaagatctgcctgaggagtatctgtccgctatttacaacgagatcgctggcaagaaaattagcatgaaggaaactaaggaattgaccatccctactaaaagctctaagcagaacgttgcttccgagaaacagcgaagactcctctataacttggagatggagcagatggctaagacggccaaggccctgatggaagccgtcagccacgttcaggctccctttacctccgccacccatctggaacacgtacgcccaatgttcaagctagcctggactccattccttgcagcatttagcgtgggattacaggattgcgacgacaccgaggttgcatcattatgtcttgagggtatcagatgtgctattagaatcgcttgtattttcagtatccagcttgaaagggacgcctatgtgcaggcgttggccagattcacacttctaacagtgtccagtgggatcactgagatgaagcaaaagaacatcgatactataaagacgctgatcacagtggctcacaccgatggcaactatctgggaaactcatggcatgaaatcctcaagtgcatcagccagctggaactggctcaattgatcggtaccggtgttaaaccaaggtacatctcaggcactgtcagaggcagggaaggcagcctcacaggcactaaagaccaagccccagacgaattcgtcggtctggggcttgtcggggggaacgttgattggaaacagatcgcctccattcaggagtcgattggagagacgagctcccaatcagtcgtggtcgcagttgaccggatcttcactggctctacccgactggatggcaacgctatagtggatttcgtacgctggctgtgtgctgttagtatggacgagctgctgtctaccacccaccctcggatgttcagcctgcagaagattgttgagatctcatactataacatggggcgtatccgtttgcagtggtctcgcatctgggaggttattggcgatcattttaacaaggtgggctgtaacccaaacgaggacgtcgcgatcttcgctgtggactctcttcgacaactgtccatgaaatttctggagaaaggcgagctggcaaacttccggtttcagaaagactttttgaggccttttgaacatataatgaaacggaatcggtcaccaacaatccgtgatatggttgttcgctgcattgcccaaatggtaaactcgcaggccgccaatattcgctcaggatggaagaacatcttctccgttttccatttggcagcttcagatcaagacgagagcatcgtggagttggcatttcagacaactggtcatatcgtgacactcgtattcgagaagcacttcccagccacgatcgactccttccaggacgcagtaaaatgcctctctgaattcgcctgcaatgccgcatttccagatacgtcgatggaggcgatcaggctgatcaggcactgtgccaagtacgtgtcagacagacctcaggctttcaaggaatatacctctgatgatatgaacgtggcccccgaggacagagtctgggtcagaggatggttcccaatcttattcgaactgagctgcattatcaatagatgcaaacttgatgtccgcaccagagggctcaccgtgatgttcgagattatgaaaacctacggacatacctacgaaaagcattggtggcaggacttgtttcgaatcgtctttagaatttttgataacatgaagctgccagagcagcagaccgagaaagctgagtggatgaccaccacgtgtaatcatgctctatacgccatttgcgatgtgttcacgcagtacttggaagtactctcagatgttctacttgacgacatcttcgcccagttgtactggtgcgtgcagcaggacaacgagcagctggcccggtctggcactaattgtttggagaacgtggtgattcttaatggcgagaaatttacactcgagatatgggataaaacatgcaactgcacattggacattttcaaaaccactattcctcacgctctccttacctggaggccgaactccggagagacagctccaccccccccaagccctgtcagcgaaaagccgctggacactatctctcagaagagcgttgacattcatgattctatccagccccggtccgtcgacaatcgccctcaggctcccctggtatcagccagcgctgtcaatgaggaagtttctaagatcaaatcgaccgcaaaattcccagaacagaaactgtttgccgcgctgctcattaaatgtgtagttcagctcgaacttattcagaccattgataacattgtgtttttccccgcgacatcaaaaaaggaggacgccgaaaatctggccgctgctcaacgcgatgctgttgattttgatgtgagggtggacacacaggaccaaggcatgtatcgcttcctgacgtcccagcaattgttcaagttactcgattgcctgctggagagccataggtttgcgaaagccttcaactctaataacgaacagagaacggcattgtggaaggctggtttcaagggtaaatccaaaccaaatctcctcaagcaggagactagctctctggcatgcggcctgcgaattttgtttagaatgtacatggacgaaagtcgggtgtccgcctgggaagaagtgcagcaacgacttctcaatgtgtgctccgaagccctcagctactttttaactctgacctcagaaagccaccgggaggcatggacaaacttgctcctcttgttcctcacaaaagttctgaaaatttccgataaccgcttcaaggcccacgcgagtttctattacccgctcctttgtgaaatcatgcagttcgatctcatccccgagctgcgcgctgtgctgcgtcgctttttcctgcgaattggtgttgtctttcagatcagccagcccccggaacaagaactcgggatcaacaagcagtag

SEQ ID NO: 164814 - DNA, 5550 bp, Artificial Sequence
  derived and/or modified sequence
atgtatgagggcaaaaagacaaagaacatgtttctgactcgggctttggaaaagatcttagccgataaagaagtgaaaaaggcccaccacagccaactccggaaggcctgcgaggtagccctcgaggagataaaagccgagaccgaaaaacagtcacccccacatggagaggcgaaggcaggcagttctaccctacccccagtgaagtccaagacgaactttatcgaggcggataaatatttccttccatttgagcttgcctgccaatcgaagtgccctaggattgtgtccacctctttggactgcctccagaaactaatcgcctacggccacctgactggcaacgcaccagatagcacaacccccggaaaaaagctgattgaccggataatcgagacgatttgcggttgcttccagggcccacagactgacgagggggtccagttgcagattattaaagctctgctgaccgctgttacatcacagcatatcgagatccatgaaggtaccgttctccaagcagtccgcacatgctacaacatttatctggctagcaaaaacctgatcaatcagacgaccgctaaggccaccctcacacagatgctcaatgtcatattcgcgaggatggagaaccaggctttgcaggaggccaaacaaatggaaaaggaacggcataggcaacaccatcacctgctacagagcccagtgtctcatcatgaacccgagagcccccagctgaggtacctccctcctcagaccgtggaccatatttcccaggagcacgagggcgatttggatctccacaccaatgatgtggacaagagtctacaggatgataccgagccggagaatggatccgacatctcatccgcagagaacgaacagacggaggcagatcaagcaaccgctgccgaaaccctgtccaaaaatgaggtgctatacgatggggagaaccatgactgtgaagaaaaaccccaggacatcgtccagaacatagtggaggaaatggtgaacatagtagtgggggacatgggcgaaggcaccactatcaatgccagcgctgatggcaacatcggtaccattgaggacgggtcagactcggagaacatacaggcaaatggcatccctggcacacctatttctgtggcgtacactccaagcctgcccgacgaccggctgtctgtcagcagcaatgatacccaggagtctggaaatagctctggaccatctccaggggctaaattttcacacatcctccagaaagacgcctttctggttttccggtctctgtgcaagttgtcgatgaagccactgtctgacggtccaccagatcctaagtcccatgagctccgttcaaagatcctgtccctacagctgctactgtctattctccagaacgccggtcccatttttcggacaaatgagatgttcatcaatgcaatcaaacaatatctctgtgtcgcactcagcaagaatggcgtctcttccgtcccagaggtcttcgagctgagcttgtctatttttctcaccctattgtctaactttaagacacatctgaagatgcaaatcgaggtctttttcaaagaaatatttttgtatattctggaaacgagcaccagctcattcgaccacaagtggatggtgatccagacgctcactcggatttgtgccgacgcccagtctgtcgttgacatttatgtgaattatgactgtgacctgaatgctgcaaatattttcgaaagactcgttaacgatctctcaaagatcgcgcagggtagaggaagtcaggagctgggcatgtctaacgtacaagagctgtctctgcggaaaaagggcctcgagtgtctcgtctcaattctgaagtgcatggtggaatggtccaaagatcagtacgttaaccccaactctcagacaactctggggcaggagaagccttccgagcaagagatgtccgaaatcaagcatccagaaacaatcaacaggtacgggtccttgaatagtttggaaagcacatctagctctggtattggctcatacagcacccaaatgagcggcacagataatcccgaacagttcgaagttctcaagcaacagaaggagattatcgagcaggggattgatctgttcaacaagaagcctaagcgcggaatccagtatttgcaggaacagggaatgctgggaacaacccccgaggacatcgctcagttcctccaccaggaagagcgcctggactctacccaggtcggagaattccttggagacaacgacaagttcaacaaggaagtcatgtatgcctacgtcgatcagcacgacttttcaggcaaggatttcgtttccgccttgagaatgttcttggagggctttagactccccggtgaagcccagaaaatcgaccgcctcatggagaagttcgccgctagatacctggaatgtaaccagggtcagaccctgtttgcctcggctgatacggcctatgtactggcctatagcatcataatgctcactaccgacctgcacagcccccaggtgaaaaacaaaatgacaaaggagcagtatattaaaatgaatcggggtattaatgactccaaagacctgccagaagagtacctctccgctatatataacgaaatagcagggaaaaaaatctctatgaaggagacaaaggagcttacaattcccactaaatcatccaaacagaacgtggcctctgaaaagcaaaggcgcctcctatataatctggaaatggagcaaatggcaaagactgccaaggccctgatggaagctgtgtcacacgtgcaggctccctttacgagtgccacccacctggaacatgtccggcctatgtttaaactcgcctggacaccattcctcgcagctttttctgttggcctccaggactgcgacgataccgaggtcgcctccttgtgccttgagggaatcagatgtgctattcgcattgcctgcatattcagcattcaactggaacgcgacgcctacgtgcaagccttggcgagattcactctcttgacagtgagtagtgggatcaccgagatgaaacagaagaacatcgataccattaagacattgatcaccgtcgcccatactgacggcaactacctaggaaattcatggcacgaaatccttaaatgcatatctcaattagaactagcccaactgattggaaccggagtaaaaccgagatacatttcaggcacagttagaggtcgtgagggtagtttgaccggtacaaaggatcaggcccctgatgagtttgtcggtctgggactggtgggaggtaacgttgattggaagcaaatcgccagtatccaggaatctataggggagacctcctcacagtccgtcgtggtggccgttgataggattttcaccggctctacgcggctggacggcaacgccatcgtcgactttgtgaggtggctatgtgctgtgtctatggatgaactactttctactacacatcctcggatgtttagcctgcagaagatagtggaaattagttactataatatgggacgcatcaggctgcaatggtctagaatttgggaagtcatcggcgaccattttaacaaagtcggatgcaatccgaatgaagatgtggccatattcgctgtagattccctgaggcagctttccatgaaattcctcgagaaaggagagctcgcaaacttcaggttccaaaaagacttcctgcgcccttttgagcatatcatgaagcgcaaccgctcacctactatcagggatatggtggtccggtgtatcgctcaaatggtcaattcgcaggccgcaaacattcggagcgggtggaagaacatttttagcgtattccacttggccgcttcagaccaggatgaatccatcgtggagctcgctttccagacaaccggtcacatagttaccctcgtctttgagaaacatttcccagctacgatcgattcctttcaggacgccgtgaaatgcctgtccgaattcgcctgtaacgcagccttcccagacacttcaatggaggccatacgccttattcgacattgtgcgaaatacgtttctgatcgcccacaggcctttaaggagtatacctccgacgatatgaatgttgcccctgaggatcgggtgtgggtacgtggctggtttcccatactcttcgagttaagctgcattatcaataggtgcaagttagacgtgcgcaccagaggactgactgtcatgtttgaaattatgaagacatacgggcacacatatgaaaagcactggtggcaggatctatttcggattgtgtttcgaatatttgacaatatgaaactcccagagcaacagacagaaaaggctgagtggatgaccactacttgcaaccacgctctgtatgccatttgtgatgtgttcacgcaatatcttgaagtgctctccgacgttctcttagatgacatattcgcccagttgtactggtgtgtgcagcaggacaatgaacagctcgcaaggtccgggaccaactgcttggaaaatgtggttatcctcaatggtgagaaatttacattggaaatctgggacaaaacctgtaactgcaccctcgatatctttaaaacaacaattccacacgcccttctgacttggagaccaaactcaggggagaccgcaccccctcccccttcacctgtgtccgaaaagccgctggatacgattagccagaaaagcgtcgatattcacgactctatccagcccaggtcagttgacaatcggccacaagcacctctcgtctctgccagtgctgtgaacgaggaagtctctaagataaaatctacagctaaattccctgagcaaaaactcttcgccgctcttctgataaagtgcgtggtccagctggagttaatccagactattgacaacatcgtgttttttcctgccactagtaagaaggaagacgccgaaaatctggccgctgcccagagggacgcagtggattttgatgtgcgtgtggatacccaggaccagggaatgtacaggttcttaaccagtcagcaactgtttaagttgctggattgtttactcgaatcacacaggtttgcgaaggcgtttaactccaataatgaacagcgcaccgcactttggaaagctgggtttaagggtaagtcaaaaccgaacttgctgaagcaggaaacatcttctttggcctgtggattgcggatcttattcaggatgtatatggacgagagccgggtgtcagcttgggaagaggttcagcagcggctgcttaacgtttgttctgaggccttgagttactttttaaccctcacatcagaatcccatcgggaggcttggacaaatctgctgctcctctttctgaccaaggtcttgaagatttccgacaataggttcaaggctcatgctagcttctactaccctctgttgtgtgagattatgcagttcgacctgattccggaactccgggcagtgcttcgacgcttcttcttgcgcatcggggtggtctttcagattagtcagcctccggagcaagagctcggaatcaataaacagtag

SEQ ID NO: 164815 - DNA, 5550 bp, Artificial Sequence
  derived and/or modified sequence
atgtacgagggcaagaagaccaagaacatgttcctgaccagagccctggagaagatcctggccgacaaggaggtgaagaaggcccaccacagccagctgagaaaggcctgcgaggtggccctggaggagatcaaggccgagaccgagaagcagagccccccccacggcgaggccaaggccggcagcagcaccctgccccccgtgaagagcaagaccaacttcatcgaggccgacaagtacttcctgcccttcgagctggcctgccagagcaagtgccccagaatcgtgagcaccagcctggactgcctgcagaagctgatcgcctacggccacctgaccggcaacgcccccgacagcaccacccccggcaagaagctgatcgacagaatcatcgagaccatctgcggctgcttccagggcccccagaccgacgagggcgtgcagctgcagatcatcaaggccctgctgaccgccgtgaccagccagcacatcgagatccacgagggcaccgtgctgcaggccgtgagaacctgctacaacatctacctggccagcaagaacctgatcaaccagaccaccgccaaggccaccctgacccagatgctgaacgtgatcttcgccagaatggagaaccaggccctgcaggaggccaagcagatggagaaggagagacacagacagcaccaccacctgctgcagagccccgtgagccaccacgagcccgagagcccccagctgagatacctgcccccccagaccgtggaccacatcagccaggagcacgagggcgacctggacctgcacaccaacgacgtggacaagagcctgcaggacgacaccgagcccgagaacggcagcgacatcagcagcgccgagaacgagcagaccgaggccgaccaggccaccgccgccgagaccctgagcaagaacgaggtgctgtacgacggcgagaaccacgactgcgaggagaagccccaggacatcgtgcagaacatcgtggaggagatggtgaacatcgtggtgggcgacatgggcgagggcaccaccatcaacgccagcgccgacggcaacatcggcaccatcgaggacggcagcgacagcgagaacatccaggccaacggcatccccggcacccccatcagcgtggcctacacccccagcctgcccgacgacagactgagcgtgagcagcaacgacacccaggagagcggcaacagcagcggccccagccccggcgccaagttcagccacatcctgcagaaggacgccttcctggtgttcagaagcctgtgcaagctgagcatgaagcccctgagcgacggcccccccgaccccaagagccacgagctgagaagcaagatcctgagcctgcagctgctgctgagcatcctgcagaacgccggccccatcttcagaaccaacgagatgttcatcaacgccatcaagcagtacctgtgcgtggccctgagcaagaacggcgtgagcagcgtgcccgaggtgttcgagctgagcctgagcatcttcctgaccctgctgagcaacttcaagacccacctgaagatgcagatcgaggtgttcttcaaggagatcttcctgtacatcctggagaccagcaccagcagcttcgaccacaagtggatggtgatccagaccctgaccagaatctgcgccgacgcccagagcgtggtggacatctacgtgaactacgactgcgacctgaacgccgccaacatcttcgagagactggtgaacgacctgagcaagatcgcccagggcagaggcagccaggagctgggcatgagcaacgtgcaggagctgagcctgagaaagaagggcctggagtgcctggtgagcatcctgaagtgcatggtggagtggagcaaggaccagtacgtgaaccccaacagccagaccaccctgggccaggagaagcccagcgagcaggagatgagcgagatcaagcaccccgagaccatcaacagatacggcagcctgaacagcctggagagcaccagcagcagcggcatcggcagctacagcacccagatgagcggcaccgacaaccccgagcagttcgaggtgctgaagcagcagaaggagatcatcgagcagggcatcgacctgttcaacaagaagcccaagagaggcatccagtacctgcaggagcagggcatgctgggcaccacccccgaggacatcgcccagttcctgcaccaggaggagagactggacagcacccaggtgggcgagttcctgggcgacaacgacaagttcaacaaggaggtgatgtacgcctacgtggaccagcacgacttcagcggcaaggacttcgtgagcgccctgagaatgttcctggagggcttcagactgcccggcgaggcccagaagatcgacagactgatggagaagttcgccgccagatacctggagtgcaaccagggccagaccctgttcgccagcgccgacaccgcctacgtgctggcctacagcatcatcatgctgaccaccgacctgcacagcccccaggtgaagaacaagatgaccaaggagcagtacatcaagatgaacagaggcatcaacgacagcaaggacctgcccgaggagtacctgagcgccatctacaacgagatcgccggcaagaagatcagcatgaaggagaccaaggagctgaccatccccaccaagagcagcaagcagaacgtggccagcgagaagcagagaagactgctgtacaacctggagatggagcagatggccaagaccgccaaggccctgatggaggccgtgagccacgtgcaggcccccttcaccagcgccacccacctggagcacgtgagacccatgttcaagctggcctggacccccttcctggccgccttcagcgtgggcctgcaggactgcgacgacaccgaggtggccagcctgtgcctggagggcatcagatgcgccatcagaatcgcctgcatcttcagcatccagctggagagagacgcctacgtgcaggccctggccagattcaccctgctgaccgtgagcagcggcatcaccgagatgaagcagaagaacatcgacaccatcaagaccctgatcaccgtggcccacaccgacggcaactacctgggcaacagctggcacgagatcctgaagtgcatcagccagctggagctggcccagctgatcggcaccggcgtgaagcccagatacatcagcggcaccgtgagaggcagagagggcagcctgaccggcaccaaggaccaggcccccgacgagttcgtgggcctgggcctggtgggcggcaacgtggactggaagcagatcgccagcatccaggagagcatcggcgagaccagcagccagagcgtggtggtggccgtggacagaatcttcaccggcagcaccagactggacggcaacgccatcgtggacttcgtgagatggctgtgcgccgtgagcatggacgagctgctgagcaccacccaccccagaatgttcagcctgcagaagatcgtggagatcagctactacaacatgggcagaatcagactgcagtggagcagaatctgggaggtgatcggcgaccacttcaacaaggtgggctgcaaccccaacgaggacgtggccatcttcgccgtggacagcctgagacagctgagcatgaagttcctggagaagggcgagctggccaacttcagattccagaaggacttcctgagacccttcgagcacatcatgaagagaaacagaagccccaccatcagagacatggtggtgagatgcatcgcccagatggtgaacagccaggccgccaacatcagaagcggctggaagaacatcttcagcgtgttccacctggccgccagcgaccaggacgagagcatcgtggagctggccttccagaccaccggccacatcgtgaccctggtgttcgagaagcacttccccgccaccatcgacagcttccaggacgccgtgaagtgcctgagcgagttcgcctgcaacgccgccttccccgacaccagcatggaggccatcagactgatcagacactgcgccaagtacgtgagcgacagaccccaggccttcaaggagtacaccagcgacgacatgaacgtggcccccgaggacagagtgtgggtgagaggctggttccccatcctgttcgagctgagctgcatcatcaacagatgcaagctggacgtgagaaccagaggcctgaccgtgatgttcgagatcatgaagacctacggccacacctacgagaagcactggtggcaggacctgttcagaatcgtgttcagaatcttcgacaacatgaagctgcccgagcagcagaccgagaaggccgagtggatgaccaccacctgcaaccacgccctgtacgccatctgcgacgtgttcacccagtacctggaggtgctgagcgacgtgctgctggacgacatcttcgcccagctgtactggtgcgtgcagcaggacaacgagcagctggccagaagcggcaccaactgcctggagaacgtggtgatcctgaacggcgagaagttcaccctggagatctgggacaagacctgcaactgcaccctggacatcttcaagaccaccatcccccacgccctgctgacctggagacccaacagcggcgagaccgccccccccccccccagccccgtgagcgagaagcccctggacaccatcagccagaagagcgtggacatccacgacagcatccagcccagaagcgtggacaacagaccccaggcccccctggtgagcgccagcgccgtgaacgaggaggtgagcaagatcaagagcaccgccaagttccccgagcagaagctgttcgccgccctgctgatcaagtgcgtggtgcagctggagctgatccagaccatcgacaacatcgtgttcttccccgccaccagcaagaaggaggacgccgagaacctggccgccgcccagagagacgccgtggacttcgacgtgagagtggacacccaggaccagggcatgtacagattcctgaccagccagcagctgttcaagctgctggactgcctgctggagagccacagattcgccaaggccttcaacagcaacaacgagcagagaaccgccctgtggaaggccggcttcaagggcaagagcaagcccaacctgctgaagcaggagaccagcagcctggcctgcggcctgagaatcctgttcagaatgtacatggacgagagcagagtgagcgcctgggaggaggtgcagcagagactgctgaacgtgtgcagcgaggccctgagctacttcctgaccctgaccagcgagagccacagagaggcctggaccaacctgctgctgctgttcctgaccaaggtgctgaagatcagcgacaacagattcaaggcccacgccagcttctactaccccctgctgtgcgagatcatgcagttcgacctgatccccgagctgagagccgtgctgagaagattcttcctgagaatcggcgtggtgttccagatcagccagccccccgagcaggagctgggcatcaacaagcagtag

SEQ ID NO: 164816 - protein, 185 aa, Artificial Sequence
  derived and/or modified sequence
MAAQKDQQKDAEAEGLSGTTLLPKLIPSGAGREWLERRRATIRPWSTFVDQQRFSRPRNLGELCQRLVRNVEYYQSNYVFVFLGLILYCVVTSPMLLVALAVFFGACYILYLRTLESKLVLFGREVSPAHQYALAGGISFPFFWLAGAGSAVFWVLGATLVVIGSHAAFHQIEAVDGEELQMEPV

SEQ ID NO: 164817 - DNA, 802 bp, Artificial Sequence
  derived and/or modified sequence
gggtggggccggcgtcgggcggggccggcggggtcttcagggtaccgggctggttacagcagctctacccctcacgacgcagacatggcagcgcagaaggaccagcagaaagatgccgaggcggaagggctgagcggcacgaccctgctgccgaagctgattccctccggtgcaggccgggagtggctggagcggcgccgcgcgaccatccggccctggagcaccttcgtggaccagcagcgcttctcacggccccgcaacctgggagagctgtgccagcgcctcgtacgcaacgtggagtactaccagagcaactatgtgttcgtgttcctgggcctcatcctgtactgtgtggtgacgtcccctatgttgctggtggctctggctgtctttttcggcgcctgttacattctctatctgcgcaccttggagtccaagcttgtgctctttggccgagaggtgagcccagcgcatcagtatgctctggctggaggcatctccttccccttcttctggctggctggtgcgggctcggccgtcttctgggtgctgggagccaccctggtggtcatcggctcccacgctgccttccaccagattgaggctgtggacggggaggagctgcagatggaacccgtgtgaggtgtcttctgggacctgccggcctcccgggccagctgccccacccctgcccatgcctgtcctgcacggctctgctgctcgggcccacagcgccgtcccatcacaagcccggggagggatcccgcctttgaaaataaagctgttatgggtgtcattcagg

SEQ ID NO: 164818 - DNA, 558 bp, Artificial Sequence
  derived and/or modified sequence
atggcagctcagaaagaccagcagaaagacgcagaggccgagggcctttcaggtaccaccctgttgcctaagctgatcccttccggagcaggtcgcgagtggctggagcggaggagagctaccatcaggccatggagcactttcgtggaccagcagagattcagccgacctcgcaatctgggggagctgtgtcagcgcctggtgcgtaatgtggagtattaccagtcaaactacgtgttcgtctttcttggtctgatcttgtactgtgtggttacttctcctatgttgttagtcgccctcgccgtgttctttggcgcctgctacatcctttacctgcgcaccttggaatcaaaattggtgctgttcgggagggaggtgtctccggcccaccagtacgctttagccggagggatctccttcccctttttttggttagctggggctggatccgcagttttttgggttttaggagccactctcgtggttataggctcacacgctgcattccaccagattgaggccgttgatggtgaggagttgcagatggagccggtgtag

SEQ ID NO: 164819 - DNA, 558 bp, Artificial Sequence
  derived and/or modified sequence
atggccgcccagaaggaccagcagaaggatgctgaggccgagggcctgagcggcaccaccctgctgcccaagctgatccccagcggggccggccgggagtggctggagcggcggcgggccaccatccggccctggagcacctttgtggaccagcagcgcttcagccggcccaggaacctgggggagctgtgccagaggctggtgagaaatgtggagtactaccagagcaactacgtgtttgtgttcctgggcctcatcctgtactgtgtggtgaccagccccatgctgctggtggccctggccgtgttcttcggggcctgctacatcctgtacctgcggaccctggagagcaagctggtgctgtttggccgggaggtgtccccagcccaccagtatgccctggccggcggcatctccttccccttcttctggctggccggggccggcagcgctgtgttctgggtgctgggcgccaccctggtggtgattggcagccatgctgccttccaccagatcgaggccgtggatggagaggagctgcagatggagcctgtgtag

SEQ ID NO: 164820 - DNA, 558 bp, Artificial Sequence
  derived and/or modified sequence
atggccgcccagaaggaccagcagaaggacgccgaggccgagggcctgagtggaactactctcctgcctaaactcataccctctggagcaggcagagagtggctcgaaaggaggcgggcaacgattcgcccctggtccaccttcgtggaccagcagcgcttcagtaggcccagaaatctgggagaattgtgtcagcgcctggtgcggaatgttgaatattatcaatccaattatgtatttgtgttccttgggctaattttgtattgcgtggtgacctccccaatgttactggtcgcattagccgtcttctttggagcctgctatatcctgtacctgaggaccctggaatctaagctggtgctgttcggcagggaagtgtctccagcccaccagtatgcactcgccggcggcattagcttccctttcttttggctggcgggcgcgggctcagcggtgttttgggttttaggggccacacttgtggtcatcggctctcacgccgcctttcaccagatagaggccgtcgatggggaggagctgcaaatggagcccgtttag

SEQ ID NO: 164821 - DNA, 558 bp, Artificial Sequence
  derived and/or modified sequence
atggcagcccagaaggatcagcaaaaagacgccgaggctgagggcctgtctggcacaacgctgttgccaaagctgataccctccggtgccggtagggaatggcttgaacgccgaagagctacgatccgcccttggagtaccttcgtcgaccaacagcggttttcccggccaaggaatctaggagaactgtgtcagaggctggtgcggaacgtcgagtactaccagtctaattacgtgttcgtctttctcggcttgatcctatactgtgttgttaccagtccaatgctgctagtcgctctggcagtcttcttcggcgcatgttatatcctctacctgcgcactctggagtctaagcttgtcctcttcggcagagaagttagccctgctcaccagtacgcattggcaggcggaatatccttccccttcttctggctggcgggtgcagggagcgccgttttctgggtgcttggggcaactctggtcgttataggcagtcatgctgcgtttcaccagatcgaggccgtggacggggaggaactgcaaatggaacctgtctag

SEQ ID NO: 164822 - DNA, 558 bp, Artificial Sequence
  derived and/or modified sequence
atggccgcccagaaggaccagcagaaggacgccgaggccgagggcctgagcggcaccaccctgctgcccaagctgatccccagcggcgccggcagagagtggctggagagaagaagagccaccatcagaccctggagcaccttcgtggaccagcagagattcagcagacccagaaacctgggcgagctgtgccagagactggtgagaaacgtggagtactaccagagcaactacgtgttcgtgttcctgggcctgatcctgtactgcgtggtgaccagccccatgctgctggtggccctggccgtgttcttcggcgcctgctacatcctgtacctgagaaccctggagagcaagctggtgctgttcggcagagaggtgagccccgcccaccagtacgccctggccggcggcatcagcttccccttcttctggctggccggcgccggcagcgccgtgttctgggtgctgggcgccaccctggtggtgatcggcagccacgccgccttccaccagatcgaggccgtggacggcgaggagctgcagatggagcccgtgtag

SEQ ID NO: 164823 - protein, 690 aa, Artificial Sequence
  derived and/or modified sequence
MAPWPELGDAQPNPDKYLEGAAGQQPTAPDKSKETNKTDNTEAPVTKIELLPSYSTATLIDEPTEVDDPWNLPTLQDSGIKWSERDTKGKILCFFQGIGRLILLLGFLYFFVCSLDILSSAFQLVGGKMAGQFFSNSSIMSNPLLGLVIGVLVTVLVQSSSTSTSIVVSMVSSSLLTVRAAIPIIMGANIGTSITNTIVALMQVGDRSEFRRAFAGATVHDFFNWLSVLVLLPVEVATHYLEIITQLIVESFHFKNGEDAPDLLKVITKPFTKLIVQLDKKVISQIAMNDEKAKNKSLVKIWCKTFTNKTQINVTVPSTANCTSPSLCWTDGIQNWTMKNVTYKENIAKCQHIFVNFHLPDLAVGTILLILSLLVLCGCLIMIVKILGSVLKGQVATVIKKTINTDFPFPFAWLTGYLAILVGAGMTFIVQSSSVFTSALTPLIGIGVITIERAYPLTLGSNIGTTTTAILAALASPGNALRSSLQIALCHFFFNISGILLWYPIPFTRLPIRMAKGLGNISAKYRWFAVFYLIIFFFLIPLTVFGLSLAGWRVLVGVGVPVVFIIILVLCLRLLQSRCPRVLPKKLQNWNFLPLWMRSLKPWDAVVSKFTGCFQMRCCCCCRVCCRACCLLCDCPKCCRCSKCCEDLEEAQEGQDVPVKAPETFDNITISREAQGEVPASDSKTECTAL

SEQ ID NO: 164824 - protein, 161 aa, Artificial Sequence
  derived and/or modified sequence
MAPWPELGDAQPNPDKYLEGAAGQQPTAPDKSKETNKTDNTEAPVTKIELLPSYSTATLIDEPTEVDDPWNLPTLQDSGIKWSERDTKGKILCFFQGIGRLILLLGFLYFFVCSLDILSSAFQLVGGKMAGQFFSNSSIMSNPLLGLVIGVLVTVLVQSSS

SEQ ID NO: 164825 - DNA, 2073 bp, Artificial Sequence
  derived and/or modified sequence
atggctccctggcctgagcttggtgatgcacagccaaatcccgataagtatctggagggtgccgccggccagcagccaacagctcccgacaaaagcaaggagactaacaaaacagataacacggaggcgcccgttactaagatcgagttacttcctagctattcaactgccacgcttatcgatgaacctactgaggtcgacgacccttggaacctgccaaccctgcaggactctggtatcaagtggagcgagcgagacacaaaggggaagatcctgtgtttctttcagggaataggaaggctgatcctcctgctgggcttcctatactttttcgtctgttcactggacattctttccagcgcattccagctggtagggggcaaaatggctggtcaatttttcagtaacagtagcatcatgagcaatccccttctgggtctcgttatcggggtgctggtgactgtactagtccagtcgtcctccaccagcactagcatagtcgtttccatggtgtcgtcttcactgctgacggtccgagcagccatcccaattatcatgggagctaacattggaacttcaattacgaataccatcgttgcgctgatgcaggttggcgaccgcagcgagtttagacgggcatttgcaggggccaccgtgcacgactttttcaattggctgtccgtcctcgtcctcttgccagtggaggtggctacgcattacctggaaattattactcaactgattgtggaatcctttcacttcaaaaatggcgaggatgctccagaccttctcaaggtcataacaaagccattcacaaaactgattgtgcagctggacaagaaggttatttctcagatcgccatgaacgatgaaaaagctaagaataaaagcctggtaaagatctggtgtaagacattcacaaacaaaacacagatcaatgtgacagtgccctctactgccaattgcacaagccccagcctatgctggacagatgggattcagaattggaccatgaagaatgttacgtataaggagaacattgccaagtgccagcacattttcgttaatttccatttgcccgacctggccgttggcacaatcttactgattctatccctcttagtattatgtggctgccttatcatgattgtgaagattctggggtcagttctgaaaggccaagtcgcaaccgtgattaaaaagaccatcaataccgacttcccattccccttcgcttggttaacaggatatcttgctattctcgtgggcgccggcatgacattcattgtgcaaagcagctcggtgtttactagtgccttgacgccactcattgggatcggcgttatcacaatcgaacgggcctatccacttaccctcgggtcaaacatcggtaccacgacaacagctatcttagccgctctggcttcacccggcaatgcgcttagatcatcattgcagatagctttgtgccattttttcttcaacataagcgggatccttctgtggtacccgatcccttttactaggctacccatcagaatggccaagggtctgggcaatattagcgccaagtatcgctggttcgcagttttttatctgattattttctttttcctgattccactgacggtgtttggtctttccttggccggatggcgggtcctggtgggagttggagtacctgttgtgtttatcatcatcttggtgctgtgtctgcggctccttcagtcgcgctgcccccgcgtcttacctaagaagctccaaaattggaattttctcccgctctggatgaggtcactgaagccttgggatgcagtggtaagcaaattcactggttgctttcaaatgcgttgttgttgctgttgcagggtgtgctgtcgggcctgttgcctcctgtgtgattgccctaaatgctgcaggtgtagcaagtgctgtgaggatctggaagaggcacaggaaggccaagatgttccagtgaaggcgcccgagaccttcgacaacattacgatttctcgcgaagcccaaggggaggtacctgcttctgacagtaagactgagtgtactgccctttag

SEQ ID NO: 164826 - DNA, 486 bp, Artificial Sequence
  derived and/or modified sequence
atggccccatggcctgaactgggcgacgctcaaccaaaccctgataaatatttggaaggtgcagccggccaacagccaaccgccccggacaaatccaaagagactaataaaacggataatacagaggcccccgtcacaaaaatcgaactactcccctcctatagtacagcaactttgattgacgagcccactgaggttgacgatccgtggaaccttccaacacttcaggacagcgggataaagtggagcgagagggatactaaaggaaagattctgtgttttttccaaggcattggacgtctcatcctgctcctgggttttctatatttttttgtctgtagcctcgatatcctctcctctgctttccagcttgtcgggggcaagatggccggacagttctttagtaactcctcaattatgtccaacccactgctaggcttagtcattggagtgctcgtgacagtgttggtgcagtccagcagctag

SEQ ID NO: 164827 - DNA, 2073 bp, Artificial Sequence
  derived and/or modified sequence
atggccccctggccagagctgggagatgcccagcccaacccagacaagtacctggagggcgccgccggccagcagcccacagccccagacaagagcaaggagaccaacaagacagacaacacagaggcccctgtgaccaagattgagctgctgcccagctacagcacagccaccctgattgatgagcccacagaggtggatgacccctggaacctgcccaccctgcaggacagcggcatcaagtggagcgagcgggacaccaagggcaagatcctgtgcttcttccagggcatcggccgcctcatcctgctgctgggcttcctgtacttctttgtgtgcagcctggacatcctgagcagcgccttccagctggtgggcggcaagatggccggccagttcttcagcaacagcagcatcatgagcaaccccctgctgggcctggtgattggagtgctggtgacagtgctggtgcagagcagcagcaccagcaccagcatcgtggtgtccatggtgagcagcagcctgctgactgtgcgggccgccatccccatcatcatgggcgccaacatcggcaccagcatcaccaacaccatcgtggccctgatgcaggtgggggacagaagtgagttcagaagagcctttgctggggccaccgtgcatgacttcttcaactggctgtctgtgctggtgctgctgcctgtggaggtggccacccactacctggagatcatcacccagctgattgtggagagcttccacttcaagaatggagaagatgccccagacctgctgaaggtgatcaccaagcccttcaccaagctgattgtgcagctggacaagaaggtgatcagccagatcgccatgaatgatgagaaggccaagaacaagagcctggtgaagatctggtgcaagaccttcaccaacaagacccagatcaacgtgacagtgcccagcacagccaactgcaccagccccagcctgtgctggacagatggcatccagaactggaccatgaagaatgtgacctacaaggaaaatattgccaagtgccagcacatctttgtgaacttccacctgcctgacctggccgtgggcaccatcctgctgatcctgagcctgctggtgctgtgtggctgcctgatcatgattgtgaagatcctgggctctgtgctgaagggccaggtggccaccgtcatcaagaagaccatcaacacagacttccccttcccctttgcctggctgaccggctacctggccatcctggtgggcgccggcatgaccttcatcgtgcagagcagcagcgtcttcaccagcgccctgacccccctcatcggcatcggggtcatcaccatcgagcgggcctaccccctgaccctgggcagcaacatcggcaccaccaccacagccatcctggccgccctggccagccctggaaatgccctgcggagcagcctgcagatcgccctgtgccacttcttcttcaacatcagcggcatcctgctgtggtaccccatccccttcacccggctgcccatccgcatggccaagggcctgggcaacatcagcgccaagtaccgctggtttgctgtgttctacctgatcatcttcttcttcctgatccccctgactgtgtttggcctgagcctggccggctggagggtgctggtgggcgtgggcgtgcctgtggtgttcatcatcatcctggtgctgtgcctgcggctgctgcagagccgctgcccccgggtgctgcccaagaagctgcagaactggaacttcctgcccctgtggatgaggagcctgaagccctgggatgctgtggtgtccaagttcaccggctgcttccagatgcgctgctgctgctgctgccgggtgtgctgccgggcctgctgcctgctgtgtgactgccccaagtgctgccgctgcagcaagtgctgtgaggacctggaggaggcccaggagggccaggatgtgcctgtgaaggcccctgagacctttgacaacatcaccatcagccgggaggcccagggcgaggtgcctgccagtgacagcaagacagagtgcacagccctgtag

SEQ ID NO: 164828 - DNA, 486 bp, Artificial Sequence
  derived and/or modified sequence
atggccccctggccagagctgggagatgcccagcccaacccagacaagtacctggagggcgccgccggccagcagcccacagccccagacaagagcaaggagaccaacaagacagacaacacagaggcccctgtgaccaagattgagctgctgcccagctacagcacagccaccctgattgatgagcccacagaggtggatgacccctggaacctgcccaccctgcaggacagcggcatcaagtggagcgagcgggacaccaagggcaagatcctgtgcttcttccagggcatcggccgcctcatcctgctgctgggcttcctgtacttctttgtgtgcagcctggacatcctgagcagcgccttccagctggtgggcggcaagatggccggccagttcttcagcaacagcagcatcatgagcaaccccctgctgggcctggtgattggagtgctggtgacagtgctggtgcagagcagcagctag

SEQ ID NO: 164829 - DNA, 2073 bp, Artificial Sequence
  derived and/or modified sequence
atggccccctggcccgagctgggcgacgcccagcccaaccccgacaagtaccttgagggcgccgccggtcagcaaccgacagccccagataagtccaaagagaccaataagactgataataccgaagctcccgtgacaaaaatcgaactcctgcccagctacagcaccgccactctgattgatgaaccgaccgaggtcgatgatccttggaacctccccactctgcaggattctggcataaagtggtccgagcgagacacaaaaggaaaaatactgtgctttttccaaggcataggcagattgatactgttgctgggttttctttatttcttcgtatgctcactcgatatactgagcagtgcgttccagctggtgggtggcaaaatggctggccagttcttctctaattcaagcatcatgagcaatccacttctgggccttgtaatcggcgtcctggtaaccgttctagtgcaatccagttctacctctacctccattgtggtttctatggtaagttcttccctactgacagtccgggccgcaattcctattatcatgggcgccaatattgggactagcatcactaacaccatagtggccctgatgcaggtcggtgacagatccgagtttcggcgcgcctttgcaggagccacagtacatgattttttcaattggttgtcggtgctggtcctgctgccagttgaggtggctacccactatctggagatcatcactcagctgattgtcgaatctttccatttcaagaacggtgaggacgcgccagacctgctcaaggttataactaaacctttcactaagctgatcgtccaactggataaaaaggtcatttctcagatcgcaatgaacgacgaaaaggcaaagaataagagtcttgtaaaaatttggtgtaagacctttacaaataagacacagatcaatgtcactgtgccgtcaacagccaactgtacatcaccgagtctgtgctggacagatggcattcagaattggacaatgaagaatgtgacctataaagaaaatatagccaagtgtcagcatattttcgtgaactttcacctccccgacctggcggtggggacaatcctattgatcctgagcctactggtgctttgtggatgcttaatcatgatcgttaagatcctcggttcggtgctgaaaggtcaggtggccactgtcattaagaaaaccataaacactgatttcccttttcccttcgcctggcttaccggctacttggcaattctcgtgggagccggaatgactttcattgtccagagcagcagtgtgttcacctctgccctgactcctctgatcggcattggagtgattaccattgaaagggcatacccactgaccctgggcagcaacatcggcacaaccactaccgccattcttgctgccctggctagtcctggtaatgcacttcgttcttctctgcagatcgccctttgccattttttcttcaacattagcggcatactgctgtggtacccaatcccgttcactcgcctgcctattcggatggcaaaaggactgggaaacatttcagcaaagtatagatggtttgccgtcttctatctgattatattcttttttttgattccactgacagtattcggcctttctctggccgggtggcgggttctggtaggagtgggagtccccgttgttttcattatcattctcgtgttatgcttaagattactgcagtcacgctgtccgcgcgtgctgcccaagaaactccagaattggaatttcctccctctctggatgagaagtctgaagccttgggatgcagtcgtttctaagttcaccgggtgtttccagatgcgatgctgctgctgctgtcgggtgtgttgcagggcttgttgcctgctgtgcgactgccccaagtgctgccggtgtagtaagtgttgcgaagatctggaggaggcacaggaaggtcaggatgtccctgtgaaagctcccgagacctttgataacattaccattagtagggaggcgcaaggagaggttcccgctagtgattcaaagactgagtgtacagcactctag

SEQ ID NO: 164830 - DNA, 486 bp, Artificial Sequence
  derived and/or modified sequence
atggccccctggcccgagctgggcgacgcccagcccaaccccgacaagtacttggaaggtgcagccggccagcaacccactgcccccgacaaaagtaaagaaactaacaagaccgataataccgaggcccctgtgaccaagatcgaactgcttccatcttattccaccgcaacgctcatcgatgagcctacagaggttgatgacccttggaatctgcccaccctgcaggatagcgggattaaatggtccgagagagacacaaaagggaaaattctctgtttcttccaaggcatcgggcgactgattctgttgctgggctttttgtacttcttcgtgtgttcacttgatatcctatcttctgcctttcagctagtgggcggaaagatggccggccagttcttttctaactcttcaattatgtcaaaccccctgctggggctggtgatcggggtcctggttactgtactggtacagtcgagttcctag

SEQ ID NO: 164831 - DNA, 2073 bp, Artificial Sequence
  derived and/or modified sequence
atggcaccatggccagaactgggagatgctcagcctaaccctgacaaatatttagaaggtgctgccggtcagcagccaaccgcccctgacaaaagcaaggagactaataaaacggacaatactgaagcccctgtgaccaagattgagctcctcccttcctacagcaccgctaccctcatagacgagcctaccgaggtggacgacccctggaacctccctactctgcaggactcagggataaaatggagcgagcgggacaccaaaggaaaaatcctgtgtttttttcagggcattggaagattgatcttactgttggggttcctgtacttttttgtttgttccctggacatcctgagttccgctttccagctggttgggggaaagatggcaggacagttctttagcaatagcagcataatgagcaatccgctcttgggcctggtgatcggcgtcctggtcactgtgctggtgcagagctcgagcacctccacgtccatcgttgtctccatggtctcatcctccttgctgacagtcagggcagcaatccccatcatcatgggggctaatatcggaacctcaattactaatacaatcgtcgccttgatgcaggtcggagacaggtctgagttccgcagagctttcgccggagccacagtgcatgatttctttaattggctgagcgtcctcgtgctactgccagttgaggtggcaacccattacctcgaaattatcacacagcttattgtggagtcattccactttaaaaatggagaagatgctcctgacttgcttaaggtcattaccaagccgttcacgaagctcatagtgcaattagataagaaggtgatttctcagatcgctatgaacgatgaaaaggccaagaataagtcccttgtgaagatatggtgcaagacattcacgaacaagacacaaattaacgtcacagtgccaagcacagctaactgcacatctccaagtctgtgctggacagacggaatccagaactggaccatgaaaaacgtaacttacaaggagaatattgcaaagtgccagcatatcttcgtaaatttccacctgcctgatctagcagtaggaactattttgctgatcctgtcacttctcgtgctctgtgggtgcttgatcatgattgtgaaaattcttgggtcagtgcttaaaggccaagttgccaccgtgatcaagaagactataaacactgactttccctttcccttcgcctggctgaccggctacctcgcaatcctagttggcgctgggatgacctttatcgtccagagctcctctgtgttcacctccgcactcacccccctcataggcataggagtcatcacaatcgagcgagcttaccctctcaccctgggctccaacatcgggactaccactacggcaatcctggcagcgttggccagccccggtaacgcgctgcgctcaagtctgcagattgccctctgccattttttctttaatatttctggtatcctcctgtggtatccaattccatttaccagactgccaattcgaatggctaaggggctcggcaatatcagtgccaagtataggtggtttgccgtgttctacctcatcatatttttctttctaatccctttgaccgtgtttggactgtcattagctggatggagagtcctcgtcggagtcggagttcccgtggtgttcattattatcctcgtgctgtgcctgcggttactgcagtcccgttgccctagggtgctccctaagaagttgcaaaactggaacttccttccactgtggatgcggagtcttaaaccttgggatgctgtggtcagcaaattcaccggatgtttccagatgaggtgctgctgttgctgcagagtgtgttgccgcgcttgttgccttctctgcgactgcccaaagtgctgcagatgtagcaaatgttgcgaggacctagaagaagcgcaagagggccaggatgtgcccgtcaaagcacccgagacgtttgacaatataacgatttctagagaggcccaaggggaagtgcccgcaagcgattcaaaaactgaatgcactgctctgtag

SEQ ID NO: 164832 - DNA, 486 bp, Artificial Sequence
  derived and/or modified sequence
atggcaccttggccagagttgggcgatgcccagcccaatcccgacaaatacctggaaggggctgccggtcagcaacccactgccccagacaaatccaaggaaacaaacaagactgacaatacagaagctccagtcactaaaatcgaacttctaccctcctattcgaccgcaaccctgattgatgagcccactgaggttgacgacccctggaatctccccacactgcaggactcaggcataaaatggtctgagcgcgacacaaaaggaaagattctgtgtttctttcaggggataggaagattaattctgctattaggattcctttacttttttgtgtgttctctggatatactgagttcggccttccagctcgtgggaggaaaaatggccggacaatttttctcaaattcctctatcatgagcaacccactccttggtttggtaatcggagtgttagtgacagtgctggtgcagtcgtcatcctag

SEQ ID NO: 164833 - DNA, 4122 bp, Artificial Sequence
  derived and/or modified sequence
tccacctggccgccgcctccagcccagcacctgcggagggagcgctgaccatggctccctggcctgaattgggagatgcccagcccaaccccgataagtacctcgaaggggccgcaggtcagcagcccactgcccctgataaaagcaaagagaccaacaaaacagataacactgaggcacctgtaaccaagattgaacttctgccgtcctactccacggctacactgatagatgagcccactgaggtggatgacccctggaacctacccactcttcaggactcggggatcaagtggtcagagagagacaccaaagggaagattctctgtttcttccaagggattgggagattgattttacttctcggatttctctactttttcgtgtgctccctggatattcttagtagcgccttccagctggttggaggaaaaatggcaggacagttcttcagcaacagctctattatgtccaaccctttgttggggctggtgatcggggtgctggtgaccgtcttggtgcagagctccagcacctcaacgtccatcgttgtcagcatggtgtcctcttcattgctcactgttcgggctgccatccccattatcatgggggccaacattggaacgtcaatcaccaacactattgttgcgctcatgcaggtgggagatcggagtgagttcagaagagcttttgcaggagccactgtccatgacttcttcaactggctgtccgtgttggtgctcttgcccgtggaggtggccacccattacctcgagatcataacccagcttatagtggagagcttccacttcaagaatggagaagatgccccagatcttctgaaagtcatcactaagcccttcacaaagctcattgtccagctggataaaaaagttatcagccaaattgcaatgaacgatgaaaaagcgaaaaacaagagtcttgtcaagatttggtgcaaaacttttaccaacaagacccagattaacgtcactgttccctcgactgctaactgcacctccccttccctctgttggacggatggcatccaaaactggaccatgaagaatgtgacctacaaggagaacatcgccaaatgccagcatatctttgtgaatttccacctcccggatcttgctgtgggcaccatcttgctcatactctccctgctggtcctctgtggttgcctgatcatgattgtcaagatcctgggctctgtgctcaaggggcaggtcgccactgtcatcaagaagaccatcaacactgatttcccctttccctttgcatggttgactggctacctggccatcctcgtcggggcaggcatgaccttcatcgtacagagcagctctgtgttcacgtcggccttgacccccctgattggaatcggcgtgataaccattgagagggcttatccactcacgctgggctccaacatcggcaccaccaccaccgccatcctggccgccttagccagccctggcaatgcattgaggagttcactccagatcgccctgtgccactttttcttcaacatctccggcatcttgctgtggtacccgatcccgttcactcgcctgcccatccgcatggccaaggggctgggcaacatctctgccaagtatcgctggttcgccgtcttctacctgatcatcttcttcttcctgatcccgctgacggtgtttggcctctcgctggccggctggcgggtgctggttggtgtcggggttcccgtcgtcttcatcatcatcctggtactgtgcctccgactcctgcagtctcgctgcccacgcgtcctgccgaagaaactccagaactggaacttcctgccgctgtggatgcgctcgctgaagccctgggatgccgtcgtctccaagttcaccggctgcttccagatgcgctgctgctgctgctgccgcgtgtgctgccgcgcgtgctgcttgctgtgtgactgccccaagtgctgccgctgcagcaagtgctgcgaggacttggaggaggcgcaggaggggcaggatgtccctgtcaaggctcctgagacctttgataacataaccattagcagagaggctcagggtgaggtccctgcctcggactcaaagaccgaatgcacggccttgtaggggacgccccagattgtcagggatggggggatggtccttgagttttgcatgctctcctccctcccacttctgcaccctttcaccacctcgaggagatttgctccccattagcgaatgaaattgatgcagtcctacctaactcgattccctttggcttggtggtaggcctgcagggcacttttattccaacccctggtcactcagtaatcttttactccaggaaggcacaggatggtacctaaagagaattagagaatgaacctggcgggacggatgtctaatcctgcgcctagctgggttggtcagtagaacctattttcagactcaaaaaccatcttcagaaagaaaaggcccagggaaggaatgtatgagaggctctcccagatgaggaagtgtactctctatgactatcaagctcaggcctctccctttttttaaaccaaagtctggcaaccaagagcagcagctccatggcctccttgccccagatcagcctgggtcaggggacatagtgtcattgtttggaaactgcagaccacaaggtgtgggtctatcccacttcctagtgctccccacattccccatcagggcttcctcacgtggacaggtgtgctagtccaggcagttcacttgcagtttccttgtcctcatgcttcggggatgggagccacgcctgaactagagttcaggctggatacatgtgctcacctgctgctcttgtcttcctaagagacagagagtggggcagatggaggagaagaaagtgaggaatgagtagcatagcattctgccaaaagggccccagattcttaatttagcaaactaagaagcccaattcaaaagcattgtggctaaagtctaacgctcctctcttggtcagataacaaaagccctccctgttggatcttttgaaataaaacgtgcaagttatccaggctcgtagcctgcatgctgccaccttgaatcccagggagtatctgcacctggaatagctctccacccctctctgcctccttactttctgtgcaagatgacttcctgggttaacttccttctttccatccacccacccactggaatctctttccaaacatttttccattttcccacagatgggctttgattagctgtcctctctccatgcctgcaaagctccagatttttggggaaagctgtacccaactggactgcccagtgaactgggatcattaagtacagtcgagcacacgtgtgtgcatgggtcaaaggggtgtgttccttctcatcctagatgccttctctgtgccttccacagcctcctgcctgattacaccactgcccccgccccaccctcagccatcccaattcttcctggccagtgcgctccagccttatctaggaaaggaggagtgggtgtagccgtgcagcaagattggggcctcccccatcccagcttctccaccatcccagcaagtcaggatatcagacagtcctcccctgaccctcccccttgtagatatcaattcccaaacagagccaaatactctatatctatagtcacagccctgtacagcatttttcataagttatatagtaaatggtctgcatgatttgtgcttctagtgctctcatttggaaatgaggcaggcttcttctatgaaatgtaaagaaagaaaccactttgtatattttgtaataccacctctgtggccatgcctgccccgcccactctgtatatatgtaagttaaacccgggcaggggctgtggccgtctttgtactctggtgatttttaaaaattgaatctttgtacttgcattgattgtataataattttgagaccaggtctcgctgtgttgctcaggctggtctcaaactcctgagatcaagcaatccgcccacctcagcctcccaaagtgctgagatcacaggcgtgagccaccaccaggcctgattgtaatttttttttttttttttttactggttatgggaagggagaaataaaatcatcaaacccaaaa

SEQ ID NO: 164834 - DNA, 582 bp, Artificial Sequence
  derived and/or modified sequence
gtttctattagggcccgtggccatcagcgaagggtccgtccttcagccgtcttggggagcaaagcccgcaatttatgttttccaagccacaaatggaccatggctccctggcctgaattgggagatgcccagcccaaccccgataagtacctcgaaggggccgcaggtcagcagcccactgcccctgataaaagcaaagagaccaacaaaacagataacactgaggcacctgtaaccaagattgaacttctgccgtcctactccacggctacactgatagatgagcccactgaggtggatgacccctggaacctacccactcttcaggactcggggatcaagtggtcagagagagacaccaaagggaagattctctgtttcttccaagggattgggagattgattttacttctcggatttctctactttttcgtgtgctccctggatattcttagtagcgccttccagctggttggaggaaaaatggcaggacagttcttcagcaacagctctattatgtccaaccctttgttggggctggtgatcggggtgctggtgaccgtcttggtgcagagctccagc

SEQ ID NO: 164835 - DNA, 2073 bp, Artificial Sequence
  derived and/or modified sequence
atggccccctggcccgagctgggcgacgcccagcccaaccccgacaagtacctggagggcgccgccggccagcagcccaccgcccccgacaagagcaaggagaccaacaagaccgacaacaccgaggcccccgtgaccaagatcgagctgctgcccagctacagcaccgccaccctgatcgacgagcccaccgaggtggacgacccctggaacctgcccaccctgcaggacagcggcatcaagtggagcgagagagacaccaagggcaagatcctgtgcttcttccagggcatcggcagactgatcctgctgctgggcttcctgtacttcttcgtgtgcagcctggacatcctgagcagcgccttccagctggtgggcggcaagatggccggccagttcttcagcaacagcagcatcatgagcaaccccctgctgggcctggtgatcggcgtgctggtgaccgtgctggtgcagagcagcagcaccagcaccagcatcgtggtgagcatggtgagcagcagcctgctgaccgtgagagccgccatccccatcatcatgggcgccaacatcggcaccagcatcaccaacaccatcgtggccctgatgcaggtgggcgacagaagcgagttcagaagagccttcgccggcgccaccgtgcacgacttcttcaactggctgagcgtgctggtgctgctgcccgtggaggtggccacccactacctggagatcatcacccagctgatcgtggagagcttccacttcaagaacggcgaggacgcccccgacctgctgaaggtgatcaccaagcccttcaccaagctgatcgtgcagctggacaagaaggtgatcagccagatcgccatgaacgacgagaaggccaagaacaagagcctggtgaagatctggtgcaagaccttcaccaacaagacccagatcaacgtgaccgtgcccagcaccgccaactgcaccagccccagcctgtgctggaccgacggcatccagaactggaccatgaagaacgtgacctacaaggagaacatcgccaagtgccagcacatcttcgtgaacttccacctgcccgacctggccgtgggcaccatcctgctgatcctgagcctgctggtgctgtgcggctgcctgatcatgatcgtgaagatcctgggcagcgtgctgaagggccaggtggccaccgtgatcaagaagaccatcaacaccgacttccccttccccttcgcctggctgaccggctacctggccatcctggtgggcgccggcatgaccttcatcgtgcagagcagcagcgtgttcaccagcgccctgacccccctgatcggcatcggcgtgatcaccatcgagagagcctaccccctgaccctgggcagcaacatcggcaccaccaccaccgccatcctggccgccctggccagccccggcaacgccctgagaagcagcctgcagatcgccctgtgccacttcttcttcaacatcagcggcatcctgctgtggtaccccatccccttcaccagactgcccatcagaatggccaagggcctgggcaacatcagcgccaagtacagatggttcgccgtgttctacctgatcatcttcttcttcctgatccccctgaccgtgttcggcctgagcctggccggctggagagtgctggtgggcgtgggcgtgcccgtggtgttcatcatcatcctggtgctgtgcctgagactgctgcagagcagatgccccagagtgctgcccaagaagctgcagaactggaacttcctgcccctgtggatgagaagcctgaagccctgggacgccgtggtgagcaagttcaccggctgcttccagatgagatgctgctgctgctgcagagtgtgctgcagagcctgctgcctgctgtgcgactgccccaagtgctgcagatgcagcaagtgctgcgaggacctggaggaggcccaggagggccaggacgtgcccgtgaaggcccccgagaccttcgacaacatcaccatcagcagagaggcccagggcgaggtgcccgccagcgacagcaagaccgagtgcaccgccctgtag

SEQ ID NO: 164836 - DNA, 486 bp, Artificial Sequence
  derived and/or modified sequence
atggccccctggcccgagctgggcgacgcccagcccaaccccgacaagtacctggagggcgccgccggccagcagcccaccgcccccgacaagagcaaggagaccaacaagaccgacaacaccgaggcccccgtgaccaagatcgagctgctgcccagctacagcaccgccaccctgatcgacgagcccaccgaggtggacgacccctggaacctgcccaccctgcaggacagcggcatcaagtggagcgagagagacaccaagggcaagatcctgtgcttcttccagggcatcggcagactgatcctgctgctgggcttcctgtacttcttcgtgtgcagcctggacatcctgagcagcgccttccagctggtgggcggcaagatggccggccagttcttcagcaacagcagcatcatgagcaaccccctgctgggcctggtgatcggcgtgctggtgaccgtgctggtgcagagcagcagctag

SEQ ID NO: 164837 - protein, 143 aa, Artificial Sequence
  derived and/or modified sequence
MSATVVDAVNAAPLSGSKEMSLEEPKKMTREDWRKKKELEEQRKLGNAPAEVDEEGKDINPHIPQYISSVPWYIDPSKRPTLKHQRPQPEKQKQFSSSGEWYKRGVKENSIITKYRKGACENCGAMTHKKKDCFERPRRVGAK

SEQ ID NO: 164838 - DNA, 375 bp, Artificial Sequence
  derived and/or modified sequence
atgagcgccaccgtggtggacgccgtgaacgccgcccccctgagcggcagcaaggagatgagcctggaggagcccaagaagatgaccagagaggactggagaaagaagaaggagctggaggagcagagaaagctgggcaacgcccccgccgaggtggacgaggagggcaaggacatcaacccccacatcccccagtacatcagcagcgtgccctggtacatcgaccccagcaagagacccaccctgaagcaccagagaccccagcccgagaagcagaagcagttcagcagcagcggcgagtggtacaagagaggcgtgaaggagaacagcatcatcaccaagtacagaaagggcgcctgcgagaactgcggctag

SEQ ID NO: 164839 - DNA, 306 bp, Artificial Sequence
  derived and/or modified sequence
atgagcgccaccgtggtggacgccgtgaacgccgcccccctgagcggcagcaaggagatgagcctggaggagcccaagaagatgaccagagaggactggagaaagaagaaggagctggaggagcagagaaagctgggcaacgcccccgccgaggtggacgaggagggcaaggacatcaacccccacatcccccagtacatcagcagcgtgccctggtacatcgaccccagcaagagacccaccctgaagcaccagagaccccagcccgagaagcagaagcagttcagcagcagcggcgagtggtag

SEQ ID NO: 164840 - DNA, 432 bp, Artificial Sequence
  derived and/or modified sequence
atgagcgccaccgtggtggacgccgtgaacgccgcccccctgagcggcagcaaggagatgagcctggaggagcccaagaagatgaccagagaggactggagaaagaagaaggagctggaggagcagagaaagctgggcaacgcccccgccgaggtggacgaggagggcaaggacatcaacccccacatcccccagtacatcagcagcgtgccctggtacatcgaccccagcaagagacccaccctgaagcaccagagaccccagcccgagaagcagaagcagttcagcagcagcggcgagtggtacaagagaggcgtgaaggagaacagcatcatcaccaagtacagaaagggcgcctgcgagaactgcggcgccatgacccacaagaagaaggactgcttcgagagacccagaagagtgggcgccaagtag

SEQ ID NO: 164841 - DNA, 1761 bp, Artificial Sequence
  derived and/or modified sequence
atgagcgctaccgttgtggacgctgtgaacgccgccccgctaagtgggtccaaggagatgagcttagaagagccgaaaaagatgaccagggaggactggcggaagaaaaaagagttggaagaacagcgaaagttgggcaatgcacctgcagaagttgacgaggagggcaaagatataaatccgcatatcccccagtacatatctagcgttccatggtacattgatccatcaaagcgtcccactcttaagcaccagcgtcctcagcctgaaaagcagaagcaattctcatcatccggagaatggtacaagcgcggcgtgaaggaaaatagcatcataacaaagtatcgaaaaggtgcctgcgagaattgtggtgctatgacacacaagaaaaaggattgtttcgagcggccaagacgagttggggccaagtttaccgggaccaacatagcccccgatgaacacgtgcagcctcaactgatgtttgattacgatggcaagagggatagatggaacggatataatcccgaagaacatatgaagatagtggaggaatatgctaaagtggacttagctaagcgtaccctcaaggcccagaagctgcaagaggagttggcgtccggcaagttggttgagcaggctaattctcctaagcatcagtggggagaagaggaacccaatagtcagatggagaaagatcacaatagcgaggatgaggatgaggataaatatgcagacgatattgatatgccaggccagaattttgatagtaaaaggagaatcactgtgcgcaacttgcgcatcagagaagacatagctaaatatctgcggaacctcgatcctaattctgcatattatgatcctaaaacacgcgctatgagagagaatccatacgcaaatgcaggtaagaaccccgatgaggtaagttatgccggggacaacttcgtgaggtacacgggggatacaatctccatggcgcagacacagttgtttgcctgggaggcatatgacaaaggtagcgaggtgcacttacaagccgaccccacaaagttagaactgctctacaagtcttttaaagtcaaaaaagaggatttcaaggaacagcagaaggaatcaattctggaaaaatacgggggacaggaacacctggatgcacccccagcggagctgttgttagcacagaccgaagattacgtcgagtactctagacacggtacagtgatcaaaggtcaggaaagggccgtcgcctgttccaagtatgaggaagatgtgaagatccataaccatacccacatctggggcagctattggaaggaggggcgctggggctataagtgttgtcacagcttcttcaagtactcatactgcacaggtgaagccggtaaggagatcgtcaactccgaggagtgtatcataaatgagataactggtgaggaaagcgtgaagaagcctcagacccttatggagctacaccaggagaaactgaaagaggaaaagaaaaaaaagaaaaagaagaagaagaagcaccgaaagagcagcagtgatagtgatgatgaggaaaagaagcatgaaaagctcaaaaaggccttgaacgcagaagaggccaggttgctgcatgtgaaggagaccatgcaaatcgacgaaagaaagcgaccctacaatagcatgtatgagactcgggaaccaactgaggaggaaatggaggcctaccggatgaagcgacagaggcccgacgatccgatggcgagcttcctgggccagtag

SEQ ID NO: 164842 - DNA, 375 bp, Artificial Sequence
  derived and/or modified sequence
atgtccgccactgtagtggatgcagtaaacgcagcccctctgtcaggtagcaaggagatgtctctggaggaacctaaaaagatgactcgcgaagattggaggaaaaagaaagagctggaagagcagcgcaaactgggtaatgccccagctgaggtcgatgaagaaggcaaggacattaatccccatatccctcagtacatcagtagcgtaccttggtacatcgacccttctaaacggcctactttgaaacaccagagaccacaacccgagaagcagaagcagttttcgagtagcggagagtggtataaacggggagtgaaggagaattccattattacgaaataccgcaaaggagcctgtgaaaactgcgggtag

SEQ ID NO: 164843 - DNA, 306 bp, Artificial Sequence
  derived and/or modified sequence
atgagcgcaactgtggtggatgcagttaatgctgccccattgagtggcagcaaagaaatgagtcttgaagagcctaagaaaatgactagggaggattggcgtaaaaaaaaagagctcgaagagcagcgcaaattaggtaacgcccccgcagaggtcgatgaggagggtaaggatatcaacccacacattccacaatacatcagtagtgtcccttggtatattgacccatctaagaggccaacactcaagcatcagaggcctcagccggagaaacaaaagcagttctcaagcagcggggagtggtag

SEQ ID NO: 164844 - DNA, 432 bp, Artificial Sequence
  derived and/or modified sequence
atgtcagctacagtcgtcgatgccgtgaacgccgctccccttagcgggtctaaggagatgtcactagaggagccgaagaagatgacacgagaagactggaggaagaagaaagagctggaggaacagcgcaagttaggtaatgcacctgctgaagtggatgaagaaggcaaggatataaatccccacatcccacagtacatttccagcgtcccgtggtacattgacccatctaagcgccctaccttaaagcaccagagaccccagcctgagaagcagaaacagttttcctctagcggagagtggtataaaaggggggtgaaagagaacagtattatcactaagtatagaaaaggcgcgtgcgaaaattgtggggctatgacacacaagaaaaaagactgttttgaaagaccgcgtcgggtcggagcaaaatag

SEQ ID NO: 164845 - DNA, 1761 bp, Artificial Sequence
  derived and/or modified sequence
atgtctgccaccgtggtggatgctgtgaatgctgcccccctgagcggcagcaaggagatgagcctggaggagcccaagaagatgacccgggaggactggaggaagaagaaggagctggaggagcagaggaagctgggcaatgccccagctgaggtggatgaggagggcaaggacatcaacccccacatcccccagtacatcagctctgtgccctggtacatcgaccccagcaagaggcccaccctgaagcaccagaggccccagcctgagaagcagaagcagttcagcagcagcggggagtggtacaagaggggcgtgaaggagaacagcatcatcaccaagtacagaaaaggagcctgtgagaactgtggggccatgacccacaagaagaaggactgctttgagcggccccggcgggtgggcgccaagttcaccggcaccaacatcgccccagatgagcacgtgcagccccagctgatgtttgattatgatggcaagagggaccgctggaatggctacaaccctgaggagcacatgaagatcgtggaggagtatgccaaggtggacctggccaagaggaccctgaaggcccagaagctgcaggaggagctggccagcggcaagctggtggagcaggccaacagccccaagcaccagtggggcgaggaggagcccaacagccagatggagaaggaccacaacagtgaagatgaagatgaggacaagtatgcagatgacatcgacatgcctggccagaactttgacagcaagaggcgcatcaccgtgaggaacctgcgcatcagagaagatattgccaagtacctgaggaacctggaccccaacagcgcctactatgaccccaagacccgggccatgagggagaacccctatgccaatgctgggaagaacccagatgaggtgtcctatgctggggacaactttgtgcgctacaccggggacaccatctccatggcccagacccagctgtttgcctgggaggcctatgacaagggcagcgaggtgcacctgcaggccgaccccaccaagctggagctgctgtacaagagcttcaaggtgaagaaggaggacttcaaggagcagcagaaggagagcatcctggagaagtatggaggccaggagcacctggatgcccctcctgctgagctgctgctggcccagacagaagattatgtggagtacagcagacatggaacagtcatcaagggccaggagagagctgtggcctgcagcaaatatgaagaagatgtgaagatccacaaccacacccacatctggggcagctactggaaggagggccgctggggctacaagtgctgccacagcttcttcaagtacagctactgcaccggggaggccggcaaggagatcgtgaacagcgaggagtgcatcatcaatgagatcactggagaggagagcgtgaagaagccccagaccctgatggagctgcaccaggagaagctgaaggaggagaagaagaagaagaagaagaagaagaagaagcacaggaagagcagcagtgacagtgatgatgaggagaagaagcatgagaagctgaagaaggccctgaatgctgaggaggcccggctgctgcacgtgaaggagaccatgcagattgatgagaggaagaggccctacaacagcatgtatgagacccgggagcccacagaggaggagatggaggcctacaggatgaagaggcagaggccagatgaccccatggccagcttcctgggccagtag

SEQ ID NO: 164846 - DNA, 375 bp, Artificial Sequence
  derived and/or modified sequence
atgtctgccaccgtggtggatgctgtgaatgctgcccccctgagcggcagcaaggagatgagcctggaggagcccaagaagatgacccgggaggactggaggaagaagaaggagctggaggagcagaggaagctgggcaatgccccagctgaggtggatgaggagggcaaggacatcaacccccacatcccccagtacatcagctctgtgccctggtacatcgaccccagcaagaggcccaccctgaagcaccagaggccccagcctgagaagcagaagcagttcagcagcagcggggagtggtacaagaggggcgtgaaggagaacagcatcatcaccaagtacagaaaaggagcctgtgagaactgtggctag

SEQ ID NO: 164847 - DNA, 306 bp, Artificial Sequence
  derived and/or modified sequence
atgtctgccaccgtggtggatgctgtgaatgctgcccccctgagcggcagcaaggagatgagcctggaggagcccaagaagatgacccgggaggactggaggaagaagaaggagctggaggagcagaggaagctgggcaatgccccagctgaggtggatgaggagggcaaggacatcaacccccacatcccccagtacatcagctctgtgccctggtacatcgaccccagcaagaggcccaccctgaagcaccagaggccccagcctgagaagcagaagcagttcagcagcagcggggagtggtag

SEQ ID NO: 164848 - DNA, 432 bp, Artificial Sequence
  derived and/or modified sequence
atgtctgccaccgtggtggatgctgtgaatgctgcccccctgagcggcagcaaggagatgagcctggaggagcccaagaagatgacccgggaggactggaggaagaagaaggagctggaggagcagaggaagctgggcaatgccccagctgaggtggatgaggagggcaaggacatcaacccccacatcccccagtacatcagctctgtgccctggtacatcgaccccagcaagaggcccaccctgaagcaccagaggccccagcctgagaagcagaagcagttcagcagcagcggggagtggtacaagaggggcgtgaaggagaacagcatcatcaccaagtacagaaaaggagcctgtgagaactgtggggccatgacccacaagaagaaggactgctttgagcggccccggcgggtgggcgccaagtag

SEQ ID NO: 164849 - DNA, 1761 bp, Artificial Sequence
  derived and/or modified sequence
atgagcgccaccgtggtggacgccgtgaacgccgcccccctgagcggctccaaagagatgtctctggaggaacctaaaaagatgactcgcgaagattggcgcaaaaaaaaggagctggaggagcagagaaaactgggcaacgctccggccgaggtagatgaagagggcaaggatattaacccccatatacctcaatacatcagctcagtgccctggtacatagatcctagcaaacggcctaccctcaaacatcagagaccccagccagagaagcagaaacagttttcctcttcaggggagtggtacaagaggggtgttaaagagaatagcatcatcaccaaatacaggaagggtgcttgtgagaattgcggcgccatgacccacaaaaagaaggactgttttgagcgccctcggcgtgtgggagcgaaatttacaggaaccaatattgcaccagacgagcacgtgcagccccagctgatgtttgactacgatggcaaaagagacaggtggaatggctacaatcctgaagagcatatgaaaatagtggaagagtatgctaaggtagacctcgctaaacgaactctaaaagcccaaaaactacaggaagagctcgctagtggtaagcttgtggagcaagcgaactctccaaagcaccagtggggcgaagaagagccgaacagtcaaatggaaaaagatcacaacagtgaagatgaagacgaggacaagtacgctgatgacatcgacatgccgggtcaaaatttcgactccaagcggcgcataacagtcaggaatctgcgcattagggaggatatcgctaaatacctgcggaatctagacccgaattcagcatattatgatccaaagacccgcgcaatgagggagaatccctacgccaacgctggcaaaaacccagatgaagtttcttacgcaggcgacaacttcgtaaggtacactggggacaccatttcaatggctcagactcagttgtttgcatgggaggcatatgataagggctctgaggtccatcttcaggccgacccaaccaagctggaacttctatataagagttttaaggtcaagaaggaggattttaaggagcagcaaaaagaaagcatcttggagaagtatggcggtcaggaacacctagacgccccccccgcggaactactgctagcccagacagaagattatgtcgaatattcaagacacggaactgtaattaaggggcaggagcgtgccgtggcctgttctaagtacgaggaggatgtcaagatccacaatcacacacacatctggggctcttactggaaggaaggcagatggggatataagtgttgccacagcttttttaagtattcctactgcacgggggaggccgggaaagagatcgtaaatagcgaggagtgtattattaatgaaatcacaggggaagagtcagtgaagaagccgcaaactctgatggagcttcaccaggagaagctcaaggaggagaaaaaaaaaaaaaaaaaaaagaagaaaaaacaccgaaaatcaagtagcgactcagacgatgaggaaaagaagcacgagaaactcaaaaaagcactgaatgccgaggaagcccggttgctgcatgtgaaagaaactatgcagatcgatgaacggaagcgaccctacaactccatgtacgaaaccagagagccaacggaagaggagatggaagcttaccgcatgaaacggcagaggccagacgacccaatggcatctttcctgggacagtag

SEQ ID NO: 164850 - DNA, 375 bp, Artificial Sequence
  derived and/or modified sequence
atgagcgccaccgtggtggacgccgtgaacgccgcccccctgagcggctccaaagaaatgtcccttgaagagcccaaaaaaatgaccagagaagactggcgtaaaaagaaagagctggaagagcaaagaaagctgggtaacgctcctgccgaggtcgacgaagagggcaaagacattaatccacatatcccccagtacatttcttcggtaccctggtatatcgacccaagcaagcgacctaccctgaaacatcagcggccccagccagagaagcaaaagcagttcagttcctctggcgaatggtataaacgcggagttaaggagaattccatcattacaaagtaccgcaaaggggcctgcgaaaattgtgggtag

SEQ ID NO: 164851 - DNA, 306 bp, Artificial Sequence
  derived and/or modified sequence
atgagcgccaccgtggtggacgccgtgaacgccgcccccctgagcggaagcaaggagatgagcctggaagagccaaaaaaaatgacacgggaggattggaggaaaaagaaagagctagaggaacagcggaagttaggaaacgctccagccgaggtggatgaggaaggcaaggacatcaatccgcatattccacagtacataagcagcgttccttggtatattgaccctagtaagcggcccacccttaagcaccagcgcccgcaacccgaaaagcaaaagcagttcagcagctccggcgaatggtag

SEQ ID NO: 164852 - DNA, 432 bp, Artificial Sequence
  derived and/or modified sequence
atgagcgccaccgtggtggacgccgtgaacgccgcccccctgagcggatccaaggaaatgtctctggaggagcctaagaaaatgacacgggaagattggaggaagaaaaaggagctggaagaacagcggaagcttggaaatgctcctgctgaagtcgacgaggaaggtaaagacatcaatccgcacataccccagtatatctcatccgtcccgtggtatatcgacccgagcaagaggcctacactcaagcaccagcgacctcagcctgagaagcagaaacagtttagttcatccggcgaatggtataaacggggtgtcaaggaaaattcgatcattactaaatacagaaaaggcgcttgcgagaactgtggagctatgacacacaaaaaaaaagattgtttcgaacgccctcgaagagtgggtgccaaatag

SEQ ID NO: 164853 - DNA, 1761 bp, Artificial Sequence
  derived and/or modified sequence
atgagcgccactgtcgtcgatgctgtgaatgccgcacccttatcaggtagcaaagaaatgagtctcgaagaacccaagaagatgactcgagaggattggcgtaagaaaaaagagctggaagaacagcgcaagttgggcaatgcccctgctgaggtggatgaggagggcaaagacatcaatccacatattcctcagtacatttcaagcgtgccctggtacatcgaccctagtaagagaccaaccctgaaacatcagaggcctcagcctgagaagcagaaacaattttcttctagcggagaatggtacaagcgcggagtaaaagagaacagcattataaccaagtacagaaagggcgcttgtgagaactgtggagccatgacccacaagaagaaggactgttttgagcggcctaggcgggtcggtgctaagtttacgggaacaaatatagctcccgacgagcacgtgcagcctcagttgatgttcgactacgacggcaagcgggaccgctggaatggttataatcccgaggagcacatgaagatcgtcgaggagtatgctaaagtggatctggcgaagcgtacattgaaggcacagaaattgcaggaagagctggcttcagggaagctcgtggagcaggccaactctcccaaacatcagtggggcgaggaagagcccaattcccagatggaaaaggatcataattccgaagacgaagacgaagacaaatatgcagacgacatcgatatgcctggccagaattttgactctaaaaggcgaattactgtacggaacctgagaatccgtgaggatatcgcgaaatacctgagaaatttggatcctaactcagcatactacgatcctaagacccgtgctatgcgggagaatccctatgcaaacgccggtaaaaaccctgacgaggtcagctatgccggagacaacttcgttcgctatacgggcgatacaatcagtatggcacaaacgcagctctttgcctgggaagcttacgacaagggctcagaggtgcacctccaagccgatcctacaaaactggaattactgtataaaagcttcaaggttaagaaagaagactttaaagagcagcaaaaggagagtatactagagaaatacggcggacaggagcatctcgatgctcctcccgcagaattgctgctggcgcaaactgaggactatgtagagtacagccggcacggtactgtgatcaagggccaggagcgcgcagttgcctgttccaagtatgaggaagacgtgaaaatacacaatcacacccacatatggggatcctactggaaggagggccgttgggggtacaagtgttgccattcttttttcaagtattcctattgcaccggcgaagcgggtaaagagatcgtgaactctgaagagtgtattataaacgagattacaggtgaagaaagcgtgaagaaaccgcagaccctgatggaattgcaccaggagaaactgaaagaggaaaagaagaagaagaaaaaaaaaaagaagaagcaccggaaatcgtccagtgattcagacgacgaggaaaagaaacacgagaagttaaaaaaagctcttaacgccgaggaggctagactccttcatgttaaagagaccatgcagatcgatgagagaaagaggccatacaatagcatgtatgaaacaagagagccaacagaggaagaaatggaagcatacagaatgaaacggcagcgccctgacgacccaatggccagcttcctgggacaatag

SEQ ID NO: 164854 - DNA, 375 bp, Artificial Sequence
  derived and/or modified sequence
atgtccgctaccgtggtagatgccgtgaacgctgctcccctctctggatccaaagagatgagtcttgaagagcctaaaaaaatgacccgagaagactggcgcaagaagaaggaattagaggaacagagaaagctgggcaacgccccagctgaggtggatgaagagggtaaggacattaaccctcacataccccagtatattagtagtgtgccgtggtatatcgacccatcaaagaggccaactctcaagcatcaaaggcctcagccagagaagcagaagcagttctcctcaagcggggagtggtataaacgtggggtgaaagagaactcgatcatcacaaagtatagaaaaggggcatgcgagaactgtggctag

SEQ ID NO: 164855 - DNA, 306 bp, Artificial Sequence
  derived and/or modified sequence
atgtccgccactgttgtagatgccgtgaacgcagctccactgagcggcagcaaggagatgtccctggaggaaccgaagaaaatgacgcgtgaagactggcgcaagaagaaagaacttgaagagcaacggaaactgggtaacgcacccgcagaagtagacgaagagggcaaagatataaacccccatatacctcagtatatcagcagcgtcccctggtacatcgacccctcaaagcgtcccaccctgaagcatcaacggccacagccagaaaaacaaaaacaattctcttcctctggggagtggtag

SEQ ID NO: 164856 - DNA, 432 bp, Artificial Sequence
  derived and/or modified sequence
atgtctgccacagtggtcgatgccgtgaacgctgcgcctctatcaggctccaaagagatgtccctcgaggagcccaaaaaaatgactagggaggattggcgtaagaagaaggagttggaagaacagcgcaaattagggaatgcccctgccgaggtggacgaggaggggaaggatataaatcctcacatcccacaatatatctccagcgtgccttggtacatcgatcccagcaaaagacccacattgaagcatcagaggcctcagcctgaaaaacaaaagcagtttagcagttccggggagtggtacaagaggggcgttaaggaaaattcaattatcaccaagtaccggaaaggggcatgcgaaaactgcggggctatgactcacaagaagaaagattgcttcgaacggcctcgcagggtaggagccaagtag

SEQ ID NO: 164857 - DNA, 1761 bp, Artificial Sequence
  derived and/or modified sequence
atgagcgccaccgtggtggacgccgtgaacgccgcccccctgagcggcagcaaggagatgagcctggaggagcccaagaagatgaccagagaggactggagaaagaagaaggagctggaggagcagagaaagctgggcaacgcccccgccgaggtggacgaggagggcaaggacatcaacccccacatcccccagtacatcagcagcgtgccctggtacatcgaccccagcaagagacccaccctgaagcaccagagaccccagcccgagaagcagaagcagttcagcagcagcggcgagtggtacaagagaggcgtgaaggagaacagcatcatcaccaagtacagaaagggcgcctgcgagaactgcggcgccatgacccacaagaagaaggactgcttcgagagacccagaagagtgggcgccaagttcaccggcaccaacatcgcccccgacgagcacgtgcagccccagctgatgttcgactacgacggcaagagagacagatggaacggctacaaccccgaggagcacatgaagatcgtggaggagtacgccaaggtggacctggccaagagaaccctgaaggcccagaagctgcaggaggagctggccagcggcaagctggtggagcaggccaacagccccaagcaccagtggggcgaggaggagcccaacagccagatggagaaggaccacaacagcgaggacgaggacgaggacaagtacgccgacgacatcgacatgcccggccagaacttcgacagcaagagaagaatcaccgtgagaaacctgagaatcagagaggacatcgccaagtacctgagaaacctggaccccaacagcgcctactacgaccccaagaccagagccatgagagagaacccctacgccaacgccggcaagaaccccgacgaggtgagctacgccggcgacaacttcgtgagatacaccggcgacaccatcagcatggcccagacccagctgttcgcctgggaggcctacgacaagggcagcgaggtgcacctgcaggccgaccccaccaagctggagctgctgtacaagagcttcaaggtgaagaaggaggacttcaaggagcagcagaaggagagcatcctggagaagtacggcggccaggagcacctggacgccccccccgccgagctgctgctggcccagaccgaggactacgtggagtacagcagacacggcaccgtgatcaagggccaggagagagccgtggcctgcagcaagtacgaggaggacgtgaagatccacaaccacacccacatctggggcagctactggaaggagggcagatggggctacaagtgctgccacagcttcttcaagtacagctactgcaccggcgaggccggcaaggagatcgtgaacagcgaggagtgcatcatcaacgagatcaccggcgaggagagcgtgaagaagccccagaccctgatggagctgcaccaggagaagctgaaggaggagaagaagaagaagaagaagaagaagaagaagcacagaaagagcagcagcgacagcgacgacgaggagaagaagcacgagaagctgaagaaggccctgaacgccgaggaggccagactgctgcacgtgaaggagaccatgcagatcgacgagagaaagagaccctacaacagcatgtacgagaccagagagcccaccgaggaggagatggaggcctacagaatgaagagacagagacccgacgaccccatggccagcttcctgggccagtag

SEQ ID NO: 164858 - protein, 572 aa, Artificial Sequence
  derived and/or modified sequence
MSFQGKKSIPRITSDRLLIRGGRIVNDDQSFYADVHVEDGLIKQIGENLIVPGGIKTIDAHGLMVLPGGVDVHTRLQMPVLGMTPADDFCQGTKAALAGGTTMILDHVFPDTGVSLLAAYEQWRERADSAACCDYSLHVDITRWHESIKEELEALVKEKGVNSFLVFMAYKDRCQCSDSQMYEIFSIIRDLGALAQVHAENGDIVEEEQKRLLELGITGPEGHVLSHPEEVEAEAVYRAVTIAKQANCPLYVTKVMSKGAADAIAQAKRRGVVVFGEPITASLGTDGSHYWSKNWAKAAAFVTSPPVNPDPTTADHLTCLLSSGDLQVTGSAHCTFTTAQKAVGKDNFALIPEGTNGIEERMSMVWEKCVASGKMDENEFVAVTSTNAAKIFNFYPRKGRVAVGSDADLVIWNPKATKIISAKTHNLNVEYNIFEGVECRGAPAVVISQGRVALEDGKMFVTPGAGRFVPRKTFPDFVYKRIKARNRLAEIHGVPRGLYDGPVHEVMVPAKPGSGAPARASCPGKISVPPVRNLHQSGFSLSGSQADDHIARRTAQKIMAPPGGRSNITSLS

SEQ ID NO: 164859 - protein, 412 aa, Artificial Sequence
  derived and/or modified sequence
MPVLGMTPADDFCQGTKAALAGGTTMILDHVFPDTGVSLLAAYEQWRERADSAACCDYSLHVDITRWHESIKEELEALVKEKGVNSFLVFMAYKDRCQCSDSQMYEIFSIIRDLGALAQVHAENGDIVEEVEAEAVYRAVTIAKQANCPLYVTKVMSKGAADAIAQAKRRGVVVFGEPITASLGTDGSHYWSKNWAKAAAFVTSPPVNPDPTTADHLTCLLSSGDLQVTGSAHCTFTTAQKAVGKDNFALIPEGTNGIEERMSMVWEKCVASGKMDENEFVAVTSTNAAKIFNFYPRKGRVAVGSDADLVIWNPKATKIISAKTHNLLAEIHGVPRGLYDGPVHEVMVPAKPGSGAPARASCPGKISVPPVRNLHQSGFSLSGSQADDHIARRTAQKIMAPPGGRSNITSLS

SEQ ID NO: 164860 - DNA, 1719 bp, Artificial Sequence
  derived and/or modified sequence
atgtcatttcaggggaaaaaatcaattccacgaataacatccgaccgcctgctgattcggggtgggcgcatcgtcaatgatgatcagagcttttatgcggacgtgcatgtggaggatggccttatcaaacagattggcgaaaacctgatcgtccctggggggattaaaacaatcgatgcccacggcctgatggtactgccggggggcgtggacgtccacacacgactccaaatgcccgtcctgggtatgaccccggctgatgacttttgccagggcactaaagccgcactcgccggcgggacaaccatgatactggatcatgtctttccagacacgggagtttccctgctggcagcgtatgagcagtggcgagagagagccgattccgctgcatgctgtgactattcacttcatgtagatattacacggtggcatgaatccatcaaggaagagctggaggccttggttaaagaaaagggggttaatagttttttggtctttatggcgtataaggatagatgtcagtgttcggatagccagatgtacgagatcttctcaattattagggaccttggcgccctggcgcaggtgcacgcagagaacggagatatcgtggaggaggagcagaaacgccttctggaactgggcatcacaggacctgaaggacacgtcctaagtcaccctgaggaggtagaagcagaggctgtataccgggctgtgactatcgcaaaacaggccaattgtccgctatacgtcacaaaagttatgtctaagggcgctgcagacgccatcgcccaggcaaaaaggcgtggggtagtggtgttcggcgaacccatcaccgcgtccctcggaaccgacggttcccactattggtccaagaactgggctaaggccgccgcatttgttaccagccctccagtgaaccccgaccctacgaccgctgaccacctcacgtgccttctctcttcaggggatttgcaggttaccgggtcggcacattgcaccttcacaacagctcaaaaagccgtaggcaaagataattttgcccttatccccgaaggcacaaatggcatcgaggaaaggatgtccatggtgtgggagaaatgcgtggcttctggcaagatggacgagaatgagtttgtggcagttacatctaccaatgccgctaagattttcaatttttaccccaggaagggtcgcgtggcggttggaagtgacgcggatttagtcatctggaatcccaaagctaccaagataattagcgctaaaacacataacctcaacgtggagtataacatattcgagggtgtcgaatgccgaggggctccagccgttgtgatctcacagggcagggtggccctggaggacggaaagatgtttgtgacgcctggggctggcaggtttgtcccacggaagactttcccagatttcgtatataaaaggattaaagccaggaataggctggctgagattcatggtgtgccaagagggctctacgacgggcccgtccacgaagttatggtgccagccaagcccgggtctggggccccagctcgtgcatcatgccctggtaagataagcgtgcctcccgtccgcaatctccatcagtcagggttttccctctctggctctcaggctgacgaccatatagcccgccgcactgcccagaagatcatggcgccacctggcggacgatcgaatatcactagcctatcctag

SEQ ID NO: 164861 - DNA, 1719 bp, Artificial Sequence
  derived and/or modified sequence
atgtccttccagggcaagaagagcatcccccgcatcaccagtgaccggctgctgatccggggcggccgcatcgtgaatgatgaccagagcttctatgcagatgtgcacgtggaggatggcctcatcaagcagattggagaaaatctcatcgtgcctgggggcatcaagaccattgatgcccacggcctgatggtgctgcctggaggagtggatgtgcacacccggctgcagatgcctgtgctgggcatgaccccagcagatgacttctgccagggcaccaaggccgccctggccggcggcaccaccatgatcctggaccacgtgtttcctgacaccggggtgtccctgctggccgcctatgagcagtggagggagagagctgacagcgctgcctgctgtgactacagcctgcacgtggacatcacccgctggcatgagagcatcaaggaggagctggaggccctggtgaaggagaagggcgtgaacagcttcctggtgttcatggcctacaaggaccgctgccagtgcagcgacagccagatgtatgagatcttcagcatcatccgggacctgggcgccctggcccaggtgcatgctgaaaatggagacatcgtggaggaggagcagaagaggctgctggagctgggcatcaccggccctgagggccacgtgctgagccaccctgaggaggtggaggccgaggccgtgtacagagctgtgaccatcgccaagcaggccaactgccccctgtatgtgaccaaggtgatgagcaaaggagctgctgatgccatcgcccaggccaagagaagaggagtggtggtgtttggagagcccatcacagccagcctgggcacagatggcagccactactggagcaagaactgggccaaggctgctgcctttgtgaccagcccccctgtgaacccagaccccaccacagctgaccacctgacctgcctgctgagcagcggggacctgcaggtgactggaagtgcccactgcaccttcaccacagcccagaaggctgtgggcaaggacaactttgccctgatccctgagggcaccaacggcatcgaggagaggatgtccatggtgtgggagaagtgtgtggccagcggcaagatggatgaaaatgaatttgtggccgtgaccagcaccaatgctgccaagatcttcaacttctaccccaggaagggccgggtggccgtgggcagtgatgctgacctggtgatctggaaccccaaggccaccaagatcatcagcgccaagacccacaacctgaatgtggagtacaacatctttgagggcgtggagtgccgcggggccccagctgtggtgatcagccagggccgggtggccctggaggatggcaagatgtttgtgaccccaggagctggccgctttgtgcccaggaagaccttcccagactttgtgtacaagaggatcaaggccaggaaccggctggccgagatccacggcgtgccccggggcctgtatgatggccctgtgcatgaggtgatggtgcctgccaagccaggcagcggggccccagcccgggccagctgccctgggaagatctctgtgccccctgtgaggaacctgcaccagagcggcttcagcctgagcggcagccaggctgatgaccacatcgcccggaggacagcccagaagatcatggcccctcctgggggccgcagcaacatcaccagcctgtcctag

SEQ ID NO: 164862 - DNA, 1719 bp, Artificial Sequence
  derived and/or modified sequence
atgagcttccagggcaagaagagcatcccccggatcaccagcgacagacttctaatccggggcggcagaattgtcaatgacgaccagagcttttatgccgacgttcatgtggaggacgggcttatcaagcagattggcgagaatctgattgtccctggcgggatcaagacgattgacgcacacggcctgatggttttaccgggcggcgtggacgtgcatacccggctgcagatgccggtcctcggaatgacaccagcggacgatttctgccagggtacaaaggccgcacttgcggggggcaccacaatgattctagatcacgtgttccctgatacaggagtgtctctgctggccgcctacgaacagtggcgcgaacgtgccgatagcgccgcctgttgcgactatagcttgcatgttgacattactaggtggcacgagagtataaaggaggagctcgaagctctagtaaaggagaagggggtgaatagtttcctggtctttatggcatataaggaccggtgccagtgttccgactcccagatgtatgagatcttctccataattagggatctcggggctctcgcccaggtccatgctgagaatggggatattgtagaggaggagcagaagaggttgctggaactcggtattaccgggccagaagggcacgtactgagccatccagaagaggtcgaagccgaagccgtttaccgggccgttaccatagcaaagcaagcaaattgtccgttgtatgtgacaaaagtgatgtctaagggcgcagccgacgctatcgcccaggcaaagcgtaggggcgtcgttgtgtttggcgaacctattacggcaagtctagggaccgacggatctcattattggagcaagaactgggccaaggctgcggcgtttgtcacgagccccccggtcaacccggatccgaccactgccgatcacttgacttgtctgctaagcagcggggatctccaggtcactggttctgcccattgcacatttacaaccgctcaaaaggccgtcggtaaggacaatttcgcactaattcccgaaggcactaacggcatcgaagaaaggatgagcatggtctgggaaaagtgcgttgccagtggcaagatggacgaaaacgaatttgtggctgtgacctcaaccaacgctgcaaagatttttaatttttaccctaggaaggggcgggttgccgtggggagcgatgctgatttggtgatctggaaccccaaggcaactaagatcatttcagccaaaactcacaacttaaatgtcgaatataacatcttcgagggagttgagtgtcggggcgcgccagctgtggtgatctcccagggtcgcgtggcactggaagacggcaaaatgtttgtgactccgggggcgggacgattcgtaccccggaaaacgtttcccgattttgtgtacaaacgcattaaagcccgcaatcggttggccgagatccacggcgttcccagaggtctctacgacggtcctgtgcatgaagtaatggtcccagccaagcctgggtccggagcccccgcgcgtgccagctgccccgggaagatcagtgtgccaccagtccggaatctgcaccagtcgggattttctctcagcggaagccaggctgatgaccatattgctcgacgaaccgctcagaaaatcatggcccccccgggtggccgctcaaatataacaagtcttagttag

SEQ ID NO: 164863 - DNA, 1719 bp, Artificial Sequence
  derived and/or modified sequence
atgtcattccaaggcaagaagagtatccctaggattaccagtgaccggctgctgatacgaggaggccgtatcgtgaacgacgatcagtcattctatgctgacgtgcatgtcgaggatgggctgatcaaacagatcggagagaaccttatcgtccccggaggtattaagacaattgacgcgcacggactcatggtgttgccaggaggggttgacgtgcatacacgtctgcagatgccagtcctgggcatgaccccagccgatgacttttgtcagggaaccaaagctgctctcgccggaggaaccacaatgatactggaccacgtttttccagacacgggagtcagcttgcttgctgcatacgagcagtggagggagagagccgactcagccgcatgttgtgattactctcttcacgtggatatcaccaggtggcacgagtcaattaaggaagaactagaggccctggtcaaggaaaagggcgtgaatagctttctggtgtttatggcctacaaagaccgatgtcagtgcagcgatagccagatgtacgaaatcttctccatcattagggacctcggagcgctggctcaggttcacgccgaaaacggcgatatcgtcgaggaagagcagaaaaggttattggaactgggtattactggacctgagggacacgtgttatctcatcctgaggaagttgaggccgaggcagtatatcgcgctgtgacaatcgccaagcaggctaattgccctctgtacgtgaccaaagttatgtcaaaaggcgctgctgatgctatcgcacaggctaagcgtagaggtgtggtggttttcggcgaaccaattacggcatctctcggcaccgacggatcacactactggagcaaaaattgggccaaggctgccgcatttgtgactagccctccagtgaatcccgatcccaccacggcggaccacctcacatgtttactgagttctggtgacctgcaagtcactggctccgctcattgcaccttcaccacagcacaaaaggcagtcggtaaagacaattttgcactgatacctgaagggaccaatggcatcgaggaacggatgagtatggtgtgggagaagtgcgtggccagtggtaagatggacgaaaacgagtttgtggctgtaaccagcacaaatgcagccaagatttttaacttctacccaaggaagggacgggtggcagttggatccgacgccgatctcgtgatatggaaccccaaggctacaaaaattatctcagcgaagacccataatctcaatgtcgagtataacattttcgagggcgtcgagtgtcgtggtgcgcctgccgtcgtaatttcacaggggagagttgctcttgaagatggaaaaatgtttgtgactcctggcgctggtcgctttgtcccacgaaagaccttcccagactttgtgtacaagcgaatcaaggcaagaaataggttagcggaaatacacggagttccgcgtgggctgtacgacggtccagtgcacgaggtgatggttcctgcaaaacccggtagtggtgcaccagcacgggcatcttgtccaggcaaaatctcagtgcctccagtgcggaatttgcaccagagtggattctccctgtccggctcccaggccgacgaccacatcgcgcgaaggacagcccagaaaattatggccccacctggaggacgtagcaatatcacctctctctcttag

SEQ ID NO: 164864 - DNA, 1719 bp, Artificial Sequence
  derived and/or modified sequence
atgagcttccagggcaagaagagcatccccagaatcaccagcgacagactgctgatcagaggcggcagaatcgtgaacgacgaccagagcttctacgccgacgtgcacgtggaggacggcctgatcaagcagatcggcgagaacctgatcgtgcccggcggcatcaagaccatcgacgcccacggcctgatggtgctgcccggcggcgtggacgtgcacaccagactgcagatgcccgtgctgggcatgacccccgccgacgacttctgccagggcaccaaggccgccctggccggcggcaccaccatgatcctggaccacgtgttccccgacaccggcgtgagcctgctggccgcctacgagcagtggagagagagagccgacagcgccgcctgctgcgactacagcctgcacgtggacatcaccagatggcacgagagcatcaaggaggagctggaggccctggtgaaggagaagggcgtgaacagcttcctggtgttcatggcctacaaggacagatgccagtgcagcgacagccagatgtacgagatcttcagcatcatcagagacctgggcgccctggcccaggtgcacgccgagaacggcgacatcgtggaggaggagcagaagagactgctggagctgggcatcaccggccccgagggccacgtgctgagccaccccgaggaggtggaggccgaggccgtgtacagagccgtgaccatcgccaagcaggccaactgccccctgtacgtgaccaaggtgatgagcaagggcgccgccgacgccatcgcccaggccaagagaagaggcgtggtggtgttcggcgagcccatcaccgccagcctgggcaccgacggcagccactactggagcaagaactgggccaaggccgccgccttcgtgaccagcccccccgtgaaccccgaccccaccaccgccgaccacctgacctgcctgctgagcagcggcgacctgcaggtgaccggcagcgcccactgcaccttcaccaccgcccagaaggccgtgggcaaggacaacttcgccctgatccccgagggcaccaacggcatcgaggagagaatgagcatggtgtgggagaagtgcgtggccagcggcaagatggacgagaacgagttcgtggccgtgaccagcaccaacgccgccaagatcttcaacttctaccccagaaagggcagagtggccgtgggcagcgacgccgacctggtgatctggaaccccaaggccaccaagatcatcagcgccaagacccacaacctgaacgtggagtacaacatcttcgagggcgtggagtgcagaggcgcccccgccgtggtgatcagccagggcagagtggccctggaggacggcaagatgttcgtgacccccggcgccggcagattcgtgcccagaaagaccttccccgacttcgtgtacaagagaatcaaggccagaaacagactggccgagatccacggcgtgcccagaggcctgtacgacggccccgtgcacgaggtgatggtgcccgccaagcccggcagcggcgcccccgccagagccagctgccccggcaagatcagcgtgccccccgtgagaaacctgcaccagagcggcttcagcctgagcggcagccaggccgacgaccacatcgccagaagaaccgcccagaagatcatggccccccccggcggcagaagcaacatcaccagcctgagctag

SEQ ID NO: 164865 - DNA, 2715 bp, Artificial Sequence
  derived and/or modified sequence
gcccagcgggggcgggaccggaacggagccgtgcggccccgcgcgctcgcagtctgtctcccgccgtccccacgcacgcgtcccggctcacgcgtccccccgcccgcccgcccgcccgcccgcccccgcttgtgccgcccctaccagagacccccaggagcaggatgtccttccagggcaagaaaagcatcccccggatcacgagtgaccgccttctgatcagaggtgggaggatcgtgaatgacgaccagtccttttacgctgatgtgcacgtggaagatggcttgataaaacaaatcggagaaaacctcatcgtccctgggggcatcaagaccattgacgcccacggcctgatggtccttcctggtggcgttgacgtccacacaaggctgcagatgcctgtcctgggcatgacaccggctgacgacttctgtcagggcaccaaggcagcgctagcaggaggaaccaccatgatcttggaccacgtcttccccgacacgggtgtgagcctgctggcggcctacgagcagtggcgggagcgggcggacagcgcggcctgctgcgactactccctgcacgtggacatcacccgatggcatgagagcatcaaggaggagctggaggccctggtcaaggagaagggtgtgaactccttcctggtcttcatggcatacaaggaccggtgccagtgcagcgacagccagatgtacgagatcttcagcatcatccgggacctgggggccttggcccaggtgcacgctgagaacggggacatcgtggaggaggagcagaagcggttgctggagctcggcatcactggccccgagggccacgtgctcagccaccccgaggaggtggaggctgaggcggtgtaccgagctgtcaccatcgccaagcaggcaaactgcccgctgtacgtcaccaaggtgatgagcaagggggcggccgacgccatcgctcaggccaagcgcagaggggtggtcgtgtttggggagcccatcaccgccagcctgggcaccgacggttcacactactggagcaagaactgggccaaggccgcagccttcgtcacatcaccccctgtcaacccagaccccaccacggcggaccacctcacctgcttgctgtccagcggggacctccaggtgacaggcagcgcccactgcaccttcaccactgcccagaaggctgtgggcaaggacaacttcgcgctgatccccgagggcaccaacggcattgaggagcgcatgtcgatggtctgggagaaatgtgtggcctctgggaagatggacgagaatgagttcgtcgcggtgaccagtacaaatgctgccaaaatcttcaatttttacccaaggaaggggcgagtggctgtgggctctgacgctgacctggtcatatggaaccccaaggccaccaagatcatctctgccaagacccacaatctgaacgtggagtacaacatcttcgagggagtggagtgccggggagcgcctgccgtggtcataagtcagggccgagtggcgctggaggacgggaagatgtttgtcaccccgggggcgggccgcttcgtccctcggaaaacattcccggactttgtctacaagaggatcaaagctcgcaacaggctggcggagatccacggtgtgccccgtggactgtatgacgggcccgtccacgaggtgatggtgcctgccaagccagggagtggcgctccggcccgcgcgtcctgcccaggcaagatctccgtccctcctgtgcgcaacctacatcagtcggggttcagcctatctgggtctcaggctgatgaccacatcgcccgacgcacagcacagaagatcatggcaccacctggcggccgctccaacatcacctctctctcctagacgcccaggaccggccctgtgagccgtgctggccccacccgaggccgcgggggccccagggcactcgcccccctccttagcattttcttttgtagaagtttctcgaaggtgcttggcggtcttgccttccccctccccacaggctctccttgtggggtcccaggtcctgctgccaagagcccctcaagagaagggctgaacctggggagatgtcactgccagggtgaggtggagccacatggcagggacaatgccggcagcctgagcccaggcaccccagtgcccgctgggcccagcctggggacagggaacctgccgggctcacagtgtgggagcagctggacaccaggcttcttggtgaaccggcgaggggccgagtcccgcctggtgggcatttgccgccgcctccccaccaccagtcactgcctcgcagagccctacactcccgcagccgctcctcagaggcctgtgcccatcgcaggcctgggaggaaagtgggcgcagagccctcctgctcacacagctgctgagacttcagggacccatcagaacttggtgcagcacagccccgcccgtggagggtcccttttacgcaccccaaggcccacacctaagcttccatgtagccctcatccagggaagttttgcgatcctttaggaagacactgtcctcttattacagattgtgtatttccgtaggcttcttagtagcagctttgtacactgaggacactgtagccaggaacctgtgcatgccacccaccgcctggacaggcagtcatcctgcctctgatgtgaatcaggcccattaaagacgtctgggtttgaagcc

SEQ ID NO: 164866 - DNA, 2466 bp, Artificial Sequence
  derived and/or modified sequence
gcccagcgggggcgggaccggaacggagccgtgcggccccgcgcgctcgcagtctgtctcccgccgtccccacgcacgcgtcccggctcacgcgtccccccgcccgcccgcccgcccgcccgcccccgcttgtgccgcccctaccagagacccccaggagcaggatgtccttccagggcaagaaaagcatcccccggatcacgagtgaccgccttctgatcagaggtgggaggatcgtgaatgacgaccagtccttttacgctgatgtgcacgtggaagatggcttgataaaacaaatcggagaaaacctcatcgtccctgggggcatcaagaccattgacgcccacggcctgatggtccttcctggtggcgttgacgtccacacaaggctgcagatgcctgtcctgggcatgacaccggctgacgacttctgtcagggcaccaaggcagcgctagcaggaggaaccaccatgatcttggaccacgtcttccccgacacgggtgtgagcctgctggcggcctacgagcagtggcgggagcgggcggacagcgcggcctgctgcgactactccctgcacgtggacatcacccgatggcatgagagcatcaaggaggagctggaggccctggtcaaggagaagggtgtgaactccttcctggtcttcatggcatacaaggaccggtgccagtgcagcgacagccagatgtacgagatcttcagcatcatccgggacctgggggccttggcccaggtgcacgctgagaacggggacatcgtggaggaggtggaggctgaggcggtgtaccgagctgtcaccatcgccaagcaggcaaactgcccgctgtacgtcaccaaggtgatgagcaagggggcggccgacgccatcgctcaggccaagcgcagaggggtggtcgtgtttggggagcccatcaccgccagcctgggcaccgacggttcacactactggagcaagaactgggccaaggccgcagccttcgtcacatcaccccctgtcaacccagaccccaccacggcggaccacctcacctgcttgctgtccagcggggacctccaggtgacaggcagcgcccactgcaccttcaccactgcccagaaggctgtgggcaaggacaacttcgcgctgatccccgagggcaccaacggcattgaggagcgcatgtcgatggtctgggagaaatgtgtggcctctgggaagatggacgagaatgagttcgtcgcggtgaccagtacaaatgctgccaaaatcttcaatttttacccaaggaaggggcgagtggctgtgggctctgacgctgacctggtcatatggaaccccaaggccaccaagatcatctctgccaagacccacaatctgctggcggagatccacggtgtgccccgtggactgtatgacgggcccgtccacgaggtgatggtgcctgccaagccagggagtggcgctccggcccgcgcgtcctgcccaggcaagatctccgtccctcctgtgcgcaacctacatcagtcggggttcagcctatctgggtctcaggctgatgaccacatcgcccgacgcacagcacagaagatcatggcaccacctggcggccgctccaacatcacctctctctcctagacgcccaggaccggccctgtgagccgtgctggccccacccgaggccgcgggggccccagggcactcgcccccctccttagcattttcttttgtagaagtttctcgaaggtgcttggcggtcttgccttccccctccccacaggctctccttgtggggtcccaggtcctgctgccaagagcccctcaagagaagggctgaacctggggagatgtcactgccagggtgaggtggagccacatggcagggacaatgccggcagcctgagcccaggcaccccagtgcccgctgggcccagcctggggacagggaacctgccgggctcacagtgtgggagcagctggacaccaggcttcttggtgaaccggcgaggggccgagtcccgcctggtgggcatttgccgccgcctccccaccaccagtcactgcctcgcagagccctacactcccgcagccgctcctcagaggcctgtgcccatcgcaggcctgggaggaaagtgggcgcagagccctcctgctcacacagctgctgagacttcagggacccatcagaacttggtgcagcacagccccgcccgtggagggtcccttttacgcaccccaaggcccacacctaagcttccatgtagccctcatccagggaagttttgcgatcctttaggaagacactgtcctcttattacagattgtgtatttccgtaggcttcttagtagcagctttgtacactgaggacactgtagccaggaacctgtgcatgccacccaccgcctggacaggcagtcatcctgcctctgatgtgaatcaggcccattaaagacgtctgggtttgaagcc

SEQ ID NO: 164867 - protein, 175 aa, Artificial Sequence
  derived and/or modified sequence
MPKRSCPFADVAPLQLKVRVSQRELSRGVCAERYSQEVFEKTKRLLFLGAQAYLDHVWDEGCAVVHLPESPKPGPTGAPRAARGQMLIGPDGRLIRSLGQASEADPSGVASIACSSCVRAVDGKAVCGQCERALCGQCVRTCWGCGSVACTLCGLVDCSDMYEKVLCTSCAMFET

SEQ ID NO: 164868 - DNA, 528 bp, Artificial Sequence
  derived and/or modified sequence
atgcccaagagaagctgccccttcgccgacgtggcccccctgcagctgaaggtgagagtgagccagagagagctgagcagaggcgtgtgcgccgagagatacagccaggaggtgttcgagaagaccaagagactgctgttcctgggcgcccaggcctacctggaccacgtgtgggacgagggctgcgccgtggtgcacctgcccgagagccccaagcccggccccaccggcgcccccagagccgccagaggccagatgctgatcggccccgacggcagactgatcagaagcctgggccaggccagcgaggccgaccccagcggcgtggccagcatcgcctgcagcagctgcgtgagagccgtggacggcaaggccgtgtgcggccagtgcgagagagccctgtgcggccagtgcgtgagaacctgctggggctgcggcagcgtggcctgcaccctgtgcggcctggtggactgcagcgacatgtacgagaaggtgctgtgcaccagctgcgccatgttcgagacctag

SEQ ID NO: 164869 - DNA, 802 bp, Artificial Sequence
  derived and/or modified sequence
aaacccgctctcgcccgcggatgggcgcgcagctgtgacgtcacggcgtcgttggtaaggggctggcggccggggagctgcgtagctcccggccccgcggccatgcccaagcggagctgccccttcgcggacgtggccccgctacagctcaaggtccgcgtgagccagagggagttgagccgcggcgtgtgcgccgagcgctactcgcaggaggtcttcgagaagaccaagcgactcctgttcctcggggcccaggcctacctggaccacgtgtgggatgaaggctgtgccgtcgttcacctgccagagtccccaaagcctggccctacaggggccccgagggctgcacgtgggcagatgctgattggaccagacggccgcctgatcaggagccttgggcaggcctccgaagctgacccatctggggtagcgtccattgcctgttcctcatgcgtgcgagccgtggatgggaaggcggtctgcggtcagtgtgagcgagccctgtgcgggcagtgtgtgcgcacctgctggggctgcggctccgtggcctgtaccctgtgtggcctcgtggactgcagtgacatgtacgagaaagtgctgtgcaccagctgtgccatgttcgagacctgaggctggctcaagccggctgccttcaccgggagccacgccgtgcatggcagccttccctggacgagcgctcggtgttcacactgaactgtggggtcgacgggaggggtgccttttacatgttctattttgtatcctaatgacagaatgaataaacctctttatatttgcacaa

SEQ ID NO: 164870 - DNA, 528 bp, Artificial Sequence
  derived and/or modified sequence
atgccaaagcggagttgtccctttgctgatgtggctccactccagctgaaagtccgagtctctcagcgggaactgtcccggggagtgtgcgcggagcgatactctcaggaagtatttgagaaaacaaagcgcttattgttcctcggtgcacaggcatatctcgatcacgtatgggatgagggctgtgcggtggtgcacctcccagaatcaccaaaaccagggcccaccggggcgcccagggctgcccggggccagatgctgattggccccgatggaagacttattcgctcactgggccaggcttctgaagctgacccttccggagttgcttccatcgcatgtagctcatgtgtgagagcggtggacggcaaagcagtttgtgggcagtgtgaacgcgccctctgcggtcagtgcgttcgcacctgttggggatgtggtagtgtggcctgtactctctgcgggctcgtcgactgctcagatatgtatgaaaaggttttgtgcacatcatgcgctatgtttgagacatag

SEQ ID NO: 164871 - DNA, 528 bp, Artificial Sequence
  derived and/or modified sequence
atgcccaagaggagctgcccctttgctgatgtggcccccctgcagctgaaggtgcgggtgtcccagcgggagctgagccggggcgtgtgtgccgagcgctacagccaggaggtgtttgagaagaccaagaggctgctcttcctgggcgcccaggcctacctggaccacgtgtgggatgagggctgtgctgtggtgcacctgcctgagagccccaagccaggccccaccggggcccccagggctgcccggggccagatgctgattggaccagatggccgcctcatccgcagcctgggccaggccagcgaggccgaccccagcggcgtggccagcatcgcctgcagcagctgtgtgcgggctgtggatggcaaggctgtgtgtggccagtgtgagcgggccctgtgtggccagtgtgtgaggacctgctggggctgcggctctgtggcctgcaccctgtgtggcctggtggactgcagcgacatgtatgagaaggtgctgtgcaccagctgtgccatgtttgagacctag

SEQ ID NO: 164872 - DNA, 528 bp, Artificial Sequence
  derived and/or modified sequence
atgcccaagcggagctgccccttcgccgacgtggcccccctgcagctgaaagtacgggtgagtcagagggaactgtccaggggcgtgtgcgctgaaaggtattcccaagaagtgtttgagaaaacgaaaaggctgctctttctgggcgcccaggcctacctggatcatgtctgggacgaagggtgcgcggtagtgcatctgcctgaaagccccaaaccaggtcctacgggagctccccgcgccgctcgtggccagatgctgataggccccgacggtcgtttaatccggagcctgggccaagcctcagaggcggatccctcaggagtcgccagcatcgcctgctcgtcttgcgtgcgtgctgtcgacggcaaagccgtctgcgggcagtgcgaacgggcactttgcggccagtgcgtgcgaacctgctggggttgtgggtcagttgcttgtactctatgcggcctggtggactgctctgatatgtatgaaaaagtgctctgcacaagctgcgcgatgttcgagacgtag

SEQ ID NO: 164873 - DNA, 528 bp, Artificial Sequence
  derived and/or modified sequence
atgcctaagcggtcctgcccatttgccgatgtggcaccgctgcagctgaaggttcgcgtttcgcaacgggaactaagccggggtgtctgtgcagaaaggtactctcaggaggtgttcgagaagaccaagcgcctgctattcctgggcgcacaagcctacttagatcacgtatgggatgaggggtgtgccgtggtccatcttccggagagcccaaagccaggcccaaccggagcccctcgagccgcacggggtcagatgctgattgggcctgatggcaggcttataaggtccctagggcaagcctccgaagcagacccctctggggttgcaagtatagcatgcagctcatgcgtccgcgcagtagacggaaaagccgtgtgcggacagtgcgagagagcgctatgtggacagtgcgttaggacatgctgggggtgcggtagcgtcgcgtgcaccttgtgtgggcttgtggattgcagcgatatgtatgagaaggttttgtgcacatcctgtgccatgttcgagacttag

SEQ ID NO: 164874 - protein, 543 aa, Artificial Sequence
  derived and/or modified sequence
MMPTPVILLKEGTDSSQGIPQLVSNISACQVIAEAVRTTLGPRGMDKLIVDGRGKATISNDGATILKLLDVVHPAAKTLVDIAKSQDAEVGDGTTSVTLLAAEFLKQVKPYVEEGLHPQIIIRAFRTATQLAVNKIKEIAVTVKKADKVEQRKLLEKCAMTALSSKLISQQKAFFAKMVVDAVMMLDDLLQLKMIGIKKVQGGALEDSQLVAGVAFKKTFSYAGFEMQPKKYHNPKIALLNVELELKAEKDNAEIRVHTVEDYQAIVDAEWNILYDKLEKIHHSGAKVVLSKLPIGDVATQYFADRDMFCAGRVPEEDLKRTMMACGGSIQTSVNALSADVLGRCQVFEETQIGGERYNFFTGCPKAKTCTFILRGGAEQFMEETERSLHDAIMIVRRAIKNDSVVAGGGAIEMELSKYLRDYSRTIPGKQQLLIGAYAKALEIIPRQLCDNAGFDATNILNKLRARHAQGGTWYGVDINNEDIADNFEAFVWEPAMVRINALTAASEAACLIVSVDETIKNPRSTVDAPTAAGRGRGRGRPH

SEQ ID NO: 164875 - protein, 443 aa, Artificial Sequence
  derived and/or modified sequence
MAEFLKQVKPYVEEGLHPQIIIRAFRTATQLAVNKIKEIAVTVKKADKVEQRKLLEKCAMTALSSKLISQQKAFFAKMVVDAVMMLDDLLQLKMIGIKKVQGGALEDSQLVAGVAFKKTFSYAGFEMQPKKYHNPKIALLNVELELKAEKDNAEIRVHTVEDYQAIVDAEWNILYDKLEKIHHSGAKVVLSKLPIGDVATQYFADRDMFCAGRVPEEDLKRTMMACGGSIQTSVNALSADVLGRCQVFEETQIGGERYNFFTGCPKAKTCTFILRGGAEQFMEETERSLHDAIMIVRRAIKNDSVVAGGGAIEMELSKYLRDYSRTIPGKQQLLIGAYAKALEIIPRQLCDNAGFDATNILNKLRARHAQGGTWYGVDINNEDIADNFEAFVWEPAMVRINALTAASEAACLIVSVDETIKNPRSTVDAPTAAGRGRGRGRPH

SEQ ID NO: 164876 - protein, 415 aa, Artificial Sequence
  derived and/or modified sequence
MWRKVYTPRSSFELSAQPPSWEQRKLLEKCAMTALSSKLISQQKAFFAKMVVDAVMMLDDLLQLKMIGIKKVQGGALEDSQLVAGVAFKKTFSYAGFEMQPKKYHNPKIALLNVELELKAEKDNAEIRVHTVEDYQAIVDAEWNILYDKLEKIHHSGAKVVLSKLPIGDVATQYFADRDMFCAGRVPEEDLKRTMMACGGSIQTSVNALSADVLGRCQVFEETQIGGERYNFFTGCPKAKTCTFILRGGAEQFMEETERSLHDAIMIVRRAIKNDSVVAGGGAIEMELSKYLRDYSRTIPGKQQLLIGAYAKALEIIPRQLCDNAGFDATNILNKLRARHAQGGTWYGVDINNEDIADNFEAFVWEPAMVRINALTAASEAACLIVSVDETIKNPRSTVDAPTAAGRGRGRGRPH

SEQ ID NO: 164877 - protein, 499 aa, Artificial Sequence
  derived and/or modified sequence
MDKLIVDGRGKATISNDGATILKLLDVVHPAAKTLVDIAKSQDAEVGDGTTSVTLLAAEFLKQVKPYVEEGLHPQIIIRAFRTATQLAVNKIKEIAVTVKKADKVEQRKLLEKCAMTALSSKLISQQKAFFAKMVVDAVMMLDDLLQLKMIGIKKVQGGALEDSQLVAGVAFKKTFSYAGFEMQPKKYHNPKIALLNVELELKAEKDNAEIRVHTVEDYQAIVDAEWNILYDKLEKIHHSGAKVVLSKLPIGDVATQYFADRDMFCAGRVPEEDLKRTMMACGGSIQTSVNALSADVLGRCQVFEETQIGGERYNFFTGCPKAKTCTFILRGGAEQFMEETERSLHDAIMIVRRAIKNDSVVAGGGAIEMELSKYLRDYSRTIPGKQQLLIGAYAKALEIIPRQLCDNAGFDATNILNKLRARHAQGGTWYGVDINNEDIADNFEAFVWEPAMVRINALTAASEAACLIVSVDETIKNPRSTVDAPTAAGRGRGRGRPH

SEQ ID NO: 164878 - DNA, 1500 bp, Artificial Sequence
  derived and/or modified sequence
atggacaagctgatcgtggacggcagaggcaaggccaccatcagcaacgacggcgccaccatcctgaagctgctggacgtggtgcaccccgccgccaagaccctggtggacatcgccaagagccaggacgccgaggtgggcgacggcaccaccagcgtgaccctgctggccgccgagttcctgaagcaggtgaagccctacgtggaggagggcctgcacccccagatcatcatcagagccttcagaaccgccacccagctggccgtgaacaagatcaaggagatcgccgtgaccgtgaagaaggccgacaaggtggagcagagaaagctgctggagaagtgcgccatgaccgccctgagcagcaagctgatcagccagcagaaggccttcttcgccaagatggtggtggacgccgtgatgatgctggacgacctgctgcagctgaagatgatcggcatcaagaaggtgcagggcggcgccctggaggacagccagctggtggccggcgtggccttcaagaagaccttcagctacgccggcttcgagatgcagcccaagaagtaccacaaccccaagatcgccctgctgaacgtggagctggagctgaaggccgagaaggacaacgccgagatcagagtgcacaccgtggaggactaccaggccatcgtggacgccgagtggaacatcctgtacgacaagctggagaagatccaccacagcggcgccaaggtggtgctgagcaagctgcccatcggcgacgtggccacccagtacttcgccgacagagacatgttctgcgccggcagagtgcccgaggaggacctgaagagaaccatgatggcctgcggcggcagcatccagaccagcgtgaacgccctgagcgccgacgtgctgggcagatgccaggtgttcgaggagacccagatcggcggcgagagatacaacttcttcaccggctgccccaaggccaagacctgcaccttcatcctgagaggcggcgccgagcagttcatggaggagaccgagagaagcctgcacgacgccatcatgatcgtgagaagagccatcaagaacgacagcgtggtggccggcggcggcgccatcgagatggagctgagcaagtacctgagagactacagcagaaccatccccggcaagcagcagctgctgatcggcgcctacgccaaggccctggagatcatccccagacagctgtgcgacaacgccggcttcgacgccaccaacatcctgaacaagctgagagccagacacgcccagggcggcacctggtacggcgtggacatcaacaacgaggacatcgccgacaacttcgaggccttcgtgtgggagcccgccatggtgagaatcaacgccctgaccgccgccagcgaggccgcctgcctgatcgtgagcgtggacgagaccatcaagaaccccagaagcaccgtggacgcccccaccgccgccggcagaggcagaggcagaggcagaccccactag

SEQ ID NO: 164879 - DNA, 1632 bp, Artificial Sequence
  derived and/or modified sequence
atgatgccaacgcccgtgattctcctgaaagaagggacggacagctcacagggaatccctcagctggtgtccaatatcagtgcctgtcaggtgatagcagaggctgttcgtacaacactcgggcccagagggatggacaagctcatagtcgacggaagagggaaggccaccatctctaatgacggcgctacaattcttaagctgttagatgtggtccaccccgcggccaagactttggtagacatcgccaaatcgcaagatgctgaagtgggggatggtacaacttccgtgaccttgctcgcagcagaatttctaaaacaggtgaaaccatatgtcgaggaaggcctccatccacagattatcatccgagcgtttcgcacagcaacccagctcgcggtaaataagattaaggaaattgccgtgaccgttaagaaagctgacaaggtggaacagcgtaagctcctggagaaatgcgctatgaccgctctgtcctctaagctgatttctcaacagaaggcgttctttgctaagatggttgtagacgcagtgatgatgctcgatgacctccttcaactcaaaatgattgggattaagaaagtgcaggggggcgcattagaggattctcagcttgttgccggagttgctttcaagaagacattcagctacgctggcttcgaaatgcagcctaaaaagtaccataatcctaaaatcgccctgctgaatgtggaacttgagcttaaggcggaaaaggacaacgcggaaattagggttcatacagtggaagactaccaagctatagtggatgcagaatggaacattctgtacgataaacttgagaagatccaccactctggggccaaagtggttttatcaaagctcccaatcggtgacgttgccacccaatattttgccgaccgcgacatgttctgcgccggtcgggtgccagaggaggatctcaagagaacgatgatggcgtgcggagggagcatccagaccagtgtaaacgcactgtccgcggacgtgctcgggcgttgccaggtatttgaggagactcagatcggcggggagaggtataacttctttaccggctgtcccaaggccaaaacatgtaccttcatcttacgtgggggtgcagaacagtttatggaggagacggagcgcagtctgcatgacgcgattatgatcgttagaagggccattaagaatgactcagtcgtcgccggcggcggcgctattgagatggaattaagcaaatatcttcgtgattattcccgcacaataccggggaaacagcaactgctgatcggagcatatgcaaaggctctggagattatccctcgccagctgtgcgacaatgctggctttgacgccactaacatattaaataagctgcgcgctcggcacgcacagggaggcacttggtacggtgtcgacataaacaacgaggacattgctgacaattttgaagcttttgtgtgggagccggcaatggtgcgaattaacgcgttgacagcagcttcagaagccgcttgtctgatcgttagtgtcgatgaaacgataaagaaccccaggagcactgtcgatgcccctaccgcagccgggagaggcagaggcagagggaggcctcactag

SEQ ID NO: 164880 - DNA, 1500 bp, Artificial Sequence
  derived and/or modified sequence
atggataaactgatagtggacggacgtggaaaggccaccatcagtaacgacggtgccacaatcctgaagctgcttgacgtcgtgcacccagccgcaaaaaccctagtcgacattgctaagtcccaggatgccgaagtcggcgacggcaccacaagcgttacgctgctcgcagcagaattcctgaaacaggttaagccatatgtggaagagggtctgcatccgcaaataatcattagagcctttcggacagccacccaactggccgtgaataagattaaggaaatcgccgtcacagtaaagaaggccgacaaagtcgaacagagaaagttactggaaaaatgtgccatgaccgccctatcttctaagctgatctctcagcagaaagcgtttttcgctaaaatggtggtagacgccgtcatgatgcttgatgatctcctacagctcaaaatgatcggtatcaagaaggtgcaggggggtgctctggaggacagccagttagtggcgggggttgcgttcaagaagactttttcatatgccggcttcgaaatgcaacctaagaagtaccacaatcctaagatcgctttgctgaatgtagagctggaattgaaggctgagaaggacaatgccgagatcagggttcatacagtcgaggactaccaggctattgtggatgccgagtggaatatcctatatgacaagctggagaagattcaccatagcggagccaaggtggttttgtccaaattgcccataggagacgtcgctactcagtacttcgccgatcgtgacatgttttgcgcaggtcgggtgcccgaggaggacttgaagcgcacaatgatggcctgcgggggcagcatacagacatcagtgaatgcactgagtgcggacgttcttggtcgctgccaggtctttgaggaaacccaaataggcggcgaaagatacaattttttcaccggctgccctaaagccaagacctgtacttttatcctgagaggcggcgcagaacaatttatggaagagactgagaggagcctgcatgatgctatcatgattgtgaggcgagccatcaaaaatgacagcgttgtggccggaggcggcgctatcgaaatggagctgagcaaatatcttcgcgattactcacgcacaattcccgggaaacaacagctacttattggcgcctatgctaaggcactcgagatcatccctcggcagctttgtgacaatgcaggattcgacgcaacgaacattcttaataagctccgggcccggcacgcacaaggcggtacatggtacggtgtcgacattaataatgaggacatcgctgataacttcgaggcattcgtgtgggagccagccatggtccggattaacgcgctgactgccgcttctgaggcagcctgtctgatagtaagcgtcgacgagactattaagaatccgcgttccactgtagacgcaccaacggcggcagggagaggcaggggacgtgggcgaccccactag

SEQ ID NO: 164881 - DNA, 1632 bp, Artificial Sequence
  derived and/or modified sequence
atgatgcccacccctgtgatcctgctgaaggagggcacagacagcagccagggcatcccccagctggtgagcaacatcagcgcctgccaggtgattgctgaggccgtgaggaccaccctgggcccccggggcatggacaagctgattgtggatggccggggcaaggccaccatcagcaatgatggagccaccatcctgaagctgctggatgtggtgcaccctgctgccaagaccctggtggacatcgccaagagccaggatgctgaggtgggagatggcaccacctctgtgaccctgctggccgctgagttcctgaagcaggtgaagccctacgtggaggagggcctgcacccccagatcatcatccgggccttcagaacagccacccagctggccgtgaacaagatcaaggagattgctgtgacagtgaagaaggctgacaaggtggagcagaggaagctgctggagaagtgtgccatgacagccctgagcagcaagctgatcagccagcagaaggccttctttgccaagatggtggtggatgctgtgatgatgctggatgacctgctgcagctgaagatgattggcatcaagaaggtgcagggcggggccctggaggacagccagctggtggccggcgtggccttcaagaagaccttctcctatgccggctttgagatgcagcccaagaagtaccacaaccccaagatcgccctgctgaatgtggagctggagctgaaggccgagaaggacaatgctgagatccgggtgcacacagtggaggactaccaggccatcgtggatgctgagtggaacatcctgtatgacaagctggagaagatccaccacagcggggccaaggtggtgctgagcaagctgcccatcggagatgtggccacccagtactttgctgaccgggacatgttctgtgccggccgggtgcctgaggaggacctgaagaggaccatgatggcctgtggcggcagcatccagacctctgtgaatgccctgtctgcagatgtgctgggccgctgccaggtgtttgaggagacccagattggaggagagcgctacaacttcttcaccggctgccccaaggccaagacctgcaccttcatcctgcggggcggcgctgagcagttcatggaggagacagagaggagcctgcatgatgccatcatgattgtgagaagagccatcaagaatgacagcgtggtggccggcggcggggccatcgagatggagctgagcaagtacctgcgggactacagcaggaccatccctgggaagcagcagctgctgattggagcctatgccaaggccctggagatcatcccccggcagctgtgtgacaatgccggctttgatgccaccaacatcctgaacaagctgcgggcccggcatgcccagggcggcacctggtatggagtggacatcaacaatgaagatattgctgacaactttgaggcctttgtgtgggagcccgccatggtgcgcatcaatgccctgacagctgccagcgaggccgcctgcctgattgtgtctgtggatgagaccatcaagaaccccaggagcacagtggatgcccccacagctgctggccggggccggggccggggccggccccactag

SEQ ID NO: 164882 - DNA, 1500 bp, Artificial Sequence
  derived and/or modified sequence
atggacaagctgattgtggatggccggggcaaggccaccatcagcaatgatggagccaccatcctgaagctgctggatgtggtgcaccctgctgccaagaccctggtggacatcgccaagagccaggatgctgaggtgggagatggcaccacctctgtgaccctgctggccgctgagttcctgaagcaggtgaagccctacgtggaggagggcctgcacccccagatcatcatccgggccttcagaacagccacccagctggccgtgaacaagatcaaggagattgctgtgacagtgaagaaggctgacaaggtggagcagaggaagctgctggagaagtgtgccatgacagccctgagcagcaagctgatcagccagcagaaggccttctttgccaagatggtggtggatgctgtgatgatgctggatgacctgctgcagctgaagatgattggcatcaagaaggtgcagggcggggccctggaggacagccagctggtggccggcgtggccttcaagaagaccttctcctatgccggctttgagatgcagcccaagaagtaccacaaccccaagatcgccctgctgaatgtggagctggagctgaaggccgagaaggacaatgctgagatccgggtgcacacagtggaggactaccaggccatcgtggatgctgagtggaacatcctgtatgacaagctggagaagatccaccacagcggggccaaggtggtgctgagcaagctgcccatcggagatgtggccacccagtactttgctgaccgggacatgttctgtgccggccgggtgcctgaggaggacctgaagaggaccatgatggcctgtggcggcagcatccagacctctgtgaatgccctgtctgcagatgtgctgggccgctgccaggtgtttgaggagacccagattggaggagagcgctacaacttcttcaccggctgccccaaggccaagacctgcaccttcatcctgcggggcggcgctgagcagttcatggaggagacagagaggagcctgcatgatgccatcatgattgtgagaagagccatcaagaatgacagcgtggtggccggcggcggggccatcgagatggagctgagcaagtacctgcgggactacagcaggaccatccctgggaagcagcagctgctgattggagcctatgccaaggccctggagatcatcccccggcagctgtgtgacaatgccggctttgatgccaccaacatcctgaacaagctgcgggcccggcatgcccagggcggcacctggtatggagtggacatcaacaatgaagatattgctgacaactttgaggcctttgtgtgggagcccgccatggtgcgcatcaatgccctgacagctgccagcgaggccgcctgcctgattgtgtctgtggatgagaccatcaagaaccccaggagcacagtggatgcccccacagctgctggccggggccggggccggggccggccccactag

SEQ ID NO: 164883 - DNA, 1632 bp, Artificial Sequence
  derived and/or modified sequence
atgatgcccacccccgtgatcctgctgaaggagggcaccgacagctcacaggggatcccgcaacttgtgtccaacattagcgcatgccaagttatcgcagaggctgtgcgaaccacactagggcctagaggcatggataagctcatcgtcgatgggcggggaaaggccactatatcaaacgatggcgcaactattttaaagctactggatgtggttcatcctgcagccaaaactctggtggacattgctaaaagtcaagacgcagaagtcggagatgggaccacatctgttactctgttggccgccgagtttctcaagcaggtgaagccatacgttgaggagggtctgcacccccagataatcatccgcgcattccgcactgctactcagctcgcggtcaataaaatcaaggaaattgctgtgaccgtcaaaaaggccgacaaggtggaacagcggaagcttctggagaagtgtgcaatgacagctctgagttcgaagctgatatctcagcaaaaggcattcttcgccaagatggtggttgacgctgtgatgatgctagatgacctactgcagttgaagatgattggcattaaaaaggtccagggtggcgcgctcgaagactcacagttagttgccggtgtggcctttaaaaagaccttcagctatgctggctttgaaatgcagcccaagaaatatcacaacccaaaaatcgccttgctgaatgtcgaactggaacttaaggctgaaaaggacaatgctgagatccgcgtgcacaccgtggaggactaccaggcaatagtggatgcggaatggaacattctctacgacaaactagagaaaatccaccacagtggggcaaaagtagtgctgagtaaactccctatcggcgatgtggccacacaatactttgctgaccgtgacatgttctgcgctggaagagtgccagaagaggatctgaagcgtaccatgatggcatgtggagggtctatccagacttcggtaaatgccctgtcggctgacgtgctgggacgctgtcaggtgttcgaggagacccaaatcggaggtgaaagatacaatttcttcacaggctgcccgaaagcgaaaacttgcacgtttattctacgtgggggggccgaacagttcatggaggagacagaacggagcttgcatgatgctattatgatcgtgcgtcgggccatcaaaaatgacagcgtcgtcgccggggggggagctatagagatggaacttagcaaatacctgcgcgactacagcaggacaatcccaggcaaacaacagctgctgattggcgcttacgctaaggcactagaaattatcccgagacagctgtgcgataacgcaggattcgatgctactaacattctcaataagttaagggcacggcatgcccagggcggaacatggtacggcgtggatattaacaacgaagatatcgccgacaatttcgaagcattcgtatgggaacccgccatggtaagaatcaatgccctgacagccgccagcgaagccgcctgcctgatagtatccgtcgatgagacgatcaagaaccccagatccaccgtggacgccccgacggctgccggcagaggccggggcagaggtaggccgcactag

SEQ ID NO: 164884 - DNA, 1500 bp, Artificial Sequence
  derived and/or modified sequence
atggacaagctgatcgtggacggccggggcaaggccaccatcagcaacgatggggccaccatacttaagcttcttgatgtggtccaccctgccgccaaaaccctggtcgatattgcgaagagtcaggacgctgaggtgggggacgggacaactagtgtgacactgctggctgccgaattcttgaaacaggtcaagccctatgtcgaggaagggctgcaccctcagataattattcgggcttttcgcaccgctactcagctcgctgtcaacaagataaaggaaatcgctgtgacagtgaagaaggcggacaaagtcgagcagaggaaattactcgagaagtgcgcaatgacagctttgtcaagcaagctgatcagtcagcagaaagctttttttgcgaaaatggtggttgatgccgttatgatgctggatgatctgctacagcttaaaatgattggtatcaaaaaagtgcaggggggcgccctggaggactcccagcttgtggctggggtcgcgttcaaaaaaactttcagctacgcagggttcgagatgcaaccgaaaaagtaccataacccaaagatcgcgcttctgaacgtggaattagaactcaaagccgaaaaagacaacgccgagatccgggtccatacggtcgaggattatcaagccatagtcgatgccgaatggaacatcctttacgataagctagaaaagattcatcatagcggggctaaagtggtcctgtccaaacttcctattggtgacgtagctacgcagtatttcgccgacagggacatgttttgtgcggggagagtgcccgaggaggatctcaagaggaccatgatggcttgcgggggaagcatacagaccagcgtgaacgcccttagcgccgacgttttgggcagatgtcaggtgttcgaggaaacccagattgggggggaacggtataattttttcacaggatgccccaaagccaaaacttgcacattcatcctgagaggaggggccgagcagttcatggaagagaccgaacggtcacttcatgacgcaattatgatcgtaaggagagcaatcaaaaatgacagtgttgtcgccggcggaggggccatcgagatggagctcagtaaatatcttagggattattccaggacaatccccggaaaacaacagctgttaatcggggcgtatgctaaagccctggagatcatcccacggcagctgtgtgacaacgccggctttgacgccaccaacatcctgaacaaattgcgggctcgccatgctcagggagggacctggtacggcgtggacataaacaatgaggacatcgctgacaacttcgaggcattcgtatgggagcccgcgatggtcagaattaatgcgcttaccgccgcgagtgaagccgcatgcctcattgtcagtgtggacgagactattaagaacccaagaagtacggtggatgcacctaccgctgccggtcgagggaggggccggggaagaccacactag

SEQ ID NO: 164885 - DNA, 1632 bp, Artificial Sequence
  derived and/or modified sequence
atgatgccgaccccggtgatcttgctaaaggagggaacggattcctctcagggcataccccagctagtgagtaatatatccgcctgtcaggtcatcgccgaagctgttagaacaaccctaggcccacggggaatggacaaacttatagttgacggcagagggaaggcaaccatctccaacgatggggctacaatcctcaaattactggacgtggtccatcccgcagcaaagactctggttgatattgccaagagccaggacgccgaggttggcgatggtaccactagcgtcaccctgctcgccgctgaattcttaaaacaggtgaagccctacgtagaggagggactgcacccacaaattataatccgggcatttaggactgctacccaactggcagttaacaagatcaaagaaatcgctgttaccgtcaagaaggccgataaagtggagcagaggaagctgctggagaagtgtgctatgaccgccttatcatcaaagctgatttcccagcaaaaggctttctttgctaagatggtggtcgacgccgtgatgatgctcgatgatctgctacaacttaaaatgatcgggattaagaaggttcaaggaggggcacttgaagactcacagttggtggccggagtcgccttcaaaaaaacattctcctatgcgggtttcgagatgcagcccaaaaagtatcataacccgaagatcgccttactgaacgttgagctggaactgaaggccgagaaggacaacgctgagatccgagtacacacagtggaggactaccaagccattgtcgatgccgaatggaatattctctatgacaagcttgaaaagatacaccactcaggtgctaaagtcgtgctcagcaagctcccaatcggcgatgtcgcgacgcaatacttcgcagatcgggacatgttttgcgcaggtagagttcccgaagaggacctaaagaggactatgatggcctgtgggggatcaatccaaacaagcgtgaacgccctgtcagcagacgtgctgggccgatgtcaggtgttcgaggagacccagatcggaggagaaaggtacaattttttcactggctgccccaaagccaagacatgcactttcatccttaggggaggagcagaacagttcatggaagagacagaaaggagcctgcatgacgccataatgattgtccgccgagccatcaagaacgactctgtggtcgctggtggaggggcaatcgagatggaactctctaagtatctgagagactattcacggacaatacctggaaagcagcagctgctgataggggcatacgccaaggccttagagattattccgaggcagctgtgtgacaacgctggtttcgatgccacaaacatcctgaataaacttagagctcgacacgcccagggcggtacctggtacggggtggatattaataacgaagacatagcagataacttcgaagccttcgtatgggaacctgcgatggtgaggatcaacgctctcactgctgcaagcgaggcggcatgtctcatcgtgagcgtggacgaaaccataaagaaccctaggagtaccgtagatgctcctacagccgctggaagaggcagagggaggggcaggccccactag

SEQ ID NO: 164886 - DNA, 1500 bp, Artificial Sequence
  derived and/or modified sequence
atggataagttgatcgtggacggcagaggcaaagcaacaatcagcaacgacggcgcaaccattctgaaactcctggatgttgtccacccagctgccaagacattggtagacattgctaagagccaggacgctgaagtcggcgacgggacaactagtgtgactttgcttgcggcagaatttcttaagcaggtaaaaccctacgttgaggaaggtctacatccacagatcattattcgcgcatttcggacggcaacccagctcgccgtgaacaaaataaaggagattgctgtaacagttaagaaagccgacaaggtcgaacagcgaaagctattagagaagtgtgctatgacagccctgtcttccaagcttatatcccaacagaaagccttctttgctaagatggtcgttgacgctgtcatgatgctggacgacctactgcaactcaagatgatcggcattaagaaggtccagggcggtgctctggaggactcacagctggtcgccggtgtggcctttaaaaagaccttctcctacgccggattcgagatgcagccgaagaaatatcacaatcccaagatcgctctgttgaacgtggaactggagctgaaagcggagaaagacaatgcggagataagggtgcacaccgtggaggactaccaggcgattgtggacgccgagtggaatatcctttacgataagctcgaaaagatccatcactctggagctaaagtcgtgctgagcaagctgcctatcggtgatgtcgcaactcagtactttgccgatagagatatgttttgtgccggaagggtacctgaagaggacctgaagcgcaccatgatggcttgcggcggatctattcagacgagcgtaaatgcgctatcagccgatgtgctggggcgttgccaggtatttgaagaaactcagattgggggtgagcggtacaacttcttcactggttgccccaaggcgaaaacctgcacctttatcctgcgcggaggagcagagcaattcatggaagagaccgagaggtccctgcatgacgccattatgatcgtgcgacgcgcaataaagaatgacagcgtcgtggccggaggaggcgctattgagatggagctctctaagtaccttcgggactatagtcggacaatccctggcaaacagcagcttctaattggagcctacgccaaagcactggagatcatcccgcgacaactgtgcgacaacgcaggattcgatgcaactaacatacttaataaactgcgagccaggcacgctcagggcggtacctggtacggcgtcgatattaacaatgaggatatcgcagacaattttgaggcattcgtttgggaacctgcaatggtgcgcataaacgcgttgacagcagcatcagaagctgcttgtctcatcgtgagcgttgacgaaaccataaaaaacccccgtagtaccgtggatgctccaacagctgccggtcggggtcgcggtagaggaagaccccactag

SEQ ID NO: 164887 - DNA, 1916 bp, Artificial Sequence
  derived and/or modified sequence
agagtagcggaagtggtccgttctcttcctctcccggcccaagcttctgggtatttctattgcgcgaggcattgtgggttgctgggcggcccggtctcggagaagaggggagagtggcgggccgctgaataagcttccaaaatgatgcccacaccagttatcctattgaaagaggggactgatagctcccaaggcatcccccagcttgtgagtaacatcagtgcctgccaggtgattgctgaggctgtaagaactaccctgggtccccgtggcatggacaagcttattgtagatggcagaggcaaagcaacaatttctaatgatggggccacaattctgaaacttcttgatgttgtccatcctgcagcaaagactttggtagacattgccaaatcccaagatgctgaggtgggtgatggcaccacctcagtgaccttgctggctgcagagtttctgaagcaggtgaaaccctatgtggaggaaggtttacacccccagatcatcattcgagctttccgcacagccacccagctggcagttaacaagatcaaagagattgctgtgaccgtgaagaaggcagataaagtggagcagaggaagctgctggaaaagtgtgccatgaccgctctgagctccaagctgatctcccagcagaaagctttctttgctaagatggtggtggatgcagtgatgatgctcgatgatttgctgcagcttaaaatgattggaatcaagaaggtacagggtggagccctcgaggattctcagctggtagctggtgttgcattcaagaagactttctcttacgctgggtttgaaatgcaacccaaaaagtaccacaatcccaagattgcccttttgaatgtcgagctcgagttgaaagctgagaaagacaatgctgagataagagtccacacagttgaggattatcaggcaattgttgatgctgagtggaacattctctatgacaagttagagaagatccatcattctggagccaaagttgtcttgtccaaactccccattggggatgtggccacccagtactttgctgacagggacatgttctgtgctggccgagtacctgaggaggatctgaagaggacaatgatggcctgtggaggctcaatccagaccagtgtgaatgctctgtcagcagatgtgctgggtcgatgccaggtgtttgaagagacccagattggaggcgagaggtacaatttttttactggctgccccaaggccaagacatgcaccttcattctccgtggcggcgccgagcagtttatggaggagacagagcggtccctgcatgatgccatcatgatcgtcaggagggccatcaagaatgattcagtggtggctggtggcggggccattgagatggaactctccaagtacctgcgggattactcaaggactattccaggaaaacagcagctgttgattggggcatatgccaaggccttggagattatcccacgccagctgtgtgacaatgctggctttgatgccacaaacattctcaacaagctgcgggctcggcatgcccaggggggtacatggtatggagtagacatcaacaacgaggacattgctgacaactttgaagctttcgtgtgggagccagctatggtgcggatcaatgcgctgacagcagcctctgaggctgcgtgcctgatcgtgtctgtagatgaaaccatcaagaacccccgctcgactgtggatgctcccacagcagcaggccggggccgtggtcgtggccgcccccactgagaggcaccccacccatcacatggctggctggctgctgggtgcacttaccctccttggcttggttacttcattttacaaggaaggggtagtaattggcccactctcttcttactggaggctatttaaataaaatgtaagacttc

SEQ ID NO: 164888 - DNA, 1785 bp, Artificial Sequence
  derived and/or modified sequence
gctgggcggcccggtctcggagaagaggggagagtggcgggccgctgaataagcttccaaaatgatgcccacaccagttatcctattgaaagaggggactgatagctcccaaggcatcccccagcttgtgagtaacatcagtgcctgccaggtgattgctgaggctgtaagaactaccctgggtccccgtggcatggacaagcttattgtagatggcagaggcaaagcaacaatttctaatgatggggccacaattctgaaacttcttgatgttgtccatcctgcagcaaagactttggtagacattgccaaatcccaagatgctgaggtgggtgatggcaccacctcagtgaccttgctggctgcagagtttctgaagcaggtgaaaccctatgtggaggaaggtttacacccccagatcatcattcgagctttccgcacagccacccagctgggagcagaggaagctgctggaaaagtgtgccatgaccgctctgagctccaagctgatctcccagcagaaagctttctttgctaagatggtggtggatgcagtgatgatgctcgatgatttgctgcagcttaaaatgattggaatcaagaaggtacagggtggagccctcgaggattctcagctggtagctggtgttgcattcaagaagactttctcttacgctgggtttgaaatgcaacccaaaaagtaccacaatcccaagattgcccttttgaatgtcgagctcgagttgaaagctgagaaagacaatgctgagataagagtccacacagttgaggattatcaggcaattgttgatgctgagtggaacattctctatgacaagttagagaagatccatcattctggagccaaagttgtcttgtccaaactccccattggggatgtggccacccagtactttgctgacagggacatgttctgtgctggccgagtacctgaggaggatctgaagaggacaatgatggcctgtggaggctcaatccagaccagtgtgaatgctctgtcagcagatgtgctgggtcgatgccaggtgtttgaagagacccagattggaggcgagaggtacaatttttttactggctgccccaaggccaagacatgcaccttcattctccgtggcggcgccgagcagtttatggaggagacagagcggtccctgcatgatgccatcatgatcgtcaggagggccatcaagaatgattcagtggtggctggtggcggggccattgagatggaactctccaagtacctgcgggattactcaaggactattccaggaaaacagcagctgttgattggggcatatgccaaggccttggagattatcccacgccagctgtgtgacaatgctggctttgatgccacaaacattctcaacaagctgcgggctcggcatgcccaggggggtacatggtatggagtagacatcaacaacgaggacattgctgacaactttgaagctttcgtgtgggagccagctatggtgcggatcaatgcgctgacagcagcctctgaggctgcgtgcctgatcgtgtctgtagatgaaaccatcaagaacccccgctcgactgtggatgctcccacagcagcaggccggggccgtggtcgtggccgcccccactgagaggcaccccacccatcacatggctggctggctgctgggtgcacttaccctccttggcttggttacttcattttacaaggaaggggtagtaattggcccactctcttcttactggaggctatttaaataaaatgtaagacttcag

SEQ ID NO: 164889 - DNA, 2031 bp, Artificial Sequence
  derived and/or modified sequence
atagagtagcggaagtggtccgttctcttcctctcccggcccaagcttctgggtatttctattgcgcgaggcattgtgggttgctgggcggcccggtctcggagaagaggggagagtggcgggccgctgaataagcttccaaaatgatgcattgctcattcttgaagtcgtcttcatcttctgtgcagaggcagcatagtacagcagttgagagtaaggcctctggagctacactgaatgcctagcccacaccagttatcctattgaaagaggggactgatagctcccaaggcatcccccagcttgtgagtaacatcagtgcctgccaggtgattgctgaggctgtaagaactaccctgggtccccgtggcatggacaagcttattgtagatggcagaggcaaagcaacaatttctaatgatggggccacaattctgaaacttcttgatgttgtccatcctgcagcaaagactttggtagacattgccaaatcccaagatgctgaggtgggtgatggcaccacctcagtgaccttgctggctgcagagtttctgaagcaggtgaaaccctatgtggaggaaggtttacacccccagatcatcattcgagctttccgcacagccacccagctggcagttaacaagatcaaagagattgctgtgaccgtgaagaaggcagataaagtggagcagaggaagctgctggaaaagtgtgccatgaccgctctgagctccaagctgatctcccagcagaaagctttctttgctaagatggtggtggatgcagtgatgatgctcgatgatttgctgcagcttaaaatgattggaatcaagaaggtacagggtggagccctcgaggattctcagctggtagctggtgttgcattcaagaagactttctcttacgctgggtttgaaatgcaacccaaaaagtaccacaatcccaagattgcccttttgaatgtcgagctcgagttgaaagctgagaaagacaatgctgagataagagtccacacagttgaggattatcaggcaattgttgatgctgagtggaacattctctatgacaagttagagaagatccatcattctggagccaaagttgtcttgtccaaactccccattggggatgtggccacccagtactttgctgacagggacatgttctgtgctggccgagtacctgaggaggatctgaagaggacaatgatggcctgtggaggctcaatccagaccagtgtgaatgctctgtcagcagatgtgctgggtcgatgccaggtgtttgaagagacccagattggaggcgagaggtacaatttttttactggctgccccaaggccaagacatgcaccttcattctccgtggcggcgccgagcagtttatggaggagacagagcggtccctgcatgatgccatcatgatcgtcaggagggccatcaagaatgattcagtggtggctggtggcggggccattgagatggaactctccaagtacctgcgggattactcaaggactattccaggaaaacagcagctgttgattggggcatatgccaaggccttggagattatcccacgccagctgtgtgacaatgctggctttgatgccacaaacattctcaacaagctgcgggctcggcatgcccaggggggtacatggtatggagtagacatcaacaacgaggacattgctgacaactttgaagctttcgtgtgggagccagctatggtgcggatcaatgcgctgacagcagcctctgaggctgcgtgcctgatcgtgtctgtagatgaaaccatcaagaacccccgctcgactgtggatgctcccacagcagcaggccggggccgtggtcgtggccgcccccactgagaggcaccccacccatcacatggctggctggctgctgggtgcacttaccctccttggcttggttacttcattttacaaggaaggggtagtaattggcccactctcttcttactggaggctatttaaataaaatgtaagacttcagataactttgtaaatt

SEQ ID NO: 164890 - DNA, 1632 bp, Artificial Sequence
  derived and/or modified sequence
atgatgcccacccccgtgatcctgctgaaggagggcaccgacagcagccagggcatcccccagctggtgagcaacatcagcgcctgccaggtgatcgccgaggccgtgagaaccaccctgggccccagaggcatggacaagctgatcgtggacggcagaggcaaggccaccatcagcaacgacggcgccaccatcctgaagctgctggacgtggtgcaccccgccgccaagaccctggtggacatcgccaagagccaggacgccgaggtgggcgacggcaccaccagcgtgaccctgctggccgccgagttcctgaagcaggtgaagccctacgtggaggagggcctgcacccccagatcatcatcagagccttcagaaccgccacccagctggccgtgaacaagatcaaggagatcgccgtgaccgtgaagaaggccgacaaggtggagcagagaaagctgctggagaagtgcgccatgaccgccctgagcagcaagctgatcagccagcagaaggccttcttcgccaagatggtggtggacgccgtgatgatgctggacgacctgctgcagctgaagatgatcggcatcaagaaggtgcagggcggcgccctggaggacagccagctggtggccggcgtggccttcaagaagaccttcagctacgccggcttcgagatgcagcccaagaagtaccacaaccccaagatcgccctgctgaacgtggagctggagctgaaggccgagaaggacaacgccgagatcagagtgcacaccgtggaggactaccaggccatcgtggacgccgagtggaacatcctgtacgacaagctggagaagatccaccacagcggcgccaaggtggtgctgagcaagctgcccatcggcgacgtggccacccagtacttcgccgacagagacatgttctgcgccggcagagtgcccgaggaggacctgaagagaaccatgatggcctgcggcggcagcatccagaccagcgtgaacgccctgagcgccgacgtgctgggcagatgccaggtgttcgaggagacccagatcggcggcgagagatacaacttcttcaccggctgccccaaggccaagacctgcaccttcatcctgagaggcggcgccgagcagttcatggaggagaccgagagaagcctgcacgacgccatcatgatcgtgagaagagccatcaagaacgacagcgtggtggccggcggcggcgccatcgagatggagctgagcaagtacctgagagactacagcagaaccatccccggcaagcagcagctgctgatcggcgcctacgccaaggccctggagatcatccccagacagctgtgcgacaacgccggcttcgacgccaccaacatcctgaacaagctgagagccagacacgcccagggcggcacctggtacggcgtggacatcaacaacgaggacatcgccgacaacttcgaggccttcgtgtgggagcccgccatggtgagaatcaacgccctgaccgccgccagcgaggccgcctgcctgatcgtgagcgtggacgagaccatcaagaaccccagaagcaccgtggacgcccccaccgccgccggcagaggcagaggcagaggcagaccccactag

SEQ ID NO: 164891 - protein, 539 aa, Artificial Sequence
  derived and/or modified sequence
MPENVAPRSGATAGAAGGRGKGAYQDRDKPAQIRFSNISAAKAVADAIRTSLGPKGMDKMIQDGKGDVTITNDGATILKQMQVLHPAARMLVELSKAQDIEAGDGTTSVVIIAGSLLDSCTKLLQKGIHPTIISESFQKALEKGIEILTDMSRPVELSDRETLLNSATTSLNSKVVSQYSSLLSPMSVNAVMKVIDPATATSVDLRDIKIVKKLGGTIDDCELVEGLVLTQKVSNSGITRVEKAKIGLIQFCLSAPKTDMDNQIVVSDYAQMDRVLREERAYILNLVKQIKKTGCNVLLIQKSILRDALSDLALHFLNKMKIMVIKDIEREDIEFICKTIGTKPVAHIDQFTADMLGSAELAEEVNLNGSGKLLKITGCASPGKTVTIVVRGSNKLVIEEAERSIHDALCVIRCLVKKRALIAGGGAPEIELALRLTEYSRTLSGMESYCVRAFADAMEVIPSTLAENAGLNPISTVTELRNRHAQGEKTAGINVRKGGISNILEELVVQPLLVSVSALTLATETVRSILKIDDVVNTR

SEQ ID NO: 164892 - protein, 483 aa, Artificial Sequence
  derived and/or modified sequence
MDKMIQDGKGDVTITNDGATILKQMQVLHPAARMLVELSKAQDIEAGDGTTSVVIIAGSLLDSCTKLLQKGIHPTIISESFQKALEKGIEILTDMSRPVELSDRETLLNSATTSLNSKVVSQYSSLLSPMSVNAVMKVIDPATATSVDLRDIKIVKKLGGTIDDCELVEGLVLTQKVSNSGITRVEKAKIGLIQFCLSAPKTDMDNQIVVSDYAQMDRVLREERAYILNLVKQIKKTGCNVLLIQKSILRDALSDLALHFLNKMKIMVIKDIEREDIEFICKTIGTKPVAHIDQFTADMLGSAELAEEVNLNGSGKLLKITGCASPGKTVTIVVRGSNKLVIEEAERSIHDALCVIRCLVKKRALIAGGGAPEIELALRLTEYSRTLSGMESYCVRAFADAMEVIPSTLAENAGLNPISTVTELRNRHAQGEKTAGINVRKGGISNILEELVVQPLLVSVSALTLATETVRSILKIDDVVNTR

SEQ ID NO: 164893 - protein, 389 aa, Artificial Sequence
  derived and/or modified sequence
MSRPVELSDRETLLNSATTSLNSKVVSQYSSLLSPMSVNAVMKVIDPATATSVDLRDIKIVKKLGGTIDDCELVEGLVLTQKVSNSGITRVEKAKIGLIQFCLSAPKTDMDNQIVVSDYAQMDRVLREERAYILNLVKQIKKTGCNVLLIQKSILRDALSDLALHFLNKMKIMVIKDIEREDIEFICKTIGTKPVAHIDQFTADMLGSAELAEEVNLNGSGKLLKITGCASPGKTVTIVVRGSNKLVIEEAERSIHDALCVIRCLVKKRALIAGGGAPEIELALRLTEYSRTLSGMESYCVRAFADAMEVIPSTLAENAGLNPISTVTELRNRHAQGEKTAGINVRKGGISNILEELVVQPLLVSVSALTLATETVRSILKIDDVVNTR

SEQ ID NO: 164894 - DNA, 1620 bp, Artificial Sequence
  derived and/or modified sequence
atgcctgagaatgtggcccctcggtcgggcgccacagcaggcgccgctggaggccgagggaagggagcttaccaagatcgcgataagccagcacagattcgcttcagtaacatctctgctgccaaagctgtggccgatgcaatccggacttcgttagggccgaaggggatggataagatgattcaggacggtaaaggggacgtgacaatcaccaatgatggggcgaccattctaaaacaaatgcaggtgcttcacccagccgctagaatgcttgtggagttgtcaaaggcgcaggacattgaggcaggcgatggcaccaccagcgtggttattatagctggctccttacttgattcatgcaccaagctgctacagaaaggcatacacccgaccatcattagcgagtcgttccagaaggcacttgagaagggcatcgagattttgaccgacatgtctcgcccagttgaactgagcgatagggaaactctgctgaacagcgcaacgaccagcctcaactcaaaggtcgtgagccagtattccagcttgttgtctcctatgagcgtaaacgcagtgatgaaagttatcgaccccgccacagccacaagcgtagacctgagggacatcaaaattgttaaaaagcttggaggcactatcgatgattgtgaactggtggagggcctggttctgacccaaaaggttagtaatagtggtattactagggttgagaaagcaaagattgggcttatacaattttgtttgtcagcaccaaagaccgacatggacaaccagatcgtggtgagcgattacgctcaaatggatagggtgttgagggaggagcgagcttatatactgaacttagttaagcagataaaaaagaccggctgcaacgtcctcctgattcagaaatcaatccttagggacgccctctccgacctggctctccatttcctgaataaaatgaaaatcatggtcataaaagacattgagagggaagatatcgaatttatctgcaagacaatcgggaccaagcccgtggcccacatcgaccaattcacagctgacatgcttggaagcgccgagctggctgaggaagtcaaccttaacgggtctgggaagctactcaaaatcacaggctgcgcgtctccgggaaaaactgtgactattgtggtgcggggtagtaacaaactagtcatcgaggaggccgagagaagtattcacgatgccctctgtgtgattcggtgccttgttaagaaacgggctctaatcgcaggggggggagcgcccgagattgaactggcgctgagactcaccgagtacagcaggactctcagcggcatggaatcttactgtgtgcgagcatttgccgacgcgatggaagtgattccctctaccctggcagagaatgccggactcaaccctatctccacagtaactgaactgaggaataggcatgcgcagggggaaaagactgcggggatcaatgtccgcaaaggcggaatatctaacatccttgaggaattagttgtgcaaccgctacttgtcagtgtctctgccctgactctggccacagagactgtccgctcgattctcaaaatcgatgatgttgtcaatacacgatag

SEQ ID NO: 164895 - DNA, 1452 bp, Artificial Sequence
  derived and/or modified sequence
atggacaaaatgattcaagacgggaagggtgatgttactatcacaaatgacggagccaccatcctgaagcagatgcaggtgcttcacccagcagcccggatgttggtcgagctgtccaaggcccaggatatagaggcaggtgacggaacaacgtccgtagtcatcatagccggttccctgttagactcttgtaccaagctgctacagaaaggtattcacccgaccataatttcagagagcttccagaaggcgctggagaagggtatcgaaatcctgacggacatgtccaggcccgtggaactctccgatagagagaccctgttaaattcagccacaactagcttaaactcgaaagttgtgtctcagtattcgagcctactttccccaatgtccgtgaatgcggtcatgaaagtgatcgatccagctaccgccacctccgtcgacctcagagacattaagatcgtgaagaaactcggagggaccattgatgattgtgagctggtcgaggggttggtgctgacccagaaagtcagcaactcagggattacacgggtggagaaggctaagatcggactcatccagttctgcctttcggcaccaaagactgacatggataaccaaatagtcgttagtgattatgctcagatggaccgtgtgctcagagaggaaagggcctacatcctgaacctggttaaacagattaagaaaaccggatgtaatgttttgctgattcagaagtccatcctgcgggatgcactctccgacttagccctgcattttctgaataagatgaagataatggtgatcaaagatatcgaacgggaggatattgaatttatttgcaaaaccatcggcactaaacctgttgcgcacattgatcagttcacagctgatatgctggggtccgctgagcttgctgaagaggtaaatttaaatgggagcggaaagctgctgaagatcaccggctgtgcgtcacccggcaagacagtgactattgtggtgagaggatctaacaaattggttatcgaggaagccgagaggtccattcatgacgcactgtgtgtgattagatgcctggtcaagaagagagcgctgattgcaggcgggggggcgccagagatcgagctggcactgagactgacagaatatagccggacgctgagcgggatggaaagttactgcgtcagggcatttgccgacgctatggaagtgattccctctaccctagctgagaacgccggactgaacccaatctccaccgtgaccgaactgcgaaatcgccacgcccaaggagagaagaccgctggcatcaatgtccgtaagggcggcatatccaacattctggaagagctggtcgtccagccccttttggtgtccgtatctgcattgactctggcaaccgagactgtgcgcagtatccttaaaatagacgacgtggtgaatactcgctag

SEQ ID NO: 164896 - DNA, 1620 bp, Artificial Sequence
  derived and/or modified sequence
atgccagaaaatgtggcccccaggtctggggccacagctggagctgctgggggccggggcaaaggagcctaccaggaccgggacaagccagcccagatccgcttcagcaacatctctgctgccaaggctgtggctgatgccatccgcaccagcctgggccccaagggcatggacaagatgatccaggatggaaaaggagatgtgaccatcaccaatgatggagccaccatcctgaagcagatgcaggtgctgcaccctgctgccaggatgctggtggagctgagcaaggcccaggacatcgaggccggagatggcaccacctctgtggtgatcatcgccggcagcctgctggacagctgcaccaagctgctgcagaagggcatccaccccaccatcatcagcgagagcttccagaaggccctggagaagggcatcgagatcctgacagacatgagcaggcctgtggagctgagtgaccgggagaccctgctgaacagcgccaccaccagcctgaacagcaaggtggtgtcccagtacagcagcctgctgagccccatgtctgtgaatgctgtgatgaaggtgattgatcctgccacagccacctctgtggacctgcgggacatcaagatcgtgaagaagctgggcggcaccattgatgactgtgagctggtggagggcctggtgctgacccagaaggtgagcaacagcggcatcaccagggtggagaaggccaagattggcctcatccagttctgcctgagcgcccccaagacagacatggacaaccagatcgtggtgtctgactatgcccagatggacagagtgctgcgggaggagcgggcctacatcctgaacctggtgaagcagatcaagaagacaggctgcaatgtgctgctgatccagaagagcatcctgagagatgccctgagtgacctggccctgcacttcctgaacaagatgaagatcatggtgatcaaggacatcgagagagaagatattgagttcatctgcaagaccatcggcaccaagcctgtggcccacatcgaccagttcaccgctgacatgctgggcagcgctgagctggccgaggaggtgaacctgaatggcagcggcaagctgctgaagatcaccggctgtgccagccctgggaagacagtgaccatcgtggtgcggggcagcaacaagctggtgattgaggaggccgagaggagcatccatgatgccctgtgtgtgatccgctgcctggtgaagaagagggccctgattgctgggggcggggcccctgagattgagctggccctgcggctgacagagtacagcaggaccctgagcggcatggagagctactgtgtgcgggcctttgctgatgccatggaggtgatccccagcaccctggctgaaaatgccggcctgaaccccatcagcacagtgacagagctgaggaacagacatgcccagggcgagaagacagctggcatcaacgtgaggaaaggaggcatcagcaacatcctggaggagctggtggtgcagcccctgctggtgtctgtgtctgccctgaccctggccacagaaacagtgcgcagcatcctgaagattgatgatgtggtgaacaccaggtag

SEQ ID NO: 164897 - DNA, 1452 bp, Artificial Sequence
  derived and/or modified sequence
atggacaagatgatccaggatggaaaaggagatgtgaccatcaccaatgatggagccaccatcctgaagcagatgcaggtgctgcaccctgctgccaggatgctggtggagctgagcaaggcccaggacatcgaggccggagatggcaccacctctgtggtgatcatcgccggcagcctgctggacagctgcaccaagctgctgcagaagggcatccaccccaccatcatcagcgagagcttccagaaggccctggagaagggcatcgagatcctgacagacatgagcaggcctgtggagctgagtgaccgggagaccctgctgaacagcgccaccaccagcctgaacagcaaggtggtgtcccagtacagcagcctgctgagccccatgtctgtgaatgctgtgatgaaggtgattgatcctgccacagccacctctgtggacctgcgggacatcaagatcgtgaagaagctgggcggcaccattgatgactgtgagctggtggagggcctggtgctgacccagaaggtgagcaacagcggcatcaccagggtggagaaggccaagattggcctcatccagttctgcctgagcgcccccaagacagacatggacaaccagatcgtggtgtctgactatgcccagatggacagagtgctgcgggaggagcgggcctacatcctgaacctggtgaagcagatcaagaagacaggctgcaatgtgctgctgatccagaagagcatcctgagagatgccctgagtgacctggccctgcacttcctgaacaagatgaagatcatggtgatcaaggacatcgagagagaagatattgagttcatctgcaagaccatcggcaccaagcctgtggcccacatcgaccagttcaccgctgacatgctgggcagcgctgagctggccgaggaggtgaacctgaatggcagcggcaagctgctgaagatcaccggctgtgccagccctgggaagacagtgaccatcgtggtgcggggcagcaacaagctggtgattgaggaggccgagaggagcatccatgatgccctgtgtgtgatccgctgcctggtgaagaagagggccctgattgctgggggcggggcccctgagattgagctggccctgcggctgacagagtacagcaggaccctgagcggcatggagagctactgtgtgcgggcctttgctgatgccatggaggtgatccccagcaccctggctgaaaatgccggcctgaaccccatcagcacagtgacagagctgaggaacagacatgcccagggcgagaagacagctggcatcaacgtgaggaaaggaggcatcagcaacatcctggaggagctggtggtgcagcccctgctggtgtctgtgtctgccctgaccctggccacagaaacagtgcgcagcatcctgaagattgatgatgtggtgaacaccaggtag

SEQ ID NO: 164898 - DNA, 1620 bp, Artificial Sequence
  derived and/or modified sequence
atgcccgagaacgtggccccccggagcggcgccaccgccggcgccgccggcggcaggggcaagggcgcgtatcaggaccgagacaaacccgcacagattcgattctccaacatttcagccgccaaggccgtggctgacgctatccgaacttccttggggcccaagggaatggataaaatgattcaggatggcaagggcgacgtgacaattaccaatgacggcgcgaccatcctgaagcaaatgcaggtattgcaccctgccgcacgaatgctcgtggaactatcaaaggcacaagacattgaggcgggagatggcactacctctgtggtgattatcgcagggtccttgctggactcttgtaccaagctgttgcagaagggcatccatcccactatcatctcggagtcctttcaaaaagcactcgagaaaggtatcgagatactcaccgacatgtcccgtcctgtggaactcagcgatagagagaccctgctaaatagtgcaacaacgagcctcaattccaaggtggtgtctcagtacagctccttgctgagcccaatgagcgtaaatgcagtgatgaaggtgatcgaccccgccactgcgacttcagtagacctgcgggacatcaaaattgtaaagaaactcggcggcaccatagacgattgcgagttggtggaaggcctcgttctgacacagaaggtttccaactccggcattaccagggtcgagaaagcgaagatcgggctcatccagttttgcctgtccgcgcccaagaccgacatggacaatcaaatagttgtgagcgattatgcacaaatggatcgtgtacttagggaagagagagcatacatacttaatctggtgaagcagattaaaaaaacaggatgtaacgttctgcttatccaaaagtcaatactccgagacgcgctttctgacctggccctccacttcttgaataagatgaagatcatggtcatcaaggatattgagcgcgaggacatcgaattcatctgtaagaccatcggcacaaagccggtcgctcatatagaccagttcaccgcggatatgctggggagcgccgagctggccgaagaggtcaatcttaacggtagtggcaagctgctgaagataactggttgcgctagcccaggaaaaacggtgactatcgtggtgaggggcagcaataagctggtgattgaggaggcggagaggtccattcatgatgcactctgtgtgattcgatgtctggttaagaagagggccttaatcgcgggggggggcgcgcctgaaatcgagctcgcccttcgcctgactgagtactctagaacattgtccgggatggagagctactgcgtccgcgcctttgccgatgcaatggaagttattccttcgaccttggcagagaacgcggggctgaacccgatttctaccgtcactgaattacgcaatcgccatgcccaaggagaaaagactgcagggatcaacgttcgcaaggggggcattagtaatattctggaagagctggtggttcagccactgctggtgagcgtaagcgccctgacactcgccactgagacagtgaggagcatcctgaagattgatgatgtggtgaacactaggtag

SEQ ID NO: 164899 - DNA, 1452 bp, Artificial Sequence
  derived and/or modified sequence
atggacaagatgatccaggacggcaagggcgacgtgaccatcaccaatgatggcgcaacaattctgaaacagatgcaggttctccacccagcagcacgcatgctagtagaactgtccaaggctcaggatattgaggctggggacggcaccacctctgttgtgattatcgctggatctttgcttgacagctgcaccaaactgttgcaaaagggaattcaccctactatcatcagcgaaagctttcagaaggcattggaaaaagggattgagatcctcacggacatgagcaggcctgtcgaactgagtgatagagaaaccctcctgaactccgcgacgacatccctcaattctaaggtcgtgagccaatacagcagcctcctgtcccctatgtcggttaacgcagtgatgaaagtcatcgaccccgctaccgcgacatcggtagaccttagggatatcaagatcgttaagaaactgggggggacaatcgatgactgcgagctcgtggaggggcttgtcctgacccagaaagtgagcaattctggcatcacacgggtggagaaggcaaagataggattgattcagttctgcctatccgccccaaagacggacatggacaaccagattgtggtaagtgactatgcccagatggaccgggtactgcgggaagagagagcctatatcttgaacctggtcaagcagatcaagaaaaccgggtgtaacgtgctcctgatccagaagtctattcttagggatgccttgtcagatttagctctccatttcttgaataaaatgaaaattatggtgataaaggatattgagagagaagacatcgaatttatctgcaagacaattgggactaagcccgtagcccacatcgaccaatttactgccgatatgcttggctcggctgaacttgcagaagaggtcaacctgaatggctccgggaaactgcttaagataaccgggtgtgcatccccagggaagacggtgaccattgtggtgcgcggatctaataagctcgtaattgaagaggccgaacggagtatccacgacgcactctgtgtgatcagatgcctggtgaagaagagagctctcatcgccgggggcggagcacctgaaatcgaactggctctgcgtctcacagagtacagtcgtaccttgtccgggatggaatcctattgcgtccgggcttttgcggatgccatggaagtgatccccagcacattggcggagaacgcagggctgaatcctatttccacagtcaccgaactgagaaatcgccacgcccaaggcgagaaaaccgccggcataaacgtgagaaagggaggcatctcaaacatcctggaagaattggtggtgcagcccttacttgttagtgtgtcagccctcaccctcgcgacagagaccgtgcggtctattcttaagattgacgacgttgtgaacaccagatag

SEQ ID NO: 164900 - DNA, 1620 bp, Artificial Sequence
  derived and/or modified sequence
atgccagagaatgtggcccctcgctcgggggctaccgcaggtgccgcaggcggtcgcggaaagggagcataccaggacagagacaagcctgcacagatccggttctctaacatctccgcagctaaggccgtggccgacgctatccgtacgagcttaggacccaagggcatggacaaaatgattcaggatggtaagggagacgtcaccataactaacgacggagccaccatcctgaagcagatgcaggtgctgcatcccgctgcgagaatgctcgtagagctgagcaaggcacaggacattgaggccggagatggcactaccagcgtggtaatcatcgctgggtccctgttggactcatgcaccaaactgctccagaagggtatccatccaacaattatcagcgagagctttcagaaggcactggagaaggggattgagattttgactgacatgagtaggccagtcgagttaagcgatcgggagactctgctaaactccgcaactacaagtctcaatagcaaagtggtgtctcagtacagctccctgctcagtcccatgtcagtaaacgcagtgatgaaggtgatcgaccctgctaccgccacgtcagttgatctcagggatatcaaaattgtcaagaagctgggaggcactatagacgattgtgaactggtggagggccttgtcttaacacagaaagtctctaattctgggatcactagagtggaaaaggcgaagatcggcttaattcagttctgcctgagcgctcctaagacagatatggataaccagattgtggtctctgattacgcacagatggatagagtcctcagagaggagagagcttacatcctgaatctagtgaagcaaattaaaaaaacaggatgcaatgtgcttctgatacagaagtcgatattgagggatgcacttagtgacctggcactacatttcctgaacaaaatgaagattatggtcattaaagatatagaaagagaggatatcgagttcatatgcaaaactattgggacaaagccagttgcccacattgaccagtttactgcagacatgctgggctccgccgagttagctgaggaagtaaacctgaatggaagcggcaaattgctcaagattaccgggtgcgcatctcctggcaaaaccgtgacaatcgtggtccgcggaagtaacaaacttgttatcgaggaggctgaaaggagtatccacgacgccctctgcgtaatccggtgcctcgtcaaaaagcgcgctctaattgccggaggcggtgcgccagagatcgagctcgccctcagactgacagaatatagccggaccctcagcgggatggagagctattgcgtgagagcatttgccgacgcaatggaagtcattccttcaaccttagccgagaacgccggactgaatcccatttcaaccgtaaccgagcttcgtaataggcatgcccaaggagaaaagaccgccggtatcaatgtccggaaagggggaatctctaatattcttgaggaactggtcgtgcagcctctcctggtctctgtgtccgcactgactttagcaaccgaaaccgtgagatcaatactcaagatagatgatgtcgttaatacccggtag

SEQ ID NO: 164901 - DNA, 1452 bp, Artificial Sequence
  derived and/or modified sequence
atggataagatgattcaggacggtaagggcgacgttactattactaatgacggagcaacaatactgaagcagatgcaggtgttacatccagcagccagaatgctcgtcgagctgagtaaggcccaggatattgaagccggtgatggaaccaccagcgtcgtgattattgccggtagtctgttggatagctgtacaaaactgctgcagaaaggtattcatcccacgatcatcagtgaaagcttccagaaggccctcgagaaggggatagagatactcaccgacatgagtagacctgtggaactttctgaccgcgagactctcttgaattccgcgaccacctcccttaatagcaaggtcgtcagccagtatagttctctactttcacccatgtccgtgaatgcagttatgaaagttatagacccagcaacagctacctccgtggatcttagagatatcaaaatcgtcaagaaacttgggggaaccatagatgattgtgaactggttgaaggtcttgtgttgacccagaaagtgtcaaactccggaattaccagagtcgagaaggctaagattggactcatccagttctgcttgagcgcccctaagacggacatggataatcagattgttgtgagcgattatgctcaaatggaccgggtcctgcgggaggagagggcgtatattctgaacctggtgaaacagatcaaaaagaccggatgcaacgtgctgttaatccaaaaatccattttgcgcgacgcactttctgaccttgccctgcatttcttgaataaaatgaagatcatggtaattaaggacatcgagagagaagatatcgagttcatttgtaagactatcgggaccaaacccgtcgcgcacatcgatcagtttacagcagacatgctgggcagtgcagagctcgcggaagaggtgaacctaaatggatcaggaaaactccttaaaataacagggtgtgcatctcccggaaagaccgttacaatcgtggtacgagggtccaataagctggtcatcgaggaggccgagcggtccatacatgacgctttgtgcgttatcagatgtttagtgaagaagcgagccctcattgctggaggaggagcacctgagatagaactcgcccttcgcttgaccgaatactcccggacattgtcaggcatggagtcctactgtgtaagggctttcgcggatgccatggaagtaatcccaagtaccctcgccgagaatgccggtctgaatccaatcagcaccgtaactgagctgcggaaccgccacgcacagggggaaaagactgctgggattaacgtcagaaagggtgggatcagcaacatcttagaggagttagtggtccagcccttgctggtaagtgtctcagctcttactctagccacagaaactgtgcggtccatcctcaagatcgatgacgttgtgaacacgaggtag

SEQ ID NO: 164902 - DNA, 2520 bp, Artificial Sequence
  derived and/or modified sequence
gcgtaaaggttcccccggcgctcttcacccacagcgccccgggcgtacaatctcgccagcccggagcccaccgcacgcatcctcctcgcccggcgcgcagcggacagcctcctacgtcacgccagcgccgcgcggcaaggaaggcccccttctccgcctccgcctcctcccgacgccggcgccgctttctggaaggttcgtgaaggcagtgagggcttaccgttattacactgcggccggccagaatccgggtccatccgtccttcccgagccaacccagacacagcggagtttgccatgcccgagaatgtggcaccccggagcggggcgactgccggggctgccggcggccgcgggaaaggcgcctatcaggaccgcgacaagccagcccagatccgcttcagcaacatttccgccgccaaagcggttgctgatgctattagaacaagccttggaccaaaaggaatggataaaatgattcaagatggaaaaggtgatgtaaccattacaaatgatggtgctaccattctgaaacaaatgcaagtattacatccagcagccagaatgctggtggagctgtctaaggctcaagatatagaagcaggagatggcaccacatcagtagtcatcattgctggctccctcttagattcttgtaccaagcttcttcagaaagggattcatccaaccatcatttctgagtcattccagaaggccctggaaaagggcattgaaatcttgactgacatgtctcgacctgtggaactgagtgacagagaaactttgttaaatagtgcaaccacttcactgaactcaaaggtggtttctcagtattcaagtctgctttctccaatgagtgtaaatgcagtgatgaaagtgattgacccagccacagccaccagtgtagatcttagagatattaaaatagttaagaagcttggtgggacaattgatgactgtgagttggtggaagggctggttctcacccaaaaagtgtcaaattctggcataaccagagttgaaaaggccaagattgggcttattcagttttgcttatctgctcccaaaacagacatggataatcaaatagtggtttctgactatgcccagatggaccgagtgctgcgagaagagagagcctatattttaaatttagtgaagcaaattaaaaaaacaggatgtaatgtccttctcatacagaaatctattctaagagatgctcttagtgatcttgcattacactttctgaataaaatgaagatcatggtgattaaggatattgaaagagaagacattgaattcatttgtaagacaattggaaccaagccagttgctcatattgaccaatttactgctgacatgctgggttctgctgagttagctgaggaggtcaatttaaatggttctggcaaactgctcaagattacaggctgtgccagccctggaaaaacagttacaattgttgttcgtggttctaacaaactggtgattgaagaagctgagcgctccattcatgatgccctatgtgttattcgttgtttagtgaagaagagggctcttattgcaggaggtggtgctccagaaatagagttggccctacgattaactgaatattcacgaacactgagtggtatggaatcctactgcgttcgtgcttttgcagatgctatggaggtcattccatctacactagctgaaaatgccggcctgaatcccatttctacagtaacagaactaagaaaccggcatgcccagggagaaaaaactgcaggcattaatgtccgaaagggtggtatttccaacattttggaggaactggttgtccagcctctgttggtatcagtcagtgctctgactcttgcaactgaaactgttcggagcattctgaaaatagatgatgtggtaaacactcgataatctggataactgactagcaccattatgatcaccagtattgtggctggaatggaagaagatcaccttggtgttccttgtttggaagattatttcctctgaatttctgggcttggtcttccagttggcatttgcctgaagttgtattgaaacaatttaatgaaaatattaaatatttggtttcaaaaggcagatttatcttctcccaacattctgttatttctgatacttttgaaaaactaataaaaactaataaaagaagcgtaaaaagtgagtttacatgttgaggaaaaaaatggcccaatatgctcatcactgataaatgctccctggccttaaaaactaccaacatataatatatatgctgtcttaaaagttaatgatccaagtggcacctctctgaacctactttggcttgggaggctgcccagttaaaacaaaaataagttaatggtacagaaagagaatgaaaaatgaaagcctccttttatcctatcatcctaattccttttcccagtaataatgactgctgtgttggattccttctgcaaataaaagtgtatacatatatgtagcaaatcttacttaaacaaaagggtttcttaa

SEQ ID NO: 164903 - DNA, 2039 bp, Artificial Sequence
  derived and/or modified sequence
gaaggttcgtgaaggcagtgagggcttaccgttattacactgcggccggccagaatccgggtccatccgtccttcccgagccaacccagacacagcggagtttgccatgcccgagaatgtggcaccccggagcggggcgactgccggggctgccggcggccgcgggaaaggcgcctatcaggaccgcgacaagccagcccagatccgcttcagcaacatttccgccgccaaagaagcagcccagtggagggatccttatttctgtttttctgccgatgatcgccaacccggagtatggaggcctttggacttgccccattttgcatcttaatctcccttagtttttcatcctgcactgtgcatcattcatattggagccgaaagcagttcaaaatgccgaggattgcatgcagtcttcactagggatctgacgcttgagggctgtcgcttattgcttattggaactgcggttgctgatgctattagaacaagccttggaccaaaaggaatggataaaatgattcaagatggaaaaggtgatgtaaccattacaaatgatggtgctaccattctgaaacaaatgcaagtattacatccagcagccagaatgctggtggagctgtctaaggctcaagatatagaagcaggagatggcaccacatcagtagtcatcattgctggctccctcttagattcttgtaccaagcttcttcagaaagggattcatccaaccatcatttctgagtcattccagaaggccctggaaaagggcattgaaatcttgactgacatgtctcgacctgtggaactgagtgacagagaaactttgttaaatagtgcaaccacttcactgaactcaaaggtggtttctcagtattcaagtctgctttctccaatgagtgtaaatgcagtgatgaaagtgattgacccagccacagccaccagtgtagatcttagagatattaaaatagttaagaagcttggtgggacaattgatgactgtgagttggtggaagggctggttctcacccaaaaagtgtcaaattctggcataaccagagttgaaaaggccaagattgggcttattcagttttgcttatctgctcccaaaacagacatggataatcaaatagtggtttctgactatgcccagatggaccgagtgctgcgagaagagagagcctatattttaaatttagtgaagcaaattaaaaaaacaggatgtaatgtccttctcatacagaaatctattctaagagatgctcttagtgatcttgcattacactttctgaataaaatgaagatcatggtgattaaggatattgaaagagaagacattgaattcatttgtaagacaattggaaccaagccagttgctcatattgaccaatttactgctgacatgctgggttctgctgagttagctgaggaggtcaatttaaatggttctggcaaactgctcaagattacaggctgtgccagccctggaaaaacagttacaattgttgttcgtggttctaacaaactggtgattgaagaagctgagcgctccattcatgatgccctatgtgttattcgttgtttagtgaagaagagggctcttattgcaggaggtggtgctccagaaatagagttggccctacgattaactgaatattcacgaacactgagtggtatggaatcctactgcgttcgtgcttttgcagatgctatggaggtcattccatctacactagctgaaaatgccggcctgaatcccatttctacagtaacagaactaagaaaccggcatgcccagggagaaaaaactgcaggcattaatgtccgaaagggtggtatttccaacattttggaggaactggttgtccagcctctgttggtatcagtcagtgctctgactcttgcaactgaaactgttcggagcattctgaaaatagatgatgtggtaaacactcgataatctggataactgactagcaccattatgatcaccagtattgtggctggaatggaagaagatcaccttggtgttccttgtt

SEQ ID NO: 164904 - DNA, 1620 bp, Artificial Sequence
  derived and/or modified sequence
atgcccgagaacgtggcccccagaagcggcgccaccgccggcgccgccggcggcagaggcaagggcgcctaccaggacagagacaagcccgcccagatcagattcagcaacatcagcgccgccaaggccgtggccgacgccatcagaaccagcctgggccccaagggcatggacaagatgatccaggacggcaagggcgacgtgaccatcaccaacgacggcgccaccatcctgaagcagatgcaggtgctgcaccccgccgccagaatgctggtggagctgagcaaggcccaggacatcgaggccggcgacggcaccaccagcgtggtgatcatcgccggcagcctgctggacagctgcaccaagctgctgcagaagggcatccaccccaccatcatcagcgagagcttccagaaggccctggagaagggcatcgagatcctgaccgacatgagcagacccgtggagctgagcgacagagagaccctgctgaacagcgccaccaccagcctgaacagcaaggtggtgagccagtacagcagcctgctgagccccatgagcgtgaacgccgtgatgaaggtgatcgaccccgccaccgccaccagcgtggacctgagagacatcaagatcgtgaagaagctgggcggcaccatcgacgactgcgagctggtggagggcctggtgctgacccagaaggtgagcaacagcggcatcaccagagtggagaaggccaagatcggcctgatccagttctgcctgagcgcccccaagaccgacatggacaaccagatcgtggtgagcgactacgcccagatggacagagtgctgagagaggagagagcctacatcctgaacctggtgaagcagatcaagaagaccggctgcaacgtgctgctgatccagaagagcatcctgagagacgccctgagcgacctggccctgcacttcctgaacaagatgaagatcatggtgatcaaggacatcgagagagaggacatcgagttcatctgcaagaccatcggcaccaagcccgtggcccacatcgaccagttcaccgccgacatgctgggcagcgccgagctggccgaggaggtgaacctgaacggcagcggcaagctgctgaagatcaccggctgcgccagccccggcaagaccgtgaccatcgtggtgagaggcagcaacaagctggtgatcgaggaggccgagagaagcatccacgacgccctgtgcgtgatcagatgcctggtgaagaagagagccctgatcgccggcggcggcgcccccgagatcgagctggccctgagactgaccgagtacagcagaaccctgagcggcatggagagctactgcgtgagagccttcgccgacgccatggaggtgatccccagcaccctggccgagaacgccggcctgaaccccatcagcaccgtgaccgagctgagaaacagacacgcccagggcgagaagaccgccggcatcaacgtgagaaagggcggcatcagcaacatcctggaggagctggtggtgcagcccctgctggtgagcgtgagcgccctgaccctggccaccgagaccgtgagaagcatcctgaagatcgacgacgtggtgaacaccagatag

SEQ ID NO: 164905 - DNA, 1452 bp, Artificial Sequence
  derived and/or modified sequence
atggacaagatgatccaggacggcaagggcgacgtgaccatcaccaacgacggcgccaccatcctgaagcagatgcaggtgctgcaccccgccgccagaatgctggtggagctgagcaaggcccaggacatcgaggccggcgacggcaccaccagcgtggtgatcatcgccggcagcctgctggacagctgcaccaagctgctgcagaagggcatccaccccaccatcatcagcgagagcttccagaaggccctggagaagggcatcgagatcctgaccgacatgagcagacccgtggagctgagcgacagagagaccctgctgaacagcgccaccaccagcctgaacagcaaggtggtgagccagtacagcagcctgctgagccccatgagcgtgaacgccgtgatgaaggtgatcgaccccgccaccgccaccagcgtggacctgagagacatcaagatcgtgaagaagctgggcggcaccatcgacgactgcgagctggtggagggcctggtgctgacccagaaggtgagcaacagcggcatcaccagagtggagaaggccaagatcggcctgatccagttctgcctgagcgcccccaagaccgacatggacaaccagatcgtggtgagcgactacgcccagatggacagagtgctgagagaggagagagcctacatcctgaacctggtgaagcagatcaagaagaccggctgcaacgtgctgctgatccagaagagcatcctgagagacgccctgagcgacctggccctgcacttcctgaacaagatgaagatcatggtgatcaaggacatcgagagagaggacatcgagttcatctgcaagaccatcggcaccaagcccgtggcccacatcgaccagttcaccgccgacatgctgggcagcgccgagctggccgaggaggtgaacctgaacggcagcggcaagctgctgaagatcaccggctgcgccagccccggcaagaccgtgaccatcgtggtgagaggcagcaacaagctggtgatcgaggaggccgagagaagcatccacgacgccctgtgcgtgatcagatgcctggtgaagaagagagccctgatcgccggcggcggcgcccccgagatcgagctggccctgagactgaccgagtacagcagaaccctgagcggcatggagagctactgcgtgagagccttcgccgacgccatggaggtgatccccagcaccctggccgagaacgccggcctgaaccccatcagcaccgtgaccgagctgagaaacagacacgcccagggcgagaagaccgccggcatcaacgtgagaaagggcggcatcagcaacatcctggaggagctggtggtgcagcccctgctggtgagcgtgagcgccctgaccctggccaccgagaccgtgagaagcatcctgaagatcgacgacgtggtgaacaccagatag

SEQ ID NO: 164906 - protein, 535 aa, Artificial Sequence
  derived and/or modified sequence
MASLSLAPVNIFKAGADEERAETARLTSFIGAIAIGDLVKSTLGPKGMDKILLSSGRDASLMVTNDGATILKNIGVDNPAAKVLVDMSRVQDDEVGDGTTSVTVLAAELLREAESLIAKKIHPQTIIAGWREATKAAREALLSSAVDHGSDEVKFRQDLMNIAGTTLSSKLLTHHKDHFTKLAVEAVLRLKGSGNLEAIHIIKKLGGSLADSYLDEGFLLDKKIGVNQPKRIENAKILIANTGMDTDKIKIFGSRVRVDSTAKVAEIEHAEKEKMKEKVERILKHGINCFINRQLIYNYPEQLFGAAGVMAIEHADFAGVERLALVTGGEIASTFDHPELVKLGSCKLIEEVMIGEDKLIHFSGVALGEACTIVLRGATQQILDEAERSLHDALCVLAQTVKDSRTVYGGGCSEMLMAHAVTQLANRTPGKEAVAMESYAKALRMLPTIIADNAGYDSADLVAQLRAAHSEGNTTAGLDMREGTIGDMAILGITESFQVKRQVLLSAAEAAEVILRVDNIIKAAPRKRVPDHHPC

SEQ ID NO: 164907 - protein, 488 aa, Artificial Sequence
  derived and/or modified sequence
MDKILLSSGRDASLMVTNDGATILKNIGVDNPAAKVLVDMSRVQDDEVGDGTTSVTVLAAELLREAESLIAKKIHPQTIIAGWREATKAAREALLSSAVDHGSDEVKFRQDLMNIAGTTLSSKLLTHHKDHFTKLAVEAVLRLKGSGNLEAIHIIKKLGGSLADSYLDEGFLLDKKIGVNQPKRIENAKILIANTGMDTDKIKIFGSRVRVDSTAKVAEIEHAEKEKMKEKVERILKHGINCFINRQLIYNYPEQLFGAAGVMAIEHADFAGVERLALVTGGEIASTFDHPELVKLGSCKLIEEVMIGEDKLIHFSGVALGEACTIVLRGATQQILDEAERSLHDALCVLAQTVKDSRTVYGGGCSEMLMAHAVTQLANRTPGKEAVAMESYAKALRMLPTIIADNAGYDSADLVAQLRAAHSEGNTTAGLDMREGTIGDMAILGITESFQVKRQVLLSAAEAAEVILRVDNIIKAAPRKRVPDHHPC

SEQ ID NO: 164908 - DNA, 1608 bp, Artificial Sequence
  derived and/or modified sequence
atggctagccttagcctggctccagtaaacatcttcaaggcaggtgccgatgaggagagggcagagacagcacgactgacctcgttcataggtgccatagcgattggcgatttggtgaaaagcacgttggggcccaaagggatggacaaaatactcttgtcttccggcagagacgcatccctaatggtgacaaatgatggagctaccatcctgaagaacatcggagtggacaacccggccgcgaaggtgttggtggatatgagccgcgtgcaggacgatgaggttggcgatggtacgacgtccgtgacagtgttggccgctgaactgttgagagaggctgaaagcctgatcgccaagaagattcaccctcagacaattatagcaggctggcgggaggctactaaggcagctcgagaagcactactgtctagtgctgtagaccatggcagcgacgaggtaaaatttaggcaggacctgatgaacattgcggggactactctttctagtaaactactcactcaccataaagaccatttcaccaaattagctgttgaggctgtgctgcgtctgaagggatccgggaacttggaggccatacacatcataaagaaacttggtggtagcttggccgatagctatctggacgagggttttctgttggataaaaaaattggcgtgaaccagcccaaaaggatcgaaaacgctaagatcctgattgcaaacactggcatggacactgacaaaattaagatctttgggtcccgggtgagagttgattccactgccaaggtggcggagatcgagcacgccgagaaagagaaaatgaaggagaaagttgaaaggatccttaaacacggcatcaattgctttataaacaggcagcttatttataattacccggaacagctatttggcgcagctggagtaatggccatcgagcacgccgacttcgcaggggttgaacgcttggcactggttaccggaggcgagattgcttctacctttgatcatccagaactagtgaagctcggttcgtgtaaacttattgaagaagtaatgatcggagaagacaagctgatacacttctctggcgtcgccctgggcgaagcctgcaccatcgttctgcggggcgccacccagcagatcttggatgaggcggaaagatcgctacacgacgccctgtgcgtactagcccaaaccgtcaaagactctcggaccgtctacgggggaggctgttctgaaatgctgatggctcacgcggtgacccagcttgccaacaggacacccggaaaggaagcagtagctatggagtcgtatgccaaagcgctcagaatgctccctaccattattgccgataacgccggatatgatagtgcagatctggtagcccagctccgtgcagcgcattctgaaggtaacactactgctgggttagacatgcgggagggcaccatcggagacatggccatacttggaattaccgagtcattccaagtgaagagacaggtcttgctcagcgccgccgaggctgccgaggtcatattgcgtgtggacaacataatcaaggcagcacccaggaagcgggtccctgaccatcacccgtgctag

SEQ ID NO: 164909 - DNA, 1467 bp, Artificial Sequence
  derived and/or modified sequence
atggataagattctcctctcttctggccgagacgcttcgctcatggtgaccaatgatggggcaacaatcctgaagaacataggtgtagataaccccgcagcaaaagttttagttgacatgagtagagtacaggatgatgaggtaggtgatggaacaacaagtgtcaccgtgctggccgcagagttgcttcgcgaagccgaatctttaatcgccaagaaaattcatccacaaaccattatcgctggctggagggaggctactaaggctgctcgtgaagccttgctgagctccgctgtggaccacgggagcgacgaggtgaaattccgccaggaccttatgaatatagcaggcacaaccctgtctagcaagttactgacacatcataaagaccatttcaccaagctcgccgtagaggccgtgctgcgccttaaagggtccggcaacttggaggctatccacataatcaaaaagctcggaggaagtctggctgattcttacttggatgagggcttccttcttgacaaaaaaatcggggtcaaccaacccaaacgcattgagaatgccaagatcctgatagcgaacacggggatggatactgataagattaagatctttgggtcgagagtccgggtggatagcacggcgaaggtggctgaaatcgagcacgcggagaaggaaaaaatgaaagagaaagtggaaaggattctgaaacacggcataaattgctttatcaatcgtcagctgatatataactacccggagcagctcttcggcgccgccggagtcatggctatagagcatgcagactttgctggcgtggagcggcttgctctggtcaccggaggggagatcgcatccacatttgaccatcctgagctggtgaaactcggtagttgtaaattaatcgaggaagtgatgataggggaagataagcttatccacttttcgggagttgctctcggcgaggcttgcactatagtgcttcgtggagccacccaacaaattctcgatgaagcagaacgctcattacacgacgcactatgtgtcctcgcccaaaccgtcaaggacagtcggacggtgtacgggggcggctgcagcgagatgctcatggctcacgctgtgacacagctggccaacaggacaccagggaaagaagccgtggcaatggagtcatacgcgaaggccctccgtatgctccctactatcatcgccgacaacgctggttacgacagcgccgacctggtggcccaactgcgtgcggcccacagtgagggcaatacgacggctggtctggatatgagggaaggcaccataggagacatggccatcctgggtatcactgaatcatttcaggtaaagaggcaggtgctgttatctgccgccgaagccgctgaggtgatcctgagagtcgacaatattataaaggccgctcctcgcaagcgcgtccccgaccaccatccatgctag

SEQ ID NO: 164910 - DNA, 1608 bp, Artificial Sequence
  derived and/or modified sequence
atggccagcctgagcctggcccctgtgaacatcttcaaggccggggctgatgaggagagagctgagacagcccggctgaccagcttcatcggggccatcgccatcggggacctggtgaagagcaccctgggccccaagggcatggacaagatcctgctgagcagcggcagagatgccagcctgatggtgaccaatgatggagccaccatcctgaagaacatcggcgtggacaacccagctgccaaggtgctggtggacatgagccgggtgcaggatgatgaggtgggagatggcaccacctctgtgacagtgctggccgctgagctgctgcgggaggccgagagcctgattgccaagaagatccacccccagaccatcatcgccggctggagggaggccaccaaggccgcccgggaggccctgctgagcagcgctgtggaccacggcagtgatgaggtgaagttccggcaggacctgatgaacattgctggcaccaccctgagcagcaagctgctgacccaccacaaggaccacttcaccaagctggccgtggaggccgtgctgcggctgaagggcagcggcaacctggaggccatccacatcatcaagaagctgggcggcagcctggccgacagctacctggatgagggcttcctgctggacaagaagattggagtgaaccagcccaagagaattgaaaatgccaagatcctgattgccaacacaggcatggacacagacaagatcaagatcttcggcagccgggtgcgggtggacagcacagccaaggtggccgagattgaacatgctgagaaggagaagatgaaggagaaggtggagcgcatcctgaagcacggcatcaactgcttcatcaaccggcagctgatctacaactacccagagcagctgtttggagctgctggggtgatggccatcgagcacgccgactttgctggggtggagcggctggccctggtgactggaggagaaattgccagcacctttgaccaccctgagctggtgaagctgggcagctgcaagctgattgaggaggtgatgattggagaggacaagctgatccacttctctggagtggccctgggggaggcctgcaccatcgtgctgcggggggccacccagcagatcctggatgaggccgagaggagcctgcatgatgccctgtgtgtgctggcccagacagtgaaggacagcaggacagtgtatggaggcggctgcagcgagatgctgatggcccatgctgtgacccagctggccaacagaacacctgggaaggaggccgtggccatggagagctatgccaaggccctgaggatgctgcccaccatcatcgctgacaatgccggctatgacagcgctgacctggtggcccagctgcgggccgcccacagcgagggcaacaccacagctggcctggacatgagggagggcaccatcggggacatggccatcctgggcatcacagagagcttccaggtgaagaggcaggtgctgctgtctgctgctgaggccgctgaggtgatcctgcgggtggacaacatcatcaaggccgcccccaggaagagggtgcctgaccaccacccctgctag

SEQ ID NO: 164911 - DNA, 1467 bp, Artificial Sequence
  derived and/or modified sequence
atggacaagatcctgctgagcagcggcagagatgccagcctgatggtgaccaatgatggagccaccatcctgaagaacattggagtggacaacccagctgccaaggtgctggtggacatgagccgggtgcaggatgatgaggtgggagatggcaccacctctgtgacagtgctggccgctgagctgctgcgggaggccgagagcctcatcgccaagaagatccacccccagaccatcatcgccggctggagggaggccaccaaggccgcccgggaggccctgctgagcagcgctgtggaccacggcagtgatgaggtgaagttccggcaggacctgatgaacattgctggcaccaccctgagcagcaagctgctgacccaccacaaggaccacttcaccaagctggccgtggaggccgtgctgcggctgaagggcagcggcaacctggaggccatccacatcatcaagaagctgggcggcagcctggccgacagctacctggatgagggcttcctgctggacaagaagattggagtgaaccagcccaagagaattgaaaatgccaagatcctgattgccaacacaggcatggacacagacaagatcaagatcttcggcagccgggtgcgggtggacagcacagccaaggtggccgagattgagcacgccgagaaggagaagatgaaggagaaggtggagcgcatcctgaagcacggcatcaactgcttcatcaaccggcagctgatctacaactacccagagcagctgtttggagctgctggggtgatggccattgaacatgctgactttgctggggtggagcggctggccctggtgactggaggagagatcgccagcacctttgaccaccctgagctggtgaagctgggcagctgcaagctgattgaggaggtgatgattggagaggacaagctgatccacttcagcggcgtggccctgggggaggcctgcaccatcgtgctgcggggggccacccagcagatcctggatgaagctgagaggagcctgcatgatgccctgtgtgtgctggcccagacagtgaaggacagcaggacagtgtatggaggcggctgcagcgagatgctgatggcccatgctgtgacccagctggccaacagaacacctgggaaggaggccgtggccatggagagctatgccaaggccctgaggatgctgcccaccatcatcgctgacaatgccggctatgattctgctgacctggtggcccagctgcgggccgcccacagcgagggcaacaccacagctggcctggacatgagggagggcaccatcggggacatggccatcctgggcatcacagagagcttccaggtgaagaggcaggtgctgctgtctgctgctgaggccgctgaggtgatcctgcgggtggacaacatcatcaaggccgcccccaggaagagggtgcctgaccaccacccctgctag

SEQ ID NO: 164912 - DNA, 1608 bp, Artificial Sequence
  derived and/or modified sequence
atggccagcctgagcctggcccccgtgaacatcttcaaggccggcgctgatgaggagagagccgagactgcccgtttaacctccttcatcggtgctatcgcaatcggggacctcgtgaagagtactctggggccgaaggggatggacaaaatcttactttcatctggccgagatgcatcgctgatggtaactaacgatggcgctactattctcaaaaacatcggtgtcgacaatccagccgccaaggtcctcgtggatatgagcagagtccaggatgacgaggtaggtgatggcaccactagcgttaccgttcttgctgctgagctgcttcgcgaggcggaaagcctgattgctaaaaaaattcatccccaaacgataatagccgggtggagagaagcaactaaggccgctcgggaagccctacttagcagcgccgtggaccacggctcggatgaagtgaagtttcgtcaggaccttatgaacatagctggcacaaccctttcttccaaactactcacccatcacaaagatcactttacgaaactggccgtggaggccgtgctgcgcttaaaaggcagtgggaacctggaagctattcatattattaaaaaactaggcggctctctggctgatagctaccttgatgagggctttctgctggacaagaaaataggcgtcaaccagccaaaaaggatcgaaaatgcaaagatactgattgccaatacgggcatggacacagacaaaataaagatatttggctctcgtgttagagtcgattccaccgccaaggtggccgagattgagcatgccgaaaaagagaaaatgaaagaaaaggtggagcgtattctcaagcatggcatcaattgtttcattaatcggcagctcatttacaactatcccgagcagttgttcggggcggctggtgtcatggcaattgaacacgccgatttcgcaggagtggagcgactggctctagtcactggaggggagatcgcttctacgtttgatcacccagagttggtgaagctcggcagctgtaagcttattgaggaagttatgattggtgaagataaactgattcatttctcaggagtcgctctgggcgaggcctgcacgatcgtgttgcgaggagccacccagcagatcctggatgaagcggagagatccctccatgacgccctttgcgtgctcgcgcagaccgtcaaagactcccggacagtatatggcggaggatgcagtgaaatgctcatggcccatgccgtgactcaactcgcaaatcgcacaccaggtaaagaggccgtggctatggagtcttacgccaaggccctgagaatgctcccaacaataatcgccgacaacgccggttacgatagcgcggatctggtagctcagctgcgggctgcccacagcgaaggcaacacaaccgcgggactggatatgcgagaggggactatcggggacatggccattctgggaatcactgaaagctttcaagtgaaacgacaggtgttgctgagcgctgcggaggccgccgaagtcattcttcgggtggataatataatcaaggccgcccctcggaaacgggtacctgaccaccatccctgttag

SEQ ID NO: 164913 - DNA, 1467 bp, Artificial Sequence
  derived and/or modified sequence
atggacaagatcctgctgagcagcggccgggacgccagcctgatggtgacgaacgacggcgccacgatcctgaagaatattggcgtggacaacccagcagccaaagtgttggttgacatgtcaagagtgcaggacgatgaggtgggcgacggcacaacatccgttacggtattggcagcagagctgttgcgtgaggcagaaagcctaatcgctaagaaaatccatcctcagaccattatagctggctggagggaggctacgaaggcagcccgggaggccctcctctcatccgccgtggaccacggatccgacgaggtgaaatttagacaagatttgatgaatatagctggcactaccctctcgtccaagttgctgacacaccacaaggatcattttacaaaactcgccgtggaggccgtcctcaggttgaaaggctctggcaatctagaggctatccatattatcaagaagctcggaggctcccttgctgattcctatttggacgaaggattcctgttggacaaaaagataggggtcaatcagcccaaacgcattgaaaatgctaagattctgattgcaaacacgggcatggatacagataaaataaaaatcttcgggtctcgcgttcgcgtggactctaccgccaaggttgcagaaatcgagcacgccgagaaagaaaagatgaaggagaaggttgaaaggattctcaagcacggaatcaactgctttattaaccgccaactcatatacaattaccccgagcagctcttcggggcagccggggtgatggccatagagcatgccgatttcgccggggttgagaggttggcactggtgacgggcggtgagattgcctccacttttgatcacccggaattggtaaaactggggtcgtgcaaactcatcgaggaggtgatgatcggggaggataaattgatccatttctcaggcgtcgccctgggagaagcatgtactatcgtgttgagaggggccacgcaacagatcctcgatgaagccgaaaggtctctgcacgatgcactatgtgtcctagcacaaacagtcaaggattccaggaccgtttatggtggcggatgcagcgaaatgctgatggcccatgccgtcacgcaactcgccaacagaacccctgggaaagaagcagtcgccatggagtcctatgcaaaagccctgaggatgctgccgactattatcgcagataatgccggttacgacagtgccgatctcgtggctcaattgagagctgcccactccgaaggcaacacaaccgctggactggacatgagggagggcacgatcggcgatatggccatcttgggtataaccgagagttttcaggtgaagcggcaggttctcctgtcagccgcagaggccgctgaagtgattcttcgagtagacaatatcattaaagccgcgcctcggaaaagggtcccagaccatcacccatgctag

SEQ ID NO: 164914 - DNA, 1608 bp, Artificial Sequence
  derived and/or modified sequence
atggcaagtctgagtctggctcctgtgaatatatttaaggcaggcgctgacgaggagagggcggaaaccgcacgactgacctctttcatcggggctattgctataggcgacctggtgaaaagtactctgggccctaaggggatggataagatactgctgtcatccggtcgggatgccagcctgatggtaacaaacgacggggctaccattttaaaaaatatcggcgtcgacaaccccgcagcgaaggtgctagtcgacatgagtcgggtgcaagacgatgaagtcggggacggcaccaccagcgtgaccgtgctagcggctgagctcctgcgagaggcggagtctttgatagccaagaagatccacccacagacgattatcgctggatggcgcgaggcaaccaaggccgcacgggaggcacttctgtccagcgccgtggaccacggctctgatgaggtcaagttcagacaagatctaatgaacatcgccggaaccactctgagcagcaagttgcttacacaccacaaggatcactttacgaaacttgccgtggaggctgtgctcaggcttaagggctctgggaacctcgaggccatccacatcatcaaaaaactgggaggttctttagctgactcttacctggacgagggatttcttctggacaagaagataggtgtcaatcagccaaagagaatcgaaaacgctaagatcctgatagccaacacaggtatggacactgataagataaaaatattcggttctcgcgtccgtgtggacagtaccgcaaaggtggccgaaattgagcacgccgagaaagagaaaatgaaagagaaagtggagcggattctcaagcatggcattaattgctttatcaatcgccagttgatctacaactatccggaacagttgttcggcgctgctggagtgatggctatcgagcacgccgacttcgctggcgtggagaggctggccctggttactggcggtgaaatcgctagtacatttgaccatcctgaactcgtgaaattgggttcttgtaaacttatcgaagaggtgatgatcggagaagataaactgatccatttttctggcgtggccctgggcgaggcgtgcaccattgtgctccggggagctactcagcagatccttgacgaagccgagcgcagtcttcacgatgctctgtgtgtgttagcacaaacggtcaaggacagtagaaccgtgtatggcggaggctgctccgagatgctgatggctcacgctgtgactcagcttgccaatcgaacccctggaaaggaagccgttgccatggaatcgtacgctaaagctctgagaatgcttccaactatcatcgctgataatgccggatacgacagtgccgatctggtggcccagctgagggccgctcatagcgaagggaatactacggccggtctcgatatgagggaggggaccattggagacatggctattttaggtattacagagtccttccaggttaaacgccaagttctccttagtgccgctgaagctgcggaagtgatcctccgagtggataacataatcaaggccgctcccaggaaaagggtccccgaccaccacccatgttag

SEQ ID NO: 164915 - DNA, 1467 bp, Artificial Sequence
  derived and/or modified sequence
atggacaaaatattgttatcctccggacgggatgcttcactcatggtgaccaatgacggggcaacaattctgaagaacatcggtgtcgataaccccgctgccaaggtactcgtagatatgagccgagtgcaggacgatgaggttggagacggtaccacctctgtgaccgtcctcgccgcagaactgttgagagaagcagagtccctcatagctaagaaaatccacccacagaccatcatcgctggttggagggaagcaacgaaggccgcacgagaggcccttctgtcctccgcggtggaccatggcagtgatgaggtgaagttccggcaagacttgatgaacattgccggaactacactgagctctaaattactcacgcaccacaaagatcactttaccaagctggctgtcgaggccgtgctgagactgaagggatcgggtaacctggaggctattcacatcatcaaaaaactgggcggatccttagctgacagctacttggacgaggggtttcttttggacaaaaaaatcggcgtaaatcagcctaagaggatcgagaatgcaaaaatcctgatcgctaacactggaatggatacagacaaaatcaaaatctttggttctcgtgtgagggtagatagcacagccaaggtcgcagaaatagaacacgctgaaaaagaaaaaatgaaagaaaaggtggagagaatactgaagcacgggatcaactgctttatcaacagacagttaatttataactaccccgagcagttattcggcgctgcaggagttatggcaatagagcatgccgatttcgcaggggtagaacgactggccctagtcacaggtggagaaatcgcatccacattcgatcacccagagttggtaaaattggggtcttgcaagcttatcgaggaggtgatgatcggggaggataaactgatacacttctccggggtggcccttggggaggcttgcaccatcgttcttcgcggtgcaacccagcaaatccttgatgaggccgagcggtctctgcatgatgctctgtgtgtgctggcacagactgttaaggacagcaggaccgtgtacggtggcggttgttcagagatgctcatggctcatgctgtgacacaactcgctaataggacccccggaaaagaggctgttgctatggaatcttacgcaaaggcgctgcgcatgctgcccactattatcgccgacaatgcaggatacgactccgccgatctcgtggcccaactgcgggctgcccactcagaaggaaacactactgcaggattggatatgagagagggaaccatcggtgacatggctatcttgggaattacggagagcttccaagtcaagagacaggtacttctcagtgcagccgaagccgctgaggtgattttacgcgtcgacaacatcataaaagctgcccctcggaagcgcgtgcccgaccaccatccttgttag

SEQ ID NO: 164916 - DNA, 2041 bp, Artificial Sequence
  derived and/or modified sequence
agtgtgaaaggctgcgtttccggcccgtggggctccaatcaaaatgggacgcctgctggcggtaacgacaggccggggccccgccccccgaagtagggcgtgtggcgtcacttccggcttccttcagtccgctggtcccgagcacgagctgtgaggggattcacttgtgtgcggaactcctcggaaccatggcgtccctttcccttgcacctgttaacatctttaaggcaggagctgatgaagagagagcagagacagctcgtctgacttcttttattggtgccatcgccattggagacttggtaaagagcaccttgggacccaaaggcatggacaaaattcttctaagcagtggacgagatgcctctcttatggtaaccaatgatggtgccactattctaaaaaacattggtgttgacaatccagcagctaaagttttagttgatatgtcaagggttcaagatgatgaagttggtgatggcactacctctgttaccgttttagcagcagaattattaagggaagcagaatctttaattgcaaaaaagattcatccacagaccatcatagcgggttggagagaagccacgaaggctgcaagagaggcgctgttgagttctgcagttgatcatggttccgatgaagttaaattccgtcaagatttaatgaatattgcgggcacaacattatcctcaaaacttcttactcatcacaaagaccactttacaaagttagctgtagaagcagttctcagactgaaaggctctggcaacctggaggcaattcatattatcaagaagctaggaggaagtttggcagattcctatttagatgaaggcttcctgttggataaaaaaattggagtaaatcaaccaaaacgaattgaaaatgctaaaattcttattgcaaatactggtatggatacagacaaaataaagatatttggttcccgggtaagagttgactctacagcaaaggttgcagaaatagaacatgcggaaaaggaaaaaatgaaggagaaagttgaacgtattcttaagcatggaataaattgctttattaacaggcaattaatttataattatcctgaacagctctttggtgctgctggtgtcatggctattgagcatgcagattttgcaggtgtggaacgcctagctcttgtcacaggtggtgaaattgcctctacctttgatcacccagaactggtgaagcttggaagttgcaaacttatcgaggaagtcatgattggagaagacaaactcattcacttttctggggttgcccttggtgaggcttgtaccattgttttgcgtggtgccactcaacaaattttagatgaagcagaaagatcattgcatgatgctctttgtgttcttgcgcaaactgtaaaggactctagaacagtttatggaggaggctgttctgagatgttgatggctcatgctgtgacacagcttgccaatagaacaccaggcaaagaagctgttgcaatggagtcttatgctaaagcactgagaatgttgccaaccatcatagctgacaatgcaggctatgacagtgcagacctggtggcacagctcagggctgctcacagtgaaggcaataccactgctggattggatatgagggaaggcaccattggagatatggctatcctgggtataacagaaagttttcaagtgaagcgacaggttcttctgagtgcagctgaagcagcagaggtgattctgcgtgtggacaacatcatcaaagcggcacccaggaaacgtgtccctgatcaccacccctgttaagcattcccacgtgctgtcgatctttggaccagtttctagcaaagttgtgtttgaaagatactctattaaagaagactgtggaatctgtttatcggtgcccattatatccttaagtttggatatttagctgaccttcgctttaacataggtctaatttatttgccgtgtcattttccatacaaatcagttgatttaaaaaagttcatttctcatactgtgcattaaaataaaaatttgaacaatta

SEQ ID NO: 164917 - DNA, 2189 bp, Artificial Sequence
  derived and/or modified sequence
gcgtgcggcctgcgccaggccagccggtggagctcaccacgagggggaggggtggaccgcaaagccagcgtctccttgtgcctaggtctttgcatagtcccggcagcccaggtccgcgcctcacccggagcgaagaaatttctagtgtgggacccgctccgccctccttctaggggcggagcctggagcgacggggtctgagccatcagagggtggaggggccgcagccttccgagggtggaagatggaggccgcgttccctcgcccgcccggcaggcgtcaccttgatggcctgcaacccctccctgcctcattcttagttcaagatcgtctttagtctcgctgcgtccctttcccttgcacctgttaacatctttaaggcaggagctgatgaagagagagcagagacagctcgtctgacttcttttattggtgccatcgccattggagacttggtaaagagcaccttgggacccaaaggcatggacaaaattcttctaagcagtggacgagatgcctctcttatggtaaccaatgatggtgccactattctaaaaaacattggtgttgacaatccagcagctaaagttttagttgatatgtcaagggttcaagatgatgaagttggtgatggcactacctctgttaccgttttagcagcagaattattaagggaagcagaatctttaattgcaaaaaagattcatccacagaccatcatagcgggttggagagaagccacgaaggctgcaagagaggcgctgttgagttctgcagttgatcatggttccgatgaagttaaattccgtcaagatttaatgaatattgcgggcacaacattatcctcaaaacttcttactcatcacaaagaccactttacaaagttagctgtagaagcagttctcagactgaaaggctctggcaacctggaggcaattcatattatcaagaagctaggaggaagtttggcagattcctatttagatgaaggcttcctgttggataaaaaaattggagtaaatcaaccaaaacgaattgaaaatgctaaaattcttattgcaaatactggtatggatacagacaaaataaagatatttggttcccgggtaagagttgactctacagcaaaggttgcagaaatagaacatgcggaaaaggaaaaaatgaaggagaaagttgaacgtattcttaagcatggaataaattgctttattaacaggcaattaatttataattatcctgaacagctctttggtgctgctggtgtcatggctattgagcatgcagattttgcaggtgtggaacgcctagctcttgtcacaggtggtgaaattgcctctacctttgatcacccagaactggtgaagcttggaagttgcaaacttatcgaggaagtcatgattggagaagacaaactcattcacttttctggggttgcccttggtgaggcttgtaccattgttttgcgtggtgccactcaacaaattttagatgaagcagaaagatcattgcatgatgctctttgtgttcttgcgcaaactgtaaaggactctagaacagtttatggaggaggctgttctgagatgttgatggctcatgctgtgacacagcttgccaatagaacaccaggcaaagaagctgttgcaatggagtcttatgctaaagcactgagaatgttgccaaccatcatagctgacaatgcaggctatgacagtgcagacctggtggcacagctcagggctgctcacagtgaaggcaataccactgctggattggatatgagggaaggcaccattggagatatggctatcctgggtataacagaaagttttcaagtgaagcgacaggttcttctgagtgcagctgaagcagcagaggtgattctgcgtgtggacaacatcatcaaagcggcacccaggaaacgtgtccctgatcaccacccctgttaagcattcccacgtgctgtcgatctttggaccagtttctagcaaagttgtgtttgaaagatactctattaaagaagactgtggaatctgtttatcggtgcccattatatccttaagtttggatatttagctgaccttcgctttaacataggtctaatttatttgccgtgtcattttccatacaaatcagttgatttaaaaaagttcatttctcatactgtgcattaaaataaaaatttgaac

SEQ ID NO: 164918 - DNA, 1608 bp, Artificial Sequence
  derived and/or modified sequence
atggccagcctgagcctggcccccgtgaacatcttcaaggccggcgccgacgaggagagagccgagaccgccagactgaccagcttcatcggcgccatcgccatcggcgacctggtgaagagcaccctgggccccaagggcatggacaagatcctgctgagcagcggcagagacgccagcctgatggtgaccaacgacggcgccaccatcctgaagaacatcggcgtggacaaccccgccgccaaggtgctggtggacatgagcagagtgcaggacgacgaggtgggcgacggcaccaccagcgtgaccgtgctggccgccgagctgctgagagaggccgagagcctgatcgccaagaagatccacccccagaccatcatcgccggctggagagaggccaccaaggccgccagagaggccctgctgagcagcgccgtggaccacggcagcgacgaggtgaagttcagacaggacctgatgaacatcgccggcaccaccctgagcagcaagctgctgacccaccacaaggaccacttcaccaagctggccgtggaggccgtgctgagactgaagggcagcggcaacctggaggccatccacatcatcaagaagctgggcggcagcctggccgacagctacctggacgagggcttcctgctggacaagaagatcggcgtgaaccagcccaagagaatcgagaacgccaagatcctgatcgccaacaccggcatggacaccgacaagatcaagatcttcggcagcagagtgagagtggacagcaccgccaaggtggccgagatcgagcacgccgagaaggagaagatgaaggagaaggtggagagaatcctgaagcacggcatcaactgcttcatcaacagacagctgatctacaactaccccgagcagctgttcggcgccgccggcgtgatggccatcgagcacgccgacttcgccggcgtggagagactggccctggtgaccggcggcgagatcgccagcaccttcgaccaccccgagctggtgaagctgggcagctgcaagctgatcgaggaggtgatgatcggcgaggacaagctgatccacttcagcggcgtggccctgggcgaggcctgcaccatcgtgctgagaggcgccacccagcagatcctggacgaggccgagagaagcctgcacgacgccctgtgcgtgctggcccagaccgtgaaggacagcagaaccgtgtacggcggcggctgcagcgagatgctgatggcccacgccgtgacccagctggccaacagaacccccggcaaggaggccgtggccatggagagctacgccaaggccctgagaatgctgcccaccatcatcgccgacaacgccggctacgacagcgccgacctggtggcccagctgagagccgcccacagcgagggcaacaccaccgccggcctggacatgagagagggcaccatcggcgacatggccatcctgggcatcaccgagagcttccaggtgaagagacaggtgctgctgagcgccgccgaggccgccgaggtgatcctgagagtggacaacatcatcaaggccgcccccagaaagagagtgcccgaccaccacccctgctag

SEQ ID NO: 164919 - DNA, 1467 bp, Artificial Sequence
  derived and/or modified sequence
atggacaagatcctgctgagcagcggcagagacgccagcctgatggtgaccaacgacggcgccaccatcctgaagaacatcggcgtggacaaccccgccgccaaggtgctggtggacatgagcagagtgcaggacgacgaggtgggcgacggcaccaccagcgtgaccgtgctggccgccgagctgctgagagaggccgagagcctgatcgccaagaagatccacccccagaccatcatcgccggctggagagaggccaccaaggccgccagagaggccctgctgagcagcgccgtggaccacggcagcgacgaggtgaagttcagacaggacctgatgaacatcgccggcaccaccctgagcagcaagctgctgacccaccacaaggaccacttcaccaagctggccgtggaggccgtgctgagactgaagggcagcggcaacctggaggccatccacatcatcaagaagctgggcggcagcctggccgacagctacctggacgagggcttcctgctggacaagaagatcggcgtgaaccagcccaagagaatcgagaacgccaagatcctgatcgccaacaccggcatggacaccgacaagatcaagatcttcggcagcagagtgagagtggacagcaccgccaaggtggccgagatcgagcacgccgagaaggagaagatgaaggagaaggtggagagaatcctgaagcacggcatcaactgcttcatcaacagacagctgatctacaactaccccgagcagctgttcggcgccgccggcgtgatggccatcgagcacgccgacttcgccggcgtggagagactggccctggtgaccggcggcgagatcgccagcaccttcgaccaccccgagctggtgaagctgggcagctgcaagctgatcgaggaggtgatgatcggcgaggacaagctgatccacttcagcggcgtggccctgggcgaggcctgcaccatcgtgctgagaggcgccacccagcagatcctggacgaggccgagagaagcctgcacgacgccctgtgcgtgctggcccagaccgtgaaggacagcagaaccgtgtacggcggcggctgcagcgagatgctgatggcccacgccgtgacccagctggccaacagaacccccggcaaggaggccgtggccatggagagctacgccaaggccctgagaatgctgcccaccatcatcgccgacaacgccggctacgacagcgccgacctggtggcccagctgagagccgcccacagcgagggcaacaccaccgccggcctggacatgagagagggcaccatcggcgacatggccatcctgggcatcaccgagagcttccaggtgaagagacaggtgctgctgagcgccgccgaggccgccgaggtgatcctgagagtggacaacatcatcaaggccgcccccagaaagagagtgcccgaccaccacccctgctag

SEQ ID NO: 164920 - protein, 122 aa, Artificial Sequence
  derived and/or modified sequence
MRFLAATFLLLALSTAAQAEPVQFKDCGSVDGVIKEVNVSPCPTQPCQLSKGQSYSVNVTFTSNIQSKSSKAVVHGILMGVPVPFPIPEPDGCKSGINCPIQKDKTYSYLNKLPVKSEYPSV

SEQ ID NO: 164921 - protein, 151 aa, Artificial Sequence
  derived and/or modified sequence
MRFLAATFLLLALSTAAQAEPVQFKDCGSVDGVIKEVNVSPCPTQPCQLSKGQSYSVNVTFTSNIQSKSSKAVVHGILMGVPVPFPIPEPDGCKSGINCPIQKDKTYSYLNKLPVKSEYPSIKLVVEWQLQDDKNQSLFCWEIPVQIVSHL

SEQ ID NO: 164922 - DNA, 921 bp, Artificial Sequence
  derived and/or modified sequence
gacaggtcgcctgactgggctcctccccgggcccgccccgacaggtttgtcttgtgaccgcgggcggccgctgcttctttcccgagcttggaacttcgttatccgcgatgcgtttcctggcagctacattcctgctcctggcgctcagcaccgctgcccaggccgaaccggtgcagttcaaggactgcggttctgtggatggagttataaaggaagtgaatgtgagcccatgccccacccaaccctgccagctgagcaaaggacagtcttacagcgtcaatgtcaccttcaccagcaatattcagtctaaaagcagcaaggccgtggtgcatggcatcctgatgggcgtcccagttccctttcccattcctgagcctgatggttgtaagagtggaattaactgccctatccaaaaagacaagacctatagctacctgaataaactaccagtgaaaagcgaatatccctctataaaactggtggtggagtggcaacttcaggatgacaaaaaccaaagtctcttctgctgggaaatcccagtacagatcgtttctcatctctaagtgcctcattgagttcggtgcatctggccaatgagtctgctgagactcttgacagcacctccagctctgctgcttcaacaacagtgacttgctctccaatggtatccagtgattcgttgaagaggaggtgctctgtagcagaaactgagctccgggtggctggttctcagtggttgtctcatgtctctttttctgtcttaggtggtttcattaaatgcagcacttggttagcagatgtttaattttttttttaacaacattaacttgtggcctctttctacacctggaaatttactcttgaataaataaaaactcgtttgtcttgtcttctgcaaaaaaaaaaaaaaaaaaaaaaaaa

SEQ ID NO: 164923 - DNA, 369 bp, Artificial Sequence
  derived and/or modified sequence
atgcggtttcttgctgccacatttttactcctcgccttatccaccgctgcacaggccgaacctgtgcagttcaaggactgtgggagtgtagatggggtgattaaggaggtcaacgtatcgccgtgccctacacaaccgtgtcagctgtctaaaggccaatcttactccgtgaacgtgacattcactagtaatattcagtccaaatccagcaaagctgtggtgcatggcatactaatgggggtcccagtccctttccccatccctgagcccgacggctgtaagtccggaatcaactgccccatccagaaggacaaaacttacagttacttaaataaactgcccgtcaagtccgagtatccaagcgtatag

SEQ ID NO: 164924 - DNA, 456 bp, Artificial Sequence
  derived and/or modified sequence
atgcgattcttggccgctacctttctgttgctggccctgagcacagcagcgcaggccgagcccgtccagtttaaagattgtggctccgtcgacggcgtcatcaaagaggtaaacgtgtccccatgtcctacccagccctgccagctttccaaggggcaatcctacagcgttaatgttacctttacctcaaacattcaaagcaagagcagcaaggcggtagtccatgggatcctcatgggggtgcccgtcccattcccaatacccgaacctgatggatgtaagagtggcatcaattgtcccatacaaaaagataaaacctactcttatctgaataaacttccagtcaaatccgagtacccgtccatcaaactggttgtagaatggcagttacaggacgataagaatcagtccctgttctgttgggagattcccgtgcagattgtaagtcacctgtag

SEQ ID NO: 164925 - DNA, 369 bp, Artificial Sequence
  derived and/or modified sequence
atgaggttcctggccgccaccttcctgctgctggccctgagcacagctgcccaggccgagcctgtgcagttcaaggactgtggctctgtggatggagtcatcaaggaggtgaatgtgagcccctgccccacccagccctgccagctgagcaagggccagagctacagcgtgaatgtgaccttcaccagcaacatccagagcaagagcagcaaggctgtggtgcacggcatcctgatgggcgtgcctgtgcccttccccatccctgagccagatggctgcaagagcggcatcaactgccccatccagaaggacaagacctacagctacctgaacaagctgcctgtgaagtctgagtaccccagcgtgtag

SEQ ID NO: 164926 - DNA, 456 bp, Artificial Sequence
  derived and/or modified sequence
atgaggttcctggccgccaccttcctgctgctggccctgagcacagctgcccaggccgagcctgtgcagttcaaggactgtggctctgtggatggagtcatcaaggaggtgaatgtgagcccctgccccacccagccctgccagctgagcaagggccagagctacagcgtgaatgtgaccttcaccagcaacatccagagcaagagcagcaaggctgtggtgcacggcatcctgatgggcgtgcctgtgcccttccccatccctgagccagatggctgcaagagcggcatcaactgccccatccagaaggacaagacctacagctacctgaacaagctgcctgtgaagtctgagtaccccagcatcaagctggtggtggagtggcagctgcaggatgacaagaaccagagcctcttctgctgggagatccctgtgcagatcgtgagccacctgtag

SEQ ID NO: 164927 - DNA, 369 bp, Artificial Sequence
  derived and/or modified sequence
atgcggttcctggccgccaccttcctgctgctggccctgagcaccgcggcccaggctgagcccgtgcagttcaaagactgcggtagtgtagacggagtgatcaaagaggtgaatgtgtccccgtgccctacccagccctgccagctgtcaaaaggccaatcatactccgtgaacgtaacatttacctcaaatattcagagtaagtccagcaaagcagtagttcacggtatcctaatgggggtgcccgtgccttttccaattccggaaccagacggctgcaaatctgggatcaactgtccaatacagaaggacaaaacctatagttatctgaataagctgcctgtgaaatccgagtatccatctgtttag

SEQ ID NO: 164928 - DNA, 456 bp, Artificial Sequence
  derived and/or modified sequence
atgcggttcctggccgccaccttcctgctgctggccctgagcaccgcagcacaagcagagcccgttcaatttaaagattgtggctcagtcgatggggttattaaggaagtgaacgtgagcccctgccccacacaaccatgccagctgtcaaagggtcagtcgtattccgtgaacgtaacatttacctcgaatattcaatccaaatcctccaaggcagtcgttcatggaatccttatgggcgtgcctgtgccttttcccataccagagccagatggctgtaagagtggaataaattgccccatccagaaagacaagacatatagctacctgaacaagttaccagtgaagtcagagtacccctccataaaactagtggtggagtggcaacttcaagatgacaagaaccagagtctgttctgctgggagatccccgttcaaatcgtgtctcacctgtag

SEQ ID NO: 164929 - DNA, 469 bp, Artificial Sequence
  derived and/or modified sequence
agacggcagcggcggggacgcacccaggaagccggagaggtttgtcttgtgaccgcgggcggccgctgcttctttcccgagcttggaacttcgttatccgcgatgcgtttcctggcagctacattcctgctcctggcgctcagcaccgctgcccaggccgaaccggtgcagttcaaggactgcggttctgtggatggagttataaaggaagtgaatgtgagcccatgccccacccaaccctgccagctgagcaaaggacagtcttacagcgtcaatgtcaccttcaccagcaatattcagtctaaaagcagcaaggccgtggtgcatggcatcctgatgggcgtcccagttccctttcccattcctgagcctgatggttgtaagagtggaattaactgccctatccaaaaagacaagacctatagctacctgaataaactaccagtgaaaagcgaatatccctctgtaa

SEQ ID NO: 164930 - DNA, 1035 bp, Artificial Sequence
  derived and/or modified sequence
ggtccgggcgggtcaggcctctgaggggatggcatgggcggagactgcaggcttctgggcctgagagggctggagctggctttccggagccgggggcggggcgcgggcgggcctcagctgtggttactggtgacaggtcgcctgactgggctcctccccgggcccgccccgacaggtttgtcttgtgaccgcgggcggccgctgcttctttcccgagcttggaacttcgttatccgcgatgcgtttcctggcagctacattcctgctcctggcgctcagcaccgctgcccaggccgaaccggtgcagttcaaggactgcggttctgtggatggagttataaaggaagtgaatgtgagcccatgccccacccaaccctgccagctgagcaaaggacagtcttacagcgtcaatgtcaccttcaccagcaatattcagtctaaaagcagcaaggccgtggtgcatggcatcctgatgggcgtcccagttccctttcccattcctgagcctgatggttgtaagagtggaattaactgccctatccaaaaagacaagacctatagctacctgaataaactaccagtgaaaagcgaatatccctctataaaactggtggtggagtggcaacttcaggatgacaaaaaccaaagtctcttctgctgggaaatcccagtacagatcgtttctcatctctaagtgcctcattgagttcggtgcatctggccaatgagtctgctgagactcttgacagcacctccagctctgctgcttcaacaacagtgacttgctctccaatggtatccagtgattcgttgaagaggaggtgctctgtagcagaaactgagctccgggtggctggttctcagtggttgtctcatgtctctttttctgtcttaggtggtttcattaaatgcagcacttggttagcagatgtttaattttttttttaacaacattaacttgtggcctctttctacacctggaaatttactcttgaataaataaaaactcgtttgtcttgtcttctgcatgtgggc

SEQ ID NO: 164931 - DNA, 369 bp, Artificial Sequence
  derived and/or modified sequence
atgcggtttcttgccgcaacctttctgctattggctctcagtaccgcagcccaagctgagccggtgcagttcaaagactgcggaagtgttgatggcgttatcaaagaggtcaatgtgagcccatgtccaactcagccttgccaattgagcaaaggacaaagttactctgtaaatgtgacttttacctccaacatacagtcgaagtcctcaaaggcagtagtccatgggatcctcatgggagtgccagtgccattcccaatacccgagcccgatggctgtaaaagtggaatcaattgtcctatccagaaagacaaaacttattcatacctgaacaaattgccagtcaagtccgagtatcccagcgtgtag

SEQ ID NO: 164932 - DNA, 456 bp, Artificial Sequence
  derived and/or modified sequence
atgaggttcttagccgcaacatttctgttgctagctttaagcacagccgctcaggcagagcccgtgcagttcaaagactgtggaagtgtcgatggggtgatcaaggaagttaacgttagcccctgcccgacgcaaccctgtcaactctccaaaggacaaagctattcagtgaatgttacatttacctccaacattcagtccaaatcctcgaaagcagtagtacacggcattctcatgggggtgccagtcccctttccaatccctgaacctgatgggtgcaagtccggcatcaactgtcccatccaaaaggacaaaacatattcctacctcaataagcttcctgttaaaagcgagtacccgtccatcaagctcgtggttgaatggcagctccaggacgacaagaaccaatccctgttctgttgggagatccccgtgcaaatcgtttcacatctttag

SEQ ID NO: 164933 - DNA, 369 bp, Artificial Sequence
  derived and/or modified sequence
atgagattcctggccgccaccttcctgctgctggccctgagcaccgccgcccaggccgagcccgtgcagttcaaggactgcggcagcgtggacggcgtgatcaaggaggtgaacgtgagcccctgccccacccagccctgccagctgagcaagggccagagctacagcgtgaacgtgaccttcaccagcaacatccagagcaagagcagcaaggccgtggtgcacggcatcctgatgggcgtgcccgtgcccttccccatccccgagcccgacggctgcaagagcggcatcaactgccccatccagaaggacaagacctacagctacctgaacaagctgcccgtgaagagcgagtaccccagcgtgtag

SEQ ID NO: 164934 - DNA, 456 bp, Artificial Sequence
  derived and/or modified sequence
atgagattcctggccgccaccttcctgctgctggccctgagcaccgccgcccaggccgagcccgtgcagttcaaggactgcggcagcgtggacggcgtgatcaaggaggtgaacgtgagcccctgccccacccagccctgccagctgagcaagggccagagctacagcgtgaacgtgaccttcaccagcaacatccagagcaagagcagcaaggccgtggtgcacggcatcctgatgggcgtgcccgtgcccttccccatccccgagcccgacggctgcaagagcggcatcaactgccccatccagaaggacaagacctacagctacctgaacaagctgcccgtgaagagcgagtaccccagcatcaagctggtggtggagtggcagctgcaggacgacaagaaccagagcctgttctgctgggagatccccgtgcagatcgtgagccacctgtag

SEQ ID NO: 164935 - protein, 145 aa, Artificial Sequence
  derived and/or modified sequence
MATWALLLLAAMLLGNPGLVFSRLSPEYYDLARAHLRDEEKSCPCLAQEGPQGDLLTKTQELGRDYRTCLTIVQKLKKMVDKPTQRSVSNAATRVCRTGRSRWRDVCRNFMRRYQSRVTQGLVAGETAQQICEDLRLCIPSTGPL

SEQ ID NO: 164936 - protein, 96 aa, Artificial Sequence
  derived and/or modified sequence
MATWALLLLAAMLLGNPGLVFSGRDYRTCLTIVQKLKKMVDKPTQRSVSNAATRVCRTGRSRWRDVCRNFMRRYQSRVTQGLVAGETAQQICEDLR

SEQ ID NO: 164937 - DNA, 438 bp, Artificial Sequence
  derived and/or modified sequence
atggccacctgggccctgctgctgctggccgccatgctgctgggcaaccccggcctggtgttcagcagactgagccccgagtactacgacctggccagagcccacctgagagacgaggagaagagctgcccctgcctggcccaggagggcccccagggcgacctgctgaccaagacccaggagctgggcagagactacagaacctgcctgaccatcgtgcagaagctgaagaagatggtggacaagcccacccagagaagcgtgagcaacgccgccaccagagtgtgcagaaccggcagaagcagatggagagacgtgtgcagaaacttcatgagaagataccagagcagagtgacccagggcctggtggccggcgagaccgcccagcagatctgcgaggacctgagactgtgcatccccagcaccggccccctgtag

SEQ ID NO: 164938 - DNA, 438 bp, Artificial Sequence
  derived and/or modified sequence
atggctacctgggccctgcttctgctggccgccatgttgttgggcaatcctggactggttttcagccgcctttcccctgaatattatgatctggcacgagcccacctgagagatgaggagaagtcgtgtccctgtctggcacaggagggtccacaaggggatctactcacaaagacccaggagctcggcagagactaccgaacatgcctcaccatcgtccagaagctcaagaaaatggtcgacaagcccacgcagcgatcagtgtcgaacgcggcgactcgggtatgccggaccggccgctccaggtggagagacgtgtgtagaaacttcatgagacggtaccagtcccgagtaacacagggtcttgttgccggcgagaccgcccagcagatctgtgaagatttgcgactctgcatcccgtctactggccctctttag

SEQ ID NO: 164939 - DNA, 846 bp, Artificial Sequence
  derived and/or modified sequence
gtatctgtggtaaacccagtgacacgggggagatgacatacaaaaagggcaggacctgagaaagattaagctgcaggctccctgcccataaaacagggtgtgaaaggcatctcagcggctgccccaccatggctacctgggccctcctgctccttgcagccatgctcctgggcaacccaggtctggtcttctctcgtctgagccctgagtactacgacctggcaagagcccacctgcgtgatgaggagaaatcctgcccgtgcctggcccaggagggcccccagggtgacctgttgaccaaaacacaggagctgggccgtgactacaggacctgtctgacgatagtccaaaaactgaagaagatggtggataagcccacccagagaagtgtttccaatgctgcgacccgggtgtgtaggacggggaggtcacgatggcgcgacgtctgcagaaatttcatgaggaggtatcagtctagagttacccagggcctcgtggccggagaaactgcccagcagatctgtgaggacctcaggttgtgtataccttctacaggtcccctctgagccctctcaccttgtcctgtggaagaagcacaggctcctgtcctcagatcccgggaacctcagcaacctctgccggctcctcgcttcctcgatccagaatccactctccagtctccctcccctgactccctctgctgtcctcccctctcacgagaataaagtgtcaagcaagattttagccgcagctgcttcttctttggtggatttgaggggtgggtgtcagtggcatgctggggtgagctgtgtagtccttcaataaatgtctgtcgtgtgtcccata

SEQ ID NO: 164940 - DNA, 438 bp, Artificial Sequence
  derived and/or modified sequence
atggccacctgggccctgctgctgctggccgccatgctgctgggcaaccctggcctggtgttcagccggctgagccctgagtactatgacctggcccgggcccacctgagagatgaggagaagagctgcccctgcctggcccaggagggcccccagggcgacctgctgaccaagacccaggagctgggccgggactaccgcacctgcctgaccatcgtgcagaagctgaagaagatggtggacaagcccacccagaggtctgtgtccaatgctgccaccagggtgtgcaggacaggccgcagccgctggagagatgtgtgcaggaacttcatgaggcgctaccagagccgggtgacccagggcctggtggccggggagacagcccagcagatctgtgaggacctgcggctgtgcatccccagcacaggccccctgtag

SEQ ID NO: 164941 - DNA, 438 bp, Artificial Sequence
  derived and/or modified sequence
atggccacctgggccctgctgctgctggccgccatgctgctgggcaaccccggcctggtgttttcgaggctgtctccagaatattacgacctagctcgcgcccacctgagagacgaggaaaagagttgtccgtgtctggctcaagaaggcccccagggcgacctgttgaccaagacccaagagctgggtcgtgactacaggacgtgtctcacgattgtccagaaactgaagaagatggttgataaacccacgcaacgctctgtctccaacgccgctacccgcgtgtgccgaacgggtcgatctagatggcgtgacgtatgcaggaatttcatgcggcgctatcagtccagagtcacccagggcctggtggccggcgaaaccgcacaacaaatttgcgaggacctgcgactgtgcatcccatcaactggtccattatag

SEQ ID NO: 164942 - DNA, 438 bp, Artificial Sequence
  derived and/or modified sequence
atggccacgtgggctttgctgctgctcgccgcaatgttgctggggaatccgggactcgtcttctcaagactaagccccgagtactatgaccttgcaagagcccatttaagagacgaggagaagagttgtccatgtctcgcccaggagggaccacaaggggacctgctgacgaaaacacaggagttagggcgagactaccggacttgcctgacaattgtgcagaagctcaagaagatggtcgacaaacccacacagagaagtgtttctaatgcggctactagggtctgtcgcaccggccgaagccggtggagggatgtttgtaggaactttatgaggaggtatcagtcacgagtgacacaggggctggttgctggcgagacagcccagcagatttgcgaggatctgcggttgtgcataccgtcgacagggcctctctag

SEQ ID NO: 164943 - DNA, 435 bp, Artificial Sequence
  derived and/or modified sequence
atggcaacctgggcactcttactcctcgccgcaatgttgctggggaatccgggtcttgtcttttctcgtttatccccagagtactacgatcttgcccgagctcacctgagggacgaggaaaagtcttgtccttgcctcgcgcaagaaggtccacaaggcgaccttcttaccaaaacacaggagctgggcagagattatcgaacctgcctgaccattgttcagaagctgaagaagatggtggacaaacctacccaacgtagtgtttctaatgcagccacacgtgtttgccgtacaggccgctcgcggtggagagatgtctgccgtaatttcatgaggcggtaccaaagtcgggttacgcaagggcttgtcgctggcgagactgcacagcaaatatgcgaagatttgcgtctttgtattcccagtacagggcctctc

SEQ ID NO: 164944 - DNA, 435 bp, Artificial Sequence
  derived and/or modified sequence
atggccacatgggccctgctgctgcttgctgccatgttgttggggaacccaggtctggtgttttccagactgtcgcccgagtactacgaccttgctagggcacacttgcgggacgaagaaaaatcttgtccctgtctggcgcaggagggtccccagggggacttgctgactaagacccaggagcttgggagggattacaggacatgtctgaccatcgtccagaaactaaagaagatggtagacaagccaacccagaggtcagtgagcaacgcagcaacacgggtctgcagaacagggcggagcaggtggagagatgtttgccggaattttatgagacgctatcagtcccgcgtcacgcaaggcctagtggcaggtgaaaccgctcagcaaatttgcgaggatctgcggctgtgtatcccatccacagggcctctg

SEQ ID NO: 164945 - DNA, 435 bp, Artificial Sequence
  derived and/or modified sequence
atggcgacttgggctctgctgctgctcgccgctatgctgctgggaaaccctggtctggtcttttcgcggctcagcccggagtactacgatctcgcgcgcgcccatctgcgggatgaagagaagagctgcccgtgcctggcccaagaggggccgcagggtgacctgcttaccaaaactcaggagttgggccgcgactaccgtacttgcctcaccatcgtgcaaaagctgaagaagatggtggacaagcctacccagcggtcggtgtccaacgcagcgactcgggtctgccggactggacggtcccggtggcgggacgtgtgcagaaatttcatgcgccggtaccagtcgcgggtcacccaaggactcgtggccggagaaacggcccaacagatctgcgaggacctcaggctctgtatcccgtccacgggcccactc

SEQ ID NO: 164946 - DNA, 435 bp, Artificial Sequence
  derived and/or modified sequence
atggccacttgggcgctcctgctcctggctgcaatgttgctcggcaacccaggcctcgtcttcagcaggctctccccagaatactatgatcttgccagagctcacctcagggacgaggagaaatcctgtccctgcctggctcaggaaggccctcaaggtgacctgctgaccaagacccaggagctgggccgcgactatcgcacgtgtctcactattgtgcagaagctgaagaagatggttgataaacctactcaaagatccgtgtccaacgcagctacccgcgtatgccgcacaggccgctccaggtggagggacgtgtgccgcaacttcatgcgccgctaccagagcagggtgactcagggcctggtggccggagagactgctcaacagatctgcgaggacctccgcctgtgtattccttctaccggccctctg

SEQ ID NO: 164947 - DNA, 435 bp, Artificial Sequence
  derived and/or modified sequence
atggctacttgggcgctgctgctcctggcagctatgctgttggggaaccctggtctggtgttctcacgcctgtcccctgagtactacgacttagctagggcccatctccgagatgaggagaagagttgcccgtgtctggcacaggaggggcctcaaggggatctcttaaccaaaactcaagagctggggagggactacaggacctgcttaacaatcgtgcagaaactcaagaagatggtggacaaaccaacccagcgctcggtaagcaatgctgctacccgggtgtgtaggactggacggtcacggtggcgcgatgtgtgcaggaatttcatgcgccggtatcagtcgagagtcacgcaggggctagtggccggggaaaccgcgcagcaaatatgcgaagacctcagattgtgcattccctccacgggtccgttg

SEQ ID NO: 164948 - DNA, 435 bp, Artificial Sequence
  derived and/or modified sequence
atggcgacttgggcattgctgctcctggccgcgatgctgctgggcaacccgggactggtgttctcccgtctctcgccagagtactacgatctcgcgcgcgcgcacctgagggacgaagagaagtcgtgcccgtgcctggcccaagaaggaccccagggagatctcttgaccaagactcaagaactcggccgcgactaccggacttgccttacgatcgtccaaaaactgaaaaagatggtggataagccaacccagcgctcagtctcaaacgccgctacccgcgtctgccggactgggcggagccgctggcgagacgtgtgtcggaacttcatgcgccgctaccagtcgagggtgacccagggactcgtggccggcgaaaccgcacagcaaatctgtgaggacctgagactgtgtattccgtccaccggacctctg

SEQ ID NO: 164949 - DNA, 435 bp, Artificial Sequence
  derived and/or modified sequence
atggcaacgtgggcacttctgctgctcgctgccatgttgcttggcaaccctggactcgtgttttccaggctgtctcctgagtactacgacctggcacgcgcgcacctgagagacgaagaaaagtcatgcccgtgtctcgcccaagagggccctcaaggtgacctgctcaccaagacccaggagttgggaagagattatcgcacctgcttgactatcgttcaaaagctcaagaaaatggtggataagccgactcagaggtcggtgtccaatgccgccacccgagtctgccgtacgggacgctcaaggtggcgcgacgtgtgccgcaacttcatgagacgctaccagagtagagtgactcaggggctcgtcgctggagaaactgcacagcagatctgtgaagatttgcgcctctgcattcctagcaccggtccgctc

SEQ ID NO: 164950 - DNA, 435 bp, Artificial Sequence
  derived and/or modified sequence
atggccacttgggctcttctgctactggcggcaatgctgttggggaacccaggcctggtattctctcgcctctcccccgagtattacgacctcgccagagcgcatcttcgcgatgaagaaaaaagttgcccttgtttggctcaggaagggcctcagggggatttactgaccaagactcaggagctgggtagggactaccgaacctgcctaacgattgtgcagaagttaaagaagatggtagacaagcccactcagaggagcgtctctaatgctgctacccgggtgtgcaggactggacgttcaaggtggcgcgatgtgtgtcgaaacttcatgcgcaggtaccagtccagggtgactcagggcttggtggcaggagagactgcccagcagatttgcgaggatttacgactttgtataccatccactggaccgctc

SEQ ID NO: 164951 - DNA, 435 bp, Artificial Sequence
  derived and/or modified sequence
atggctacctgggcacttttgctgctggccgctatgcttcttggaaatccgggtctggtcttttccagactttccccagaatactacgatctggccagagcacacctccgcgacgaagaaaagagctgtccttgtctggcacaagagggacctcagggagatctccttactaagactcaagaactcggccgcgattaccggacttgtctgaccattgtgcaaaagctgaaaaagatggtggataagccaactcaacgctcggtgagcaacgctgcaactagagtgtgtcgaactggtcgatcacgctggagggacgtgtgcagaaacttcatgaggaggtaccagtcaagagtgacccaaggtctggtcgccggagaaaccgcacagcagatatgtgaggaccttagactttgtattccttctaccgggcctctg

SEQ ID NO: 164952 - DNA, 435 bp, Artificial Sequence
  derived and/or modified sequence
atggcaacatgggcacttcttcttctggctgctatgctactcggaaaccctggactggtattttctcggcttagtccagaatattacgatttagcgagggcccatttaagagacgaagagaaatcttgcccctgcctggctcaagaaggaccacagggagacctcctgactaaaacacaggaattagggcgcgattataggacatgtcttactattgttcaaaagttaaagaagatggtagataaacccacacaacggtccgtatccaatgcagctacaagagtgtgccggacaggaaggtccagatggagagatgtctgtcggaatttcatgcgacgctatcagtcacgggtgacacagggattagtggcaggggagactgcgcagcagatttgcgaagaccttaggctgtgcatcccctcaactgggcccctc

SEQ ID NO: 164953 - DNA, 435 bp, Artificial Sequence
  derived and/or modified sequence
atggccacgtgggctctccttctgctcgccgccatgctcctgggtaatccagggctggtcttcagcagactctcgccagaatattatgacctggcacgcgcccatttgcgagatgaagaaaagtcgtgcccctgcctcgcgcaggagggtcctcagggagacctgctgacgaagacgcaggagttgggcagggattatcgcacgtgcctaaccattgtacagaaactgaaaaagatggtggataaacccacccaacgttcagtcagcaatgccgccacccgtgtgtgtcgcacaggccgctcgcgttggcgcgacgtgtgtcgaaacttcatgcggagataccagagcagagtgactcagggactcgttgccggcgaaaccgctcaacagatttgcgaggatctgcgactttgcatcccgtcgacaggccctctc

SEQ ID NO: 164954 - DNA, 435 bp, Artificial Sequence
  derived and/or modified sequence
atggcaacttgggcccttcttttgctcgcagcaatgctgctgggaaacccagggctcgtcttttcacgcctctcgccagagtactacgatctcgctagagcccatctgcgggacgaagaaaaatcctgtccttgcctggcacaggaaggacctcagggggatctgctcaccaagactcaagaactcggtcgagactaccggacctgtctgacgatagtccagaaactcaagaagatggtggataagcctacccagagaagcgtgtcgaacgccgcgacccgtgtgtgtcgaactggtcgtagccgctggagagatgtgtgtaggaatttcatgagacgataccagtcgcgggtcacccaaggactggtggcaggcgaaaccgcacagcaaatctgcgaggatttgagactctgtatcccgtcgaccgggcctctg

SEQ ID NO: 164955 - DNA, 435 bp, Artificial Sequence
  derived and/or modified sequence
atggcgacttgggcactccttctcctcgccgctatgcttctgggtaaccctggtcttgtcttttcaagactttcacctgagtactacgacctcgccagggcacatcttagagatgaggaaaaatcgtgcccttgtcttgcgcaggaagggcctcagggagatctgcttaccaagacccaggagttgggccgagattaccgcacttgcctgactattgtgcaaaagctgaagaagatggtcgacaaacccacccaacgaagcgtcagcaacgccgcgaccagggtctgcaggaccggcagatcgcgctggcgtgatgtgtgtcggaactttatgcgcagatatcagtcccgtgtcacccaagggctggtggcaggtgaaacggcacaacagatttgcgaggatcttcgcctttgtattccttccaccggacctctt

SEQ ID NO: 164956 - DNA, 435 bp, Artificial Sequence
  derived and/or modified sequence
atggccacctgggctctgctccttctggcagctatgctcctgggtaaccctggccttgtcttttcgagactgtcccctgagtactacgaccttgcacgtgcccatcttagagacgaggaaaagagctgcccctgcctggcccaagaaggaccccagggagatctgctgacgaaaactcaggaacttggaagagactacaggacctgcctcaccattgtgcaaaagctgaagaagatggtggacaaacctacgcagagatccgtgtcaaatgcagcaactcgggtttgtcgcactggaagaagcaggtggagagatgtgtgtaggaactttatgcgacgctaccaatccagagtgacccaaggccttgtcgccggcgaaaccgctcagcaaatctgtgaggatctgagactgtgtattccatcgaccggtcctctc

SEQ ID NO: 164957 - DNA, 435 bp, Artificial Sequence
  derived and/or modified sequence
atggcaacttgggccttactgctgctggccgcgatgctgttgggcaaccctggtttggttttctcgcgtctttccccagagtactacgacctggctcgagcacatctgcgcgacgaagagaagtcttgcccgtgcctcgctcaggaaggtccccaaggcgacctgctgactaagacacaagaactcgggagagactacaggacttgtctcaccatcgtgcagaagctgaaaaagatggttgacaaacccacgcagcgtagcgttagtaacgcggccaccagggtgtgtcgaacgggccgcagtcgctggcgggacgtttgccggaactttatgcgccggtatcagtcgcgggtcactcagggtctggtggccggtgaaactgctcaacaaatctgtgaggatctcagactttgtatcccatctaccggccctctg

SEQ ID NO: 164958 - DNA, 435 bp, Artificial Sequence
  derived and/or modified sequence
atggccacatgggctttgctgttgctggctgcgatgctgttagggaatccagggctcgtgttttcgcgactcagtccagaatattatgacctggcacgggcccatctgagagatgaagagaagagctgtccctgtctggcccaggaaggccctcagggtgacttactgactaaaacacaggaactaggtagggattacagaacatgcctgaccattgttcaaaaattgaagaaaatggtggacaaacctacccagcggtccgtgagcaacgcggcaacacgtgtttgtagaaccggacgttctcgctggagggatgtgtgtcgcaatttcatgcgtaggtatcaatcaagggttacccagggcctcgttgctggggaaacggcccagcaaatctgtgaagacctgcgcctgtgtataccttccactggtcctctg

SEQ ID NO: 164959 - DNA, 435 bp, Artificial Sequence
  derived and/or modified sequence
atggcaacttgggcgctccttctcctggccgccatgctcctcggaaacccgggacttgtcttttcgagactttcgccggaatactacgatcttgcgagagctcacctgcgcgatgaagaaaagtcgtgtccgtgcctggctcaagaggggccgcagggtgacctgcttaccaagacccaggaactgggccgcgactataggacctgcctgaccattgtccaaaaactgaagaaaatggtggacaagccgacgcagaggagcgtgtcaaatgcagccactcgcgtttgtcgcaccggccgctctcggtggcgggacgtctgccgcaatttcatgagacgctaccagtcgcgggtcactcagggactcgttgcgggtgaaaccgcccaacaaatctgtgaggacttgcgcctgtgcatcccatccaccggaccgctg

SEQ ID NO: 164960 - DNA, 435 bp, Artificial Sequence
  derived and/or modified sequence
atggccacatgggcgctgctgctgctggcagcaatgctattgggaaacccaggattggtttttagccgcctgagtccagaatattacgatctggccagagcgcacctgagagatgaagaaaaatcctgtccatgccttgcccaggaagggccacagggagacctgctcactaagacccaggagctaggtagggactatcgcacctgtttaacaattgtccagaaactgaagaaaatggtggacaagcctacccaaaggtctgtctcaaatgctgcgacgagggtgtgccgtacaggaagatcgaggtggcgtgacgtctgtaggaactttatgcgccgttatcagtctcgcgtgacgcagggtcttgtggcaggtgagactgcacagcagatatgcgaggatcttagactatgtattccgagtaccgggcccttg

SEQ ID NO: 164961 - DNA, 435 bp, Artificial Sequence
  derived and/or modified sequence
atggctacatgggctctgttgcttctggctgcaatgctgctgggcaaccctggattggtgttctctaggttgtctcccgaatactacgacctcgcacgtgctcacctcagagacgaagagaaaagttgcccatgcctggcacaagagggacctcaaggtgacctcttgacaaagactcaagaactgggaagggattaccgtacttgtctgaccatcgtgcagaaattgaagaagatggtcgacaaaccaactcaacgctccgtatccaacgcagccaccagagtttgtaggactggacgttcaaggtggcgcgatgtgtgccgcaactttatgagacgttaccagagccgcgttacccaaggacttgtggcaggcgagactgctcagcagatttgcgaggatctccgcctctgcatcccctccacaggccccttg

SEQ ID NO: 164962 - DNA, 435 bp, Artificial Sequence
  derived and/or modified sequence
atggctacgtgggccctcctcctgttggcggcaatgctgctgggaaatccgggtttggtcttttcacgcctgtccccagagtactacgatctggcacgcgcccaccttagagacgaggaaaagtcctgtccgtgcttggctcaggagggaccacaaggcgatctgcttaccaagactcaggaactcggtcgggactaccgcacttgcctcactattgtgcagaagctcaagaagatggtggacaagccgacccagcggtccgtgtcgaatgcggcaacccgggtgtgtcgaaccggaagatcacgctggagagacgtgtgtagaaacttcatgcggcggtatcaaagccgcgtgactcaggggctggtggctggagaaactgcgcaacagatctgcgaagatctgcggctctgcatcccatccactggtccactg

SEQ ID NO: 164963 - DNA, 435 bp, Artificial Sequence
  derived and/or modified sequence
atggccacgtgggctctgttgctcctagcagcaatgcttctcggtaatccgggtctggtgttctcaagactgtcgcctgagtattacgacctcgcacgggcccaccttagggatgaagaaaagagttgcccgtgcctggcgcaggagggtccacaaggggatctgctgaccaaaacccaggaacttgggcgcgactaccgaacttgtctgacaatcgtgcagaagctgaaaaagatggtcgacaaacccacacagcgtagtgtgtcaaacgcagccaccagagtttgccgtaccggacggtctagatggcgggatgtgtgcagaaacttcatgaggaggtaccaatccagggtaactcaggggctagtcgctggcgagacagcgcagcagatttgtgaagaccttcggctttgtataccatctaccggacctctt

SEQ ID NO: 164964 - DNA, 435 bp, Artificial Sequence
  derived and/or modified sequence
atggccacctgggcactcctcctgctggccgcaatgctcttgggaaaccccggactcgttttttctagactatccccagaatactacgaccttgctagagcgcacttgcgggacgaggagaagtcttgtccgtgccttgcccaggagggacctcagggcgaccttctgaccaagacccaagaacttgggcgggactaccgcacctgtttgaccatagtgcagaagttgaagaaaatggtagacaaacccacgcaaaggtccgtgagtaatgccgctacccgggtgtgcaggactgggaggtcccgatggagagatgtgtgtaggaactttatgcgtcgataccagagcagggtcacccagggacttgtcgcgggtgagacggcccaacagatttgtgaggaccttcggttgtgcataccatcaacgggccctctc

SEQ ID NO: 164965 - DNA, 435 bp, Artificial Sequence
  derived and/or modified sequence
atggcaacctgggcgctcttgcttctggctgcgatgctcctcggaaacccaggccttgttttttcccgcctgtcgccagaatactacgatctcgcgcgcgcccacctgcgggacgaagagaagtcgtgcccttgcttggcccaggaggggccgcagggcgacctcctgaccaaaacccaggaactcggtcgggattacaggacttgcctgactattgtgcaaaagctgaagaaaatggtcgacaagccgactcagcgcagcgtgtctaacgcagctacgagagtgtgccgaactgggagaagcagatggcgggatgtgtgccgcaatttcatgcggcggtaccaatcaagggtgacccagggactggtcgccggagaaaccgcccagcaaatctgtgaggacctgcgcctgtgtatcccgtccactggacccctg

SEQ ID NO: 164966 - DNA, 435 bp, Artificial Sequence
  derived and/or modified sequence
atggcaacatgggctctgctgctgctggcagctatgctcctgggaaaccccgggcttgttttcagccgccttagcccagagtattacgacctggcaagagcccaccttcgagatgaagaaaaatcttgtccatgtctggcccaggaagggcctcagggagacttgttaaccaagactcaggaactgggcagggactaccggacctgcctgacaatcgtgcaaaaactgaagaaaatggttgacaagcccacccaacgctctgtgtcaaatgccgccacacgggtttgccggaccgggcgttcccgttggcgggacgtgtgccgtaatttcatgcgcagataccagtccagagtaacccagggtctcgtagcgggtgaaacagcccagcaaatctgcgaggaccttaggctatgcataccttctacaggccctctc

SEQ ID NO: 164967 - DNA, 435 bp, Artificial Sequence
  derived and/or modified sequence
atggctacgtgggccctgcttctgctcgccgccatgctcctcgggaacccggggctggtgttctccagattgtcccccgagtactacgatttagccagagctcacctgcgggacgaggagaaaagttgcccatgcttggctcaggaaggcccacaaggggacctgctgactaaaacccaggagctgggaagagactacagaacctgtcttacgattgtacagaagcttaaaaaaatggtcgataaaccaacccagagatccgttagcaacgctgctactcgggtatgtcgtacgggaaggtctcgctggagggacgtgtgtcggaactttatgaggcgatatcaaagtcgggtgacacaaggcttggtcgctggcgagaccgcccagcagatctgcgaggatctgcggctctgcatccctagcactggaccactg

SEQ ID NO: 164968 - DNA, 435 bp, Artificial Sequence
  derived and/or modified sequence
atggccacttgggctttgttactgttggccgcgatgttactcgggaaccccggcttggtgtttagtcggctaagtccggagtactatgacctggctagggcccacctgagagacgaggagaagtcctgcccttgccttgctcaagagggcccacagggggacctgttgactaagacacaggaactgggtcgcgactatcggacatgtctgactatcgttcaaaaacttaaaaaaatggtggacaagccaactcagcgctccgtctctaatgctgctaccagggtttgtcggaccggacgctcacggtggagagacgtttgccggaattttatgcggagatatcagtctcgggttacccagggccttgtcgctggggagactgctcagcagatctgcgaagacctgagactatgcatcccttcaacagggcccctg

SEQ ID NO: 164969 - DNA, 435 bp, Artificial Sequence
  derived and/or modified sequence
atggctacctgggcccttctgctcctcgccgccatgctgctgggtaaccctggactggtgttcagtcgactgtctcctgaatattatgacctggctcgggcgcacctgcgggacgaagagaagtcctgtccatgccttgcacaggagggtccgcaaggggatttgctcacaaaaactcaggagttgggcagggattaccgcacctgtctaaccatcgtacaaaaactcaagaagatggttgacaagcccactcagaggagtgtgagtaatgccgcaacacgcgtatgccggaccggcagaagtagatggcgggacgtgtgtcgaaacttcatgcgccgctaccagtccagggtgacacaggggcttgtcgccggggagacagcacagcagatttgtgaagatctgaggctttgcatccccagcacaggcccctta

SEQ ID NO: 164970 - DNA, 435 bp, Artificial Sequence
  derived and/or modified sequence
atggctacctgggccctgctcttgctggccgcgatgctcctggggaatccgggtttggtgttcagcagactctcacctgaatactacgatttggcgcgtgcccatctccgcgatgaagagaagagctgcccatgcctcgctcaggaaggaccgcagggtgaccttctcactaagacccaagagctcggacgtgattacaggacctgtctgactatcgtgcagaagctgaaaaagatggtagacaaaccaacccaaaggtcagtgtcgaacgccgctactcgcgtgtgccggaccggacgctcccgctggcgcgacgtgtgtcggaacttcatgagaagataccaatcccgcgttacgcaaggattggtcgccggagaaactgctcagcagatttgcgaggacctccggctttgtatcccctcgacgggccctctt

SEQ ID NO: 164971 - DNA, 435 bp, Artificial Sequence
  derived and/or modified sequence
atggccacctgggctctactgcttcttgcagccatgctcctgggtaaccctggcctcgtattctcccggctctcacccgagtactatgacctggcccgagcgcacctgcgggacgaggaaaagagctgcccctgtttggcacaggaaggaccccagggcgaccttctaaccaagacccaggaactcggtagggactaccggacatgtctgacgatcgtccaaaagttgaagaagatggtggacaaaccaacacagcgatccgttagtaacgctgctactagggtgtgccggactggccgttctaggtggcgcgacgtctgtcgcaatttcatgaggcgataccagagccgcgtaacgcagggcttggtggcaggggagacggcacagcagatctgtgaggatttgagactgtgcatcccatccactggcccccta

SEQ ID NO: 164972 - DNA, 435 bp, Artificial Sequence
  derived and/or modified sequence
atggccacttgggctctgctcctcctcgctgccatgctgctgggaaacccgggcttggttttttctcggctctccccagagtactacgacctcgcgcgggcgcatttgcgggatgaagaaaaatcctgcccttgcttggcccaagaagggccacagggagatctgctgaccaagacgcaggaactgggacgagattacagaacttgcctcaccatcgtccagaagttgaagaagatggtggacaagccgactcaacggtcggtgtccaacgccgcaacccgggtctgcaggaccggcagatcacgctggcgagatgtgtgtcgcaatttcatgcgcaggtatcaatcgcgcgtgacgcagggactggtggccggggagacggcccaacagatctgtgaggacctccgcctctgcatcccgtctaccggcccgttg

SEQ ID NO: 164973 - DNA, 435 bp, Artificial Sequence
  derived and/or modified sequence
atggctacatgggctctgctgctgcttgctgcaatgttgttggggaaccccgggctggttttcagccggctgagtccggaatactatgatttggcccgagcacatctaagagacgaggaaaaatcctgtccttgcttagcacaggagggccctcagggcgatcttctgacgaaaacacaagagctgggtcgggactataggacttgcttaacaattgtccagaagctgaaaaagatggttgacaagccaactcaacgcagcgttagcaacgcagccacgagagtttgtcggactggccgctcacgttggcgtgatgtttgccgcaatttcatgcgacgctatcagtctcgggtgacgcagggccttgttgctggggaaacggcccagcagatctgcgaggacctacggctttgtattccctccaccggtcctctt

SEQ ID NO: 164974 - DNA, 435 bp, Artificial Sequence
  derived and/or modified sequence
atggcaacctgggcccttcttctcttggcagcgatgctgctggggaaccccggtctggtctttagccgcctctcccccgaatactacgatcttgcgagagcacatttgagagacgaagagaagtcttgtccgtgccttgctcaggaaggccctcaaggcgatcttctgaccaagactcaagaactgggacgcgattacagaacgtgcctcacgatcgtgcaaaagctgaaaaagatggtggacaaaccaactcagcggtcagtctctaatgcagccaccagggtttgtcggactggacggagcaggtggcgagatgtgtgccgcaacttcatgagacgctaccagtcgagagttactcaaggtcttgtggcaggagagactgcccagcaaatttgtgaggacttgcggctttgtattccttcaaccggtccactt

SEQ ID NO: 164975 - DNA, 435 bp, Artificial Sequence
  derived and/or modified sequence
atggcaacctgggcgcttctgctccttgctgctatgctcctgggcaacccagggctcgtattttcccgcctttcgcccgagtactacgacctggccagagcccatctgcgtgatgaagaaaaatcgtgtccttgcctggcgcaggagggcccgcaaggtgatttgttgactaagacccaagagctgggacgcgactatcgaacctgtcttaccatcgtacagaagttgaaaaagatggtcgataagcctactcaaagatcagtgagcaatgcagcaaccagagtctgccgaactggaagatcccggtggcgtgacgtgtgcaggaacttcatgaggcgttaccaaagccgggtgactcaaggacttgtggccggtgaaaccgcacagcagatttgtgaagatctccgactctgtattccatccactgggccactt

SEQ ID NO: 164976 - DNA, 435 bp, Artificial Sequence
  derived and/or modified sequence
atggcaacttgggcactgctccttctcgctgccatgctgctcggcaaccctgggttggtcttttctcgattgagcccggagtactatgatctggcacgggcccatcttcgggatgaagaaaagtcttgcccatgcctggctcaggagggtccccagggcgatctgctgaccaaaactcaggaactggggcgcgattatcggacgtgcctcaccatcgtgcagaaactgaagaagatggtagataagcccacacagagatccgtatctaatgcagccacgcgcgtgtgtaggactggacggagtcgctggcgggatgtctgcagaaatttcatgcgccggtaccaaagccgcgttacgcagggactcgtggctggcgagactgcacagcagatttgcgaggatctccgactgtgtattccgagtaccggccctctc

SEQ ID NO: 164977 - DNA, 435 bp, Artificial Sequence
  derived and/or modified sequence
atggcgacttgggccctgctcctactggcagcaatgctcttaggtaatccgggccttgtgtttagccgcctgtcccctgaatactacgatctagcacgtgctcacctgcgggatgaggaaaagtcatgtccatgtctggcccaggaaggacctcaaggtgatttgctcacgaagactcaggaactgggtagagattacaggacgtgcttaacgattgtgcagaaactgaaaaaaatggttgataagcctactcagaggtctgtgtcgaatgccgccacaagagtatgtcggaccggaaggagccgctggcgagatgtatgtagaaatttcatgaggcgctatcagtctcgcgttacacagggcttagtagcaggggaaactgcccaacagatatgcgaggacctgcggttgtgtatcccatcaaccggacctttg

SEQ ID NO: 164978 - DNA, 435 bp, Artificial Sequence
  derived and/or modified sequence
atggccacgtgggctcttttactacttgctgcaatgctcttaggaaaccctggactcgtgttttcccgtctttcccctgagtactacgatctagctagagcacacttgcgggatgaggaaaagtcatgtccgtgcctggcccaagaaggaccgcaaggtgatctgctgaccaaaacccaggagctgggaagggactaccgcacttgcctgacaatcgtgcagaagcttaagaagatggtcgacaagcccactcaaaggtcagtgtcaaacgcggcgaccagagtttgcaggacaggaagaagcagatggcgcgatgtgtgccgcaattttatgagaagatatcaaagccgtgtcactcagggtctggttgctggagagacagcgcaacagatctgtgaggacctgagactgtgcatccctagcactgggccgctg

SEQ ID NO: 164979 - DNA, 435 bp, Artificial Sequence
  derived and/or modified sequence
atggccacctgggcactcctgcttctggcggccatgctgctggggaatcctggtctggtgttttcacggctgagccctgaatactacgatcttgcacgcgcgcacctgcgcgatgaggagaagtcgtgtccgtgcctcgcacaagaaggccctcagggagatctccttaccaaaactcaagaactcggcagagactacagaacttgccttaccatcgtgcaaaaactgaagaagatggtggataaacctacccaaagatcagtctctaacgcagcaacccgtgtgtgtcgaactgggagatcaagatggcgcgatgtgtgtcggaatttcatgagacggtaccagtcgcgtgtgacccagggactggtggcaggtgagactgcccaacaaatctgcgaggaccttcgactgtgtatcccatcgaccggccccctg

SEQ ID NO: 164980 - DNA, 435 bp, Artificial Sequence
  derived and/or modified sequence
atggcaacctgggcccttttgctcctggcagccatgctgctgggaaatcccggacttgtgttttcccgtctgtcgcctgaatactacgaccttgccagagcacatctgagagatgaagaaaagtcctgtccttgtctggcgcaagaaggtcctcaaggagatctgttgaccaagacccaagagttgggtagagattaccgaacctgcctcaccatcgtccagaagctgaagaagatggtggataagccaacccagcgctcggtgtcgaacgctgcgactcgcgtgtgtagaaccggaaggagccggtggcgggatgtgtgccggaactttatgcgcagataccagagccgagtcactcagggtctggtcgcaggagaaactgcacaacaaatttgtgaggacctgcggctttgtattccttcaactggtccgctg

SEQ ID NO: 164981 - DNA, 435 bp, Artificial Sequence
  derived and/or modified sequence
atggccacctgggcacttttgctgcttgcagcaatgcttcttggaaatcctggccttgttttctctcgactgtccccggagtactatgatctcgcgcgcgcacacttgagggacgaagaaaagagctgtccatgtctggcccaggaaggacctcagggtgatctgcttacgaaaacccaggaactgggacgtgattacagaacgtgtttgactattgtgcaaaaactgaagaagatggtggacaagccaactcaacgatcggtatcaaacgcagcgaccagagtgtgcaggactggtcggtcgcgctggcgagatgtgtgtagaaactttatgcgccggtaccaatcccgggtgactcagggtcttgtcgcaggcgagactgctcaacagatctgcgaggatcttcgactgtgcattccttcgaccggtcctctg

SEQ ID NO: 164982 - DNA, 435 bp, Artificial Sequence
  derived and/or modified sequence
atggcgacgtgggctttgctgctcctggcagcaatgctccttgggaacccaggactggtgttctctagactgagccctgagtactacgaccttgccagggcgcatctgcgggatgaagagaaaagctgtccctgcctggctcaagagggaccacagggagatctccttacaaagacacaggaattgggcagggactatcgcacttgcctcaccatcgtccagaaattgaaaaagatggttgacaaaccaacacagagaagtgtaagcaacgcagcgacaagggtatgtaggacagggagaagccgctggagggacgtttgcagaaactttatgagaaggtaccagagtcgagtcacgcaggggctggtggccggggagacggcgcaacaaatatgcgaagatctgcgcctgtgcattccaagtacaggtccactg

SEQ ID NO: 164983 - DNA, 435 bp, Artificial Sequence
  derived and/or modified sequence
atggcaacttgggccctgctgttactcgcggccatgctgttgggtaaccccggcctggtcttttccaggttgtcccccgaatattacgacctggctcgggcccacctacgggatgaggaaaaatcttgtccgtgcctcgcccaggaaggaccacagggagatctcctcaccaaaacccaggaactggggagagattataggacctgcctgacaatcgtgcaaaagctgaaaaagatggtcgacaaaccaacacagcggtcagtgagcaatgccgctaccagagtgtgcaggaccgggcggagccggtggagggacgtgtgcaggaactttatgagacgctatcagtcacgtgtcactcaggggctggtcgctggcgaaaccgctcaacagatatgcgaagacctcagactgtgtatcccctctacagggcccctg

SEQ ID NO: 164984 - DNA, 435 bp, Artificial Sequence
  derived and/or modified sequence
atggcaacctgggcgcttctccttctcgcagctatgctgctggggaaccctggcctggtgttttccaggttgagtcctgagtactatgatctcgcacgggcacatttgagagacgaggaaaagagctgtccctgtcttgcccaggaaggaccacagggtgaccttcttaccaagactcaagaactcgggcgcgactaccgcacctgccttacgattgttcagaaattgaaaaagatggtggataaaccgacccaacgatcagtctccaacgccgcaaccagagtgtgccgtaccggtcgttcaagatggagggatgtgtgtcgtaatttcatgcgccgctatcagtcaagagtgactcaaggactcgtcgccggtgaaactgctcagcaaatatgtgaagatctgcgtctttgcatcccatcgactggaccactg

SEQ ID NO: 164985 - DNA, 435 bp, Artificial Sequence
  derived and/or modified sequence
atggcaacttgggccctattgctgctcgctgcaatgctgttaggtaaccctggcttggtgttttccaggttgtccccagagtactacgatcttgccagagcacacctccgtgatgaagagaagagctgcccctgtctagcccaagaggggccgcagggtgaccttctaactaaaacacaagagttggggagggactataggacgtgcttgactatcgtgcagaagttgaaaaagatggttgataagcccacccagcgtagcgtgtcgaatgccgctacaagagtgtgtcggaccggaagatctaggtggcgagatgtgtgccggaatttcatgagaagatatcagtctcgtgtcactcaggggctggtagcgggcgaaacggctcagcaaatatgcgaggacctgcggctgtgcattccatctacggggcctctg

SEQ ID NO: 164986 - DNA, 435 bp, Artificial Sequence
  derived and/or modified sequence
atggccacttgggcccttctcctcctggcagccatgttgctggggaatcccggattggtctttagccgcctgtcccccgagtactatgacttggctcgcgcccacctccgagacgaggagaagtcatgcccttgcctggctcaggaggggcctcagggggatttgctgaccaagactcaggagttggggagggattacagaacgtgtcttacgatcgtgcagaagctgaagaaaatggtggacaagcctactcagaggagcgtgtcaaatgcagccactagggtgtgcaggaccggacgctcaaggtggagggatgtatgtagaaactttatgagaagatatcagtcacgcgtgacgcagggtttggtagctggtgagactgcacagcagatttgtgaggaccttcgactttgtattcccagtaccggtcctctt

SEQ ID NO: 164987 - DNA, 435 bp, Artificial Sequence
  derived and/or modified sequence
atggccacgtgggctctgctgctcctggccgcgatgctcctggggaacccgggtttggtgttcagcagattgtcgccagagtactacgacttggctcgcgctcatctgcgcgatgaggagaagtcctgcccctgtctcgcacaggagggaccacaaggagatctgctcactaagactcaggaactgggacgcgactaccgcacttgcctgactatcgtgcagaagttgaaaaagatggtggacaagcctacgcagcggagcgtctcgaacgcggccactagagtctgccggactggacgctcgcgctggcgggacgtgtgcagaaactttatgaggcggtaccagagccgcgtgacccagggcctggtcgccggagaaaccgcccaacagatttgcgaggacctgcgcctgtgtatcccgtcgactggacctctg

SEQ ID NO: 164988 - DNA, 435 bp, Artificial Sequence
  derived and/or modified sequence
atggccacttgggcgctgctgcttctggcagctatgctgctgggaaaccctgggctggtgttttcgcgcctgtcccctgagtactatgacctcgcccgcgctcatctgcgggacgaagagaaatcctgcccctgcttggcacaggaaggaccgcagggtgatcttctcaccaagacccaggaactcgggcgggactaccggacctgtcttaccatcgtccagaagctgaagaagatggttgacaagccgacgcaacgcagcgtgtcgaatgccgctacccgggtctgcagaactggacgctcacggtggcgcgacgtgtgtagaaactttatgagacgctaccaatccagagtcactcaggggctcgtggccggcgaaaccgcccagcagatttgcgaggacttgagactgtgcatcccttccaccggaccattg

SEQ ID NO: 164989 - DNA, 435 bp, Artificial Sequence
  derived and/or modified sequence
atggccacgtgggcgctgctgctcctggctgcgatgctgctgggaaaccccggtttggtcttttctcgcctgagccctgagtattatgatttggcccgagcgcatttgagggatgaagagaagtcctgtccttgcctggcgcaagagggaccccaaggtgatctcctaaccaagactcaggaactggggagggactaccgcacatgcctgactattgtgcagaaactgaagaagatggtcgacaagcctacacaacgtagcgtgtctaacgctgctacgcgggtctgtcggactggcaggtccagatggcgcgatgtctgcaggaactttatgcgccggtatcagtcccgtgtgacacagggccttgtggcaggagagacagcgcagcaaatctgcgaagacctgcggctgtgcatcccctcaactggacctctg

SEQ ID NO: 164990 - DNA, 435 bp, Artificial Sequence
  derived and/or modified sequence
atggcaacgtgggctctcctgctgctggcggccatgctgctgggcaatccggggctggtgttctcgcggctgtcgccggaatactatgacttggcaagggcgcacctccgcgacgaggagaagtcttgcccctgccttgctcaggaggggccacagggagatctgctgactaagacccaagaacttggtcgcgattacaggacctgtctgaccatcgtccaaaaactgaagaagatggttgataagcctacccagcgctcagtgtcgaacgcagctactcgcgtgtgtaggactggtagaagcaggtggcgggatgtgtgtagaaacttcatgcggagataccaaagccgagtgacccaggggctcgtggccggagagactgcccaacagatctgcgaggacctccggctctgcatcccgtcaacgggaccactc

SEQ ID NO: 164991 - DNA, 435 bp, Artificial Sequence
  derived and/or modified sequence
atggccacctgggccctgctgctgctcgccgctatgttgcttggaaaccctggactcgtgttcagcagactgtccccggaatactatgacctcgcgcgcgcgcatcttcgcgacgaagaaaaatcgtgcccatgcttggcccaagaggggccccaaggggacctcctcacgaaaacccaggaactgggcagagactacagaacttgcctgactatcgttcaaaaactcaaaaagatggtggacaagcccacccagagatccgtctccaatgctgccactagggtgtgccggaccggacgctcgcgctggcgggacgtgtgccgcaatttcatgcgccgctaccagtccagggtgacccagggactggtggccggcgagacggcccaacagatctgtgaggatctcagactgtgtatcccttccaccgggccactt

SEQ ID NO: 164992 - DNA, 435 bp, Artificial Sequence
  derived and/or modified sequence
atggccacctgggcacttctgctgttggcagccatgctgctaggaaatcctggtctcgttttctcccgcttatcccctgagtactacgatctggcccgtgcccacctgcgcgatgaggaaaaatcgtgcccgtgcctcgcacaagaaggtccccagggagatctgctgacaaaaactcaggagctgggtcgcgattatcggacatgcctcactattgtgcagaaactgaaaaagatggtcgataagccaacccaacgttcggtcagcaacgcggctacccgtgtgtgtcgcacgggtcgtagtcgctggcgcgatgtttgtaggaactttatgcgccgctatcagtcccgcgtcacgcaaggtctggtggcgggcgagacggcgcagcagatttgtgaggacctgcggttgtgcattcctagcacaggtccgtta

SEQ ID NO: 164993 - DNA, 435 bp, Artificial Sequence
  derived and/or modified sequence
atggctacctgggccctcttgcttcttgccgccatgttgctcggcaacccaggcctggtgttcagcaggctctcccccgagtactacgacctagctagggcccatctacgtgacgaagagaaaagctgcccttgtttggctcaagaaggtccacaaggcgatctgctgacaaagactcaggagttggggcgggactacagaacatgcctgacaatcgtgcaaaaactcaagaaaatggtggacaagcctacgcagcgatccgtgtctaatgcggccaccagggtgtgccggacagggcggagcagatggagggacgtgtgtaggaactttatgcgtcgctaccagagccgcgtgacccaaggattggttgcaggagagacggcacagcagatctgcgaggatctaagactgtgtatccctagcaccggcccactg

SEQ ID NO: 164994 - DNA, 435 bp, Artificial Sequence
  derived and/or modified sequence
atggccacatgggctttgcttctccttgccgctatgcttctggggaatccggggttggtgttctctagactatcgcctgagtactacgatctggcaagagcccacttgcgagatgaagagaaatcatgcccttgtctggcccaggagggtcctcagggtgatttactaaccaaaacccaggaactgggacgagactataggacttgtctgaccatagtgcagaaactgaaaaaaatggtggacaaaccgacgcagcgttccgtaagtaatgccgccactcgggtttgtaggaccggcagatccagatggcgggacgtctgcaggaatttcatgcggcgataccagtcccgggtgacccaaggtttggtagcgggagagactgcacagcagatatgcgaagacttgcggctctgtataccgagtaccgggcccctg

SEQ ID NO: 164995 - DNA, 435 bp, Artificial Sequence
  derived and/or modified sequence
atggcaacttgggcattgctgctgttggcagccatgctcctggggaatcctgggctggtgtttagccgtctgtcacccgaatactatgatcttgcacgggctcatcttcgcgatgaggaaaaatcctgtccttgcctggcgcaagaagggcctcagggcgatctgcttaccaagactcaagaacttggtcgagactacaggacttgcctgacgattgtgcagaagctgaagaagatggtggataaaccaactcaaagatcggttagcaatgcagcaacgcgagtctgtcgcactggacgatcaaggtggagagatgtttgtagaaactttatgaggcggtaccagagcagagtcacccaaggtttggtggcaggggaaactgcccaacagatttgcgaggatcttcgcctttgtatcccttctaccggtccactt

SEQ ID NO: 164996 - DNA, 435 bp, Artificial Sequence
  derived and/or modified sequence
atggcaacttgggctcttttacttcttgcagcaatgttactaggtaatccaggacttgttttcagtcgtttaagtccagaatattacgatttagcacgtgctcacttaagagatgaagaaaaatcgtgtccatgtttagctcaagaaggaccacaaggagatttattaactaagacacaagaactaggacgagattatagaacgtgtttaactattgttcaaaagttaaaaaagatggtagataaaccaacacaaagaagtgtaagtaatgctgctactcgtgtttgtcgaacaggaagatccagatggagagatgtttgtagaaactttatgagaagatatcaaagtcgtgttactcaaggacttgtagctggggaaacagcacaacaaatctgtgaagatttaaggctttgtattccatcaactggaccactt

SEQ ID NO: 164997 - DNA, 435 bp, Artificial Sequence
  derived and/or modified sequence
atggcgacttgggctctgctccttctggcagcgatgttgttgggtaatccgggcctggtgtttagccgcctctccccagaatactacgacctcgccagagcccatctgagggacgaggaaaagtcgtgcccctgcctggcccaggaaggaccccaaggagatctgctcactaagactcaggagcttggacgcgactaccggacctgcctgactatcgtccagaaactgaagaagatggtcgataaaccgacccagagatcggtgtccaacgctgcaacccgggtgtgtcggactggccgaagccgctggagagatgtgtgtcgcaacttcatgaggagataccagagccgcgtgacccagggactcgttgcaggggagactgcacaacagatctgcgaggatcttcgcctctgtataccgtccaccgggcccctg

SEQ ID NO: 164998 - DNA, 435 bp, Artificial Sequence
  derived and/or modified sequence
atggccacttgggcattactcctcctggcagccatgctgctcggtaacccaggactggtgttctctcggctgtccccagaatactacgaccttgcaagggcccatctgagagatgaagagaaaagctgtccatgtttagcccaggaaggcccgcagggggacctactaacgaaaacccaggagctgggtcgcgactatcgaacctgtctgaccatcgtccagaaactgaaaaaaatggtggacaaacccacacagaggtctgtcagtaatgccgctacacgtgtttgcagaaccggccgctcgagatggagggacgtgtgtagaaacttcatgcgtaggtaccagtcgagggttacgcagggcttggtcgcaggagaaactgcgcaacagatatgtgaggaccttagactgtgcattcccagcacgggtcccctc

SEQ ID NO: 164999 - DNA, 435 bp, Artificial Sequence
  derived and/or modified sequence
atggccacatgggctctccttctgctggctgccatgttgctaggcaacccaggcttggtcttctcccgactgagtcctgagtattatgatctggccagagctcacttaagggacgaagagaaatcatgcccctgcctagcccaggagggtccacaaggggacctgctaaccaagacccaggaactgggccgagattaccggacatgtctaacgatagttcagaagctgaagaaaatggtggacaagcccactcagcggtctgtctcgaacgcggccacacgcgtgtgtagaaccggtaggtctaggtggagagacgtgtgccgaaactttatgcggaggtatcagagccgtgttacgcagggcctcgtcgccggcgagaccgcacagcaaatttgtgaagacctaaggctttgtatcccatcaaccggacccctg

SEQ ID NO: 165000 - DNA, 435 bp, Artificial Sequence
  derived and/or modified sequence
atggctacctgggctctgcttctgctcgcagcaatgcttctcgggaatcctgggttagttttctctcgtttgagccccgagtactacgatttagccagagcacacctcagggacgaggagaagagttgtccttgcctcgcccaggaaggaccacagggagatctactcacaaagacccaggaactaggtcgcgactacagaacatgtttgaccattgtccaaaaacttaagaaaatggtagataagcccactcagaggtctgtttctaacgcggcaacacgagtgtgccgtaccggccggagtcgctggagggacgtgtgccgaaattttatgcgccgctatcagtctcgggtgacacaagggttggtggccggcgaaacagctcagcaaatctgtgaagatctccgactttgtatacccagcaccggcccactg

SEQ ID NO: 165001 - DNA, 435 bp, Artificial Sequence
  derived and/or modified sequence
atggctacttgggccctgctcctgctggccgccatgctactgggtaaccccggactggtcttttcccgacttagccccgaatattacgatcttgcccgggctcaccttcgggacgaggagaaatcctgcccatgccttgcccaggagggcccccagggcgatctattgactaagacacaggagttgggtagggactaccgcacttgcttgactatcgtccagaagctgaagaagatggtcgataagccgacacagaggtctgtttcaaatgccgccactcgagtgtgcagaacagggcgcagccggtggagagacgtctgcagaaatttcatgcggcgttaccaatctcgagtcacccagggattggtagcgggcgaaaccgctcaacagatttgtgaggatctcaggctgtgcatcccgtctactggaccgctg

SEQ ID NO: 165002 - DNA, 435 bp, Artificial Sequence
  derived and/or modified sequence
atggccacctgggcgctgttactgctggccgctatgttgctcggcaaccccggtctggtgttttcacgcctctcccctgagtactacgacttggccagagctcacttgcgggatgaggagaagtcctgcccgtgtctggcacaggaaggcccacaaggcgacctgttgacgaagacacaggagctgggccgagactatcgtacgtgcttgaccattgtgcagaaacttaaaaaaatggttgataaacctacacaaaggtctgtgagcaacgcggctactcgcgtgtgccgaaccggtagatcaaggtggcgagacgtgtgtcgtaactttatgaggaggtatcagtctcgtgttacacaaggacttgttgccggggaaaccgcacagcagatctgcgaggatttgagactctgtatcccgagcactggacctttg

SEQ ID NO: 165003 - DNA, 435 bp, Artificial Sequence
  derived and/or modified sequence
atggcaacctgggctctcctcctgttggccgctatgctgctgggaaaccccggcctcgttttctccagattgtccccggaatactacgacttggcccgcgcgcacctcagggatgaagagaagtcgtgcccgtgcctggctcaggaaggacctcagggggatcttctcactaaaactcaggaactgggcagggactatcggacttgtctcaccatcgtgcagaagttgaagaagatggtcgataaaccaacccaacgtagcgtgtccaatgcggcgacgcgcgtatgccgcaccggaagaagccgctggcgggacgtctgccggaactttatgcgtagataccagtcacgggtgacccaaggactggtggccggcgagactgcccagcaaatctgcgaggacctgcggctgtgcatcccgagtacgggaccgctg

SEQ ID NO: 165004 - DNA, 435 bp, Artificial Sequence
  derived and/or modified sequence
atggcgacttgggctctgctgctgctcgccgccatgcttctcggcaacccgggactcgttttctcgcgcctgtctccggaatactacgatctcgcacgcgcccacctgcgggacgaagagaaatcatgcccatgcctggcacaggaaggccctcagggcgatctgttgactaagactcaagagctgggacgggactacagaacttgcctcaccattgtccagaaattgaagaagatggtggataagccaacccagcggtccgtgtcgaatgctgccactagagtgtgccggaccgggaggtcgcgttggcgagacgtctgcagaaacttcatgcgacggtaccagagccgcgtgacccagggactcgtggcgggagaaaccgcacagcaaatctgcgaagatctccgcctgtgcatcccgtcgaccggcccactg

SEQ ID NO: 165005 - DNA, 435 bp, Artificial Sequence
  derived and/or modified sequence
atggcaacctgggcgctgctcctcctcgctgccatgctcctaggaaaccccggccttgtattcagtagattgagccctgagtattatgatcttgctcgggcccaccttcgcgacgaagagaaatcctgtccttgcctcgcccaggaagggccacagggagacttgctaactaaaacccaggagctggggagggactaccgcacatgtctcactattgtacagaagttaaagaaaatggtggataagccgactcagagaagtgttagtaacgcggcaacacgcgtgtgtaggaccgggagatcccgttggcgggatgtttgtcgaaattttatgagacgctatcagagccgagtgacacaaggcctggtcgctggggagaccgcccaacagatttgcgaagatttgcgtctttgtatcccctccactggaccactg

SEQ ID NO: 165006 - DNA, 435 bp, Artificial Sequence
  derived and/or modified sequence
atggcaacctgggcactgctgctgctcgcagcaatgttactggggaaccccggactggtgtttagtagactgagcccggaatattatgacctcgcccgtgcccaccttcgggacgaagaaaaatcttgtccctgcttggcacaagaagggccacagggagacctactgacaaaaactcaagaactgggccgggactacagaacatgcttgacaatcgtgcagaaactgaaaaaaatggtggataaacccacacaaagaagcgtcagtaatgccgctacacgagtctgtcgcacagggcgaagtcgctggagagacgtctgtagaaactttatgaggaggtaccagagcagagttacccaaggtctggtggcgggggagacagctcaacagatctgcgaggacttacgtctctgcattcctagcaccggcccctta

SEQ ID NO: 165007 - DNA, 435 bp, Artificial Sequence
  derived and/or modified sequence
atggctacttgggcccttctcttgctcgccgcaatgctcctggggaatccgggccttgtcttcagtcggctcagccctgagtactacgatctagcacgagctcatctgagagatgaagagaagtcatgcccttgccttgctcaagagggtccccagggcgacctgctcaccaaaacccaggagctgggtcgggattatcgcacctgtctgaccattgtccagaaactcaagaaaatggttgacaagcctacccagcgcagcgtgtctaacgcagccactcgggtgtgccggacaggacgctcgcggtggcgcgatgtatgtcggaacttcatgcgcagatatcagtcccgggttacgcagggactggtggcaggtgagacggcgcagcagatttgtgaagacttgagactatgtatccccagcactggcccactg

SEQ ID NO: 165008 - DNA, 435 bp, Artificial Sequence
  derived and/or modified sequence
atggccacctgggcactgctcttgctcgccgcgatgctcctggggaaccccgggctggtcttttcaagactgagcccagagtattacgatctggcaagggcccatctgagagatgaagagaagagctgcccatgcctggctcaagagggcccgcagggggacctgctcaccaaaacccaggaactgggacgggattaccgcacctgcctgaccatcgtgcagaaattgaagaagatggtggacaaacctacccagaggtccgtgtcgaatgccgcaacccgcgtgtgccggactggtagaagcagatggcgcgacgtgtgccgcaacttcatgcgccgctaccagtcccgcgtcacccagggactggtggccggggaaaccgcacaacaaatttgcgaggacctgcgcctctgcatcccgtcaactggtcctctg

SEQ ID NO: 165009 - DNA, 435 bp, Artificial Sequence
  derived and/or modified sequence
atggctacatgggctttgcttctacttgcggcaatgcttcttggaaaccccgggttagtcttttctcgtttatccccggagtattacgatttagcgcgtgctcatttgcgtgatgaagagaagtcttgcccgtgtttggctcaagaaggacctcaaggcgatctcttaacgaagacgcaagaattgggccgcgactatcgaacatgcttaacgattgtccaaaagttaaaaaagatggtcgacaagcctacacaaagatctgtcagtaatgcagcaacacgcgtttgcagaacggggcgttcgagatggcgcgacgtatgccgcaattttatgcgacgatatcagagccgggtaacccagggcctggtggcgggggagacagcccaacagatatgcgaagaccttcgcttgtgcatcccttccacaggacccctt

SEQ ID NO: 165010 - DNA, 435 bp, Artificial Sequence
  derived and/or modified sequence
atggctacatgggcactgctcctgctcgcagcgatgttgcttggtaatccaggcctggtttttagccgactgtcgccggagtattatgatctggcccgtgcccatttacgagacgaagaaaaatcttgtccgtgtttggctcaggaaggcccacagggagacttacttaccaagactcaagaactaggacgagattataggacttgcctcacaatagttcaaaaacttaagaaaatggtcgataaacctacgcagcgttcagtttccaatgcagcgacacgtgtttgtagaaccggacggtctcgttggcgcgatgtatgccgtaatttcatgagaagatatcagagcagggtgacacagggtctggttgcaggtgagacggctcaacagatctgcgaggatctgcgtctgtgcatcccgtctacaggaccactt

SEQ ID NO: 165011 - DNA, 435 bp, Artificial Sequence
  derived and/or modified sequence
atggctacctgggcgcttctgcttctggccgcaatgttgctggggaaccctggtctggtatttagtcggctgtcgccagaatactacgaccttgcccgggctcacctgcgcgatgaggagaagtcctgtccctgcctggctcaggagggcccgcagggcgacctcctgaccaagactcaggaacttggaagggattatagaacctgtcttactattgtgcaaaaacttaagaaaatggtggataagcccacgcaaagatctgtgtccaatgcagccaccagggtgtgccgaactggcagaagccggtggcgtgacgtctgtagaaacttcatgcgcaggtaccagagcagagtcacccaaggacttgtcgcaggcgaaactgcacaacagatctgcgaagatctgcgcctgtgtataccttcaaccggacctctc

SEQ ID NO: 165012 - DNA, 435 bp, Artificial Sequence
  derived and/or modified sequence
atggccacctgggccctgctgttgctggccgctatgctcttggggaacccgggactggtgttctcccggctgtcgcccgaatactatgatcttgcgagagcacacttgcgagacgaagagaagtcgtgcccatgccttgcgcaggaaggaccgcaaggtgacctgctcaccaagacccaggagctggggagggactaccgcacctgcttgactatcgtccagaaactgaagaaaatggtagataagcctacccaacggagcgtctcaaacgccgcgactcgagtatgcagaaccggcagatctcgctggcgcgacgtgtgtcggaatttcatgcggcgataccaatcacgcgtgactcaaggactggtggcgggggagacggcccagcagatctgtgaagatctccgtctgtgcattccgtcgactggacctctc

SEQ ID NO: 165013 - DNA, 435 bp, Artificial Sequence
  derived and/or modified sequence
atggcaacgtgggcacttttgttgctcgcagcaatgctcctcggaaacccaggtcttgtcttttcccgcctttcacctgaatactatgacctggcgcgcgcccatctgcgcgacgaagagaaatcgtgcccgtgtcttgcacaagaaggacctcaaggcgatctcctgactaagacccaagaacttgggagggactaccgcacctgtctgactatagttcaaaagctgaaaaagatggtcgataagcccacccaaagatctgtgtcgaacgccgcaactagggtctgtcgaaccgggaggagcagatggcgggatgtctgtagaaatttcatgaggaggtaccagagtcgtgtgactcaaggtttggtggcgggggaaacggcgcagcagatttgtgaagatttgaggctttgcattccatccaccggtcctctg

SEQ ID NO: 165014 - DNA, 435 bp, Artificial Sequence
  derived and/or modified sequence
atggcaacctgggcactgctgctgctggcagccatgcttctgggaaacccaggtctggtgttttcacgtcttagccccgaatactacgatttggcaagagcacacctgagggatgaagaaaagtcgtgcccatgtctcgcacaagaaggaccccaaggtgacctgctcactaagacccaagaacttgggagggactaccgcacgtgtcttacgattgtccagaagctgaagaagatggtggacaaacccactcaacggtcggtgtccaacgccgcaactagagtgtgcaggaccggaaggtcgaggtggcgagacgtgtgtagaaacttcatgcggagataccaatcgcgggtcacccaaggactggtggcgggagaaactgcgcagcaaatatgtgaggatcttagactctgcattccttccaccggtccactt

SEQ ID NO: 165015 - DNA, 435 bp, Artificial Sequence
  derived and/or modified sequence
atggcaacctgggcattgctccttcttgcagcaatgcttcttggaaatcccggcctggttttttcccgactgtcccctgaatactacgatctggcacgagcacatttgagggatgaagaaaagtcttgtccatgccttgcgcaggagggtcctcagggcgatctcctgactaagacccaagaactggggcgggattaccgtacttgtctgaccatcgtgcaaaagctcaaaaagatggtcgataagccaactcaacgcagcgtgtccaatgcagccacgcgcgtgtgtcgcaccgggcgcagcaggtggagggatgtgtgccgtaactttatgagaagataccagtctcgtgtgactcaaggacttgtcgccggcgaaaccgcgcaacaaatatgtgaagatctccggctttgtattccgtcgactggacctctt

SEQ ID NO: 165016 - DNA, 435 bp, Artificial Sequence
  derived and/or modified sequence
atggcgacatgggcccttctgttattggcggctatgctcctcggcaatcccggcctggtcttttcaaggttgtccccagaatactatgacttggcacgcgctcacttgcgggatgaggaaaagtcatgcccttgcttggcccaggagggtcctcagggcgacttgctaaccaaaacgcaagaactcggccgagattacaggacgtgtcttactatcgttcagaagctgaaaaaaatggtggacaagccgacacagcgatcagtttccaatgcggcaactcgggtgtgccgtacaggcagaagtcgctggcgagacgtgtgcagaaactttatgagaagataccagtccagagtcactcaaggactcgtcgctggcgagacagcccagcagatatgtgaggatctgcggctgtgcataccatccactggccccctg

SEQ ID NO: 165017 - DNA, 435 bp, Artificial Sequence
  derived and/or modified sequence
atggctacctgggcactattgctgttggcagctatgctgcttggtaaccccggcctggtattctcccgcctgagccccgaatactatgacctggcccgcgctcacctgagggatgaggagaagtcttgtccttgtctggcccaggagggcccccagggcgatttgctcaccaagacccaagagcttggccgcgactaccgcacctgcctgacgattgtccagaagctcaagaaaatggtagacaagcccacccaacgctccgtcagcaacgccgctacccgggtgtgtcgcacgggacgctcccgttggcgggatgtctgcaggaacttcatgcgtcgttaccagagccgagtcacccaaggtctggtggccggagagaccgcccagcagatatgtgaagatctccgcctgtgcatcccctcgaccggtccgctg

SEQ ID NO: 165018 - DNA, 435 bp, Artificial Sequence
  derived and/or modified sequence
atggccacttgggcactcctgctgcttgctgccatgctgcttggtaatccgggcctggtgttttcacgactcagccccgaatactacgatctggctagagcacatctccgcgacgaggaaaaatcctgcccatgtctggcacaggagggacctcaaggagatttgctcacgaaaacccaggagttgggtagagattataggacttgtctcactattgttcaaaaacttaagaaaatggtcgataagccgactcaacgttcagtttcgaacgcagcgacgagggtgtgtagaacgggaagatcccgctggcgagacgtgtgtaggaacttcatgagaagatatcagtcacgggtgacccaaggattggtcgcaggtgaaaccgcccaacagatctgcgaggatcttcggctgtgtattccctcgactgggcccctc

SEQ ID NO: 165019 - DNA, 435 bp, Artificial Sequence
  derived and/or modified sequence
atggcaacctgggcactgttgcttctggccgctatgttgcttggaaacccgggactggtgttctcccgcttgtcaccagagtactatgatcttgcacgcgcacatttgcgtgacgaggaaaagtcgtgcccgtgtctcgcacaagaaggaccacaaggcgatctgcttaccaaaactcaggagcttggtagagactaccggacctgtctgactattgtgcaaaaacttaagaagatggtcgataagccaacccagaggagcgtgtccaacgccgcgactcgcgtgtgtaggactggtcggagccgctggagagatgtgtgtagaaactttatgagacgttatcaatcgcgggtgactcagggtcttgttgctggcgaaaccgcccagcagatttgcgaagatctgcgtctttgtattccttccaccggtcccctg

SEQ ID NO: 165020 - DNA, 435 bp, Artificial Sequence
  derived and/or modified sequence
atggcgacgtgggcgttactattattagcggcgatgctattaggtaatccgggtttagttttttcgcgtctatcgccggaatattatgatctagcgcgagcgcatttacgagatgaagaaaaatcgtgtccgtgtctagcgcaagaaggtccgcaaggtgatttactaacgaaaacgcaagaattaggtcgtgattatcgaacgtgtttaacgatagtacaaaaattaaaaaaaatggtagataaaccgacgcaacgttcggtttcgaatgcggcgacgcgtgtttgtcgaacgggtcgttcgcgttggcgtgatgtttgtcgaaattttatgcgtcgttatcaatcgcgtgtaacgcaaggtttagtagcgggtgaaacggcgcaacaaatatgtgaagatttacgtttatgtataccgtcgacgggtccgtta

SEQ ID NO: 165021 - DNA, 435 bp, Artificial Sequence
  derived and/or modified sequence
atggcaacctgggctcttctgctgctggccgctatgctgttaggaaacccaggactggtgttctccagactcagccctgagtactatgacctggcaagagctcatctacgcgacgaagagaaaagttgtccatgtctggcacaggaaggcccacagggcgaccttctcacaaaaactcaagagctaggacgcgattacaggacctgcttgacgatcgtgcaaaagctgaagaagatggtcgataagccgactcagcggtctgtgagcaatgctgccacgagagtgtgtaggactggcagaagtcgatggcgggacgtatgcagaaacttcatgcggaggtaccaaagtcgagtcacccagggcctagtggccggtgagactgcacagcaaatatgtgaagatctgcgactttgtattcccagcactggtccactg

SEQ ID NO: 165022 - DNA, 435 bp, Artificial Sequence
  derived and/or modified sequence
atggccacctgggcgctcctgctgctggctgccatgctgctcggaaatccaggactcgtgttttctcggctgtcgcctgaatactatgatctggcaagagcgcacttgcgggacgaggaaaagagctgcccttgtctcgcacaagagggcccgcaaggggaccttttgactaaaacccaagaactgggacgggattaccggacctgtctcactatcgtgcagaagctgaagaagatggtcgacaaacctactcagcgctccgtgtcgaatgccgccacccgcgtctgtaggactggcagatcccgctggcgcgacgtgtgccgcaatttcatgagacggtaccagagccgcgtgactcagggcctggtggcaggggaaactgcgcagcaaatctgcgaagatctgcggctgtgcatcccgtccacgggtccactg

SEQ ID NO: 165023 - DNA, 435 bp, Artificial Sequence
  derived and/or modified sequence
atggctacgtgggccctgctacttctagcagcgatgttgctgggtaacccgggccttgtgttcagccgcttatcccctgagtactatgacttggcccgcgcccatttgagggatgaggagaaaagttgtccttgtctggcccaggagggtccccaaggtgacctactgaccaaaactcaggaattaggtcgggattatcggacctgcctcactattgtccagaagctgaagaagatggtggacaaacctacacagagatccgtgagtaatgctgcaacgagagtatgtcggaccggtaggagccgctggagggacgtgtgtagaaactttatgagacgctatcagtcccgcgtcacgcaggggctggtggcgggggaaacggcccagcagatctgtgaggacctgcgtctttgtattccatccactggtcctctt

SEQ ID NO: 165024 - DNA, 435 bp, Artificial Sequence
  derived and/or modified sequence
atggccacttgggcattgctcctgctcgccgccatgcttttgggcaatccaggactcgtgttttctagactgagcccagagtactacgatctggctagggcacacctgcgcgacgaagagaaaagctgtccctgcctcgcgcaggagggcccccaaggcgatctcttaaccaagactcaggagctcgggcgagattataggacatgcttgactatcgtccaaaaattgaagaaaatggttgacaagcccacacagcgaagcgtatcaaacgctgcgaccagagtgtgtaggacaggccgttcacgatggcgcgacgtatgtaggaacttcatgaggcgataccagtctagagtcactcaggggcttgtcgcgggtgaaaccgctcagcagatctgtgaagatctgcgactgtgcatacccagcaccggccccctg

SEQ ID NO: 165025 - DNA, 435 bp, Artificial Sequence
  derived and/or modified sequence
atggccacatgggccctgctgctgttagctgccatgctccttggaaaccccggactggtgttctcaaggctgagtccagaatattatgatctggccagagcacatctgagggatgaggaaaaatcttgcccatgcctagctcaagaagggccccagggggatctactgacgaaaacacaggaactcggaagagattataggacttgtctcactatcgtgcagaaactgaaaaaaatggtggacaaacccacacagcggtctgtcagtaacgccgcgacacgcgtctgccggactggaaggtctcgctggagagatgtatgcagaaacttcatgaggcggtatcagagtagggtgactcaggggttggtggccggagaaacagcccagcagatctgtgaagatctccggctatgcatcccaagtactgggcctcta

SEQ ID NO: 165026 - DNA, 435 bp, Artificial Sequence
  derived and/or modified sequence
atggctacatgggccctactgctgctcgccgctatgctcctagggaatcccggcctggtgttttctcggttaagccccgagtattatgatttagcccgggcccatctgcgtgacgaagaaaaaagctgtccatgtctggcccaggagggaccacagggcgatctgctgacaaagacacaggagcttgggagggattaccggacttgcttgaccatagtgcaaaagttaaaaaaaatggtggacaaaccaactcagaggtcagtgagcaatgccgctaccagagtttgtaggacaggcagatccaggtggagagacgtttgccgcaatttcatgcgcaggtaccagagccgagtgacccagggcctggtggcaggtgaaacagctcagcagatttgtgaggacctcagactatgcatcccatcaacagggccactc

SEQ ID NO: 165027 - DNA, 435 bp, Artificial Sequence
  derived and/or modified sequence
atggcgacgtgggccttgcttcttcttgccgcaatgctgcttggtaatccaggactggtgttcagtagattgtcacctgaatactatgacttggctcgggcccacttgagggatgaggagaaatcgtgcccctgccttgctcaggagggtccacaaggtgatctgctcacaaaaacccaggaattagggagggattacagaacttgccttaccatagtgcagaagctaaagaagatggtcgataagcctacacagaggagtgtgtcgaacgctgccactagggtttgtcgcaccggtcgaagcaggtggcgtgatgtttgtcgtaatttcatgcggaggtatcaatctcgagttacgcaaggactggttgctggtgaaactgcacaacagatttgcgaagacctgagattgtgtatcccatctacaggtcccctc

SEQ ID NO: 165028 - DNA, 435 bp, Artificial Sequence
  derived and/or modified sequence
atggccacttgggcccttctcctcttggcggctatgttgctcggaaatcctggcctcgtgttttctcgactttcgcctgagtactacgacctggcccgggcccaccttagagatgaagaaaaatcatgcccatgtctcgcacaggagggcccgcagggcgacctgctgactaaaacgcaggaactgggacgagattacagaacctgcctcaccatcgtccagaagctgaagaagatggtggacaagcccacccagcggtctgttagtaacgcggctacgcgcgtgtgccgtaccgggcgcagcaggtggcgcgatgtgtgccgcaacttcatgcggagatatcaatcccgagtcacgcagggcctggtggccggagaaaccgcgcaacaaatctgcgaggacctgcgcttgtgtattccgtcaaccggtccgctg

SEQ ID NO: 165029 - DNA, 288 bp, Artificial Sequence
  derived and/or modified sequence
atggccacttgggccctgctcctgctcgcagcaatgcttctgggaaaccctgggctggtgttcagcggcagggactaccgtacctgtctgactatcgtccaaaagctgaaaaagatggtcgataagcctacccaacgctccgtgtccaatgccgcaacgcgggtgtgcagaaccggaaggtcccgatggcgagacgtgtgtagaaactttatgcgtagataccaatcgcgcgtcactcagggtcttgtggcgggagaaaccgcccagcaaatatgcgaggatcttaga

SEQ ID NO: 165030 - DNA, 288 bp, Artificial Sequence
  derived and/or modified sequence
atggccacgtgggcgctgctgctgcttgccgccatgttgctcgggaaccctggtctggttttcagtggacgcgactacagaacttgtctgactatcgtacagaaactcaagaagatggtggacaagccgacccagagatccgtttcaaatgcagcgacccgggtgtgccgtaccggccgatcgcggtggcgcgatgtctgccggaactttatgcgccgctaccagagccgcgtgacccagggactggtggccggagagactgctcaacagatctgcgaagatttgaga

SEQ ID NO: 165031 - DNA, 288 bp, Artificial Sequence
  derived and/or modified sequence
atggctacgtgggccctgctgctcttggcagcaatgcttctgggcaatccgggactcgtgtttagcggtcgcgactaccgcacttgcctcaccatcgtccagaagctcaagaaaatggtggataagcccacccagagatcggtttccaatgcagccactagggtgtgccgcactggccgctcaagatggcgggacgtctgcagaaatttcatgaggaggtaccaaagcagggttacgcagggactcgtggctggggaaactgctcagcagatctgcgaggacctgcgg

SEQ ID NO: 165032 - DNA, 288 bp, Artificial Sequence
  derived and/or modified sequence
atggccacttgggcacttctgctgctcgcagctatgctcctcgggaatccgggcctcgtgttcagtgggcgggattaccgcacttgcctgactatcgtgcagaagttgaagaaaatggtggacaagccgactcagcggtcggtgtccaacgccgccactcgcgtgtgccggaccggacgcagccgctggagggatgtgtgccggaactttatgcggcggtaccaatcgagggtgacccagggcctggtcgccggagaaaccgcacaacagatctgcgaggacctgcgc

SEQ ID NO: 165033 - DNA, 288 bp, Artificial Sequence
  derived and/or modified sequence
atggccacctgggccttattgctgctcgctgcaatgctgctgggtaacccgggccttgtttttagcggaagggattatcggacatgcctcaccatcgtacaaaaactcaaaaagatggtcgataaacccacccagcgctcggtgtccaacgctgccacccgggtctgtcgcactggacggtccagatggagggacgtgtgccgtaattttatgcgcaggtaccagtctcgcgtgacccagggcttggtagccggcgagacagcacagcagatctgcgaggacttgcga

SEQ ID NO: 165034 - DNA, 288 bp, Artificial Sequence
  derived and/or modified sequence
atggctacctgggcccttcttttgctggctgccatgctcctaggcaaccctggcctcgttttttcgggaagagactaccgcacctgtctcacaattgttcagaagctgaaaaagatggtggataaacccactcagaggtccgtgagcaatgctgctacgagggtctgcagaaccgggcgcagcaggtggagggacgtttgtcggaactttatgcgcagataccagtccagggtaacccagggactcgttgcaggggagacagcgcagcagatctgtgaagatttgcgc

SEQ ID NO: 165035 - DNA, 288 bp, Artificial Sequence
  derived and/or modified sequence
atggcaacctgggcgctgctgctgctggcggccatgctgctgggcaacccggggctggtgttctcgggccgtgactaccggacctgccttactatcgtgcagaaactcaagaaaatggtggataagcctacccaacgcagcgtctcaaacgccgcaacgcgggtgtgcagaaccgggcgctcaagatggagggatgtgtgcaggaactttatgcgccgctaccagtcgcgggtgacccaagggctcgtggcgggagaaaccgcacagcaaatctgcgaggatctgaga

SEQ ID NO: 165036 - DNA, 288 bp, Artificial Sequence
  derived and/or modified sequence
atggcgacctgggcacttttgctcctggcagcaatgctgctgggaaaccccggattggtattcagcggtagagactaccggacttgcctcaccatcgtgcaaaaactcaaaaagatggttgataagccgactcagcgttcggtgtccaacgccgccacgagagtgtgcagaactggccgcagcaggtggagagacgtgtgtcggaatttcatgcggcggtaccagtctagggtgacccaagggctcgtggcaggggaaactgcgcaacagatttgcgaggacctgaga

SEQ ID NO: 165037 - DNA, 288 bp, Artificial Sequence
  derived and/or modified sequence
atggctacgtgggcactgttgcttctggcagctatgcttcttggtaatcctggcttagtgttttccggcagggattaccggacgtgtctgacgatagttcagaaattaaaaaagatggtagacaaaccgacgcagcgatctgtgtccaatgcggcaacgcgcgtatgccgcacaggaagaagtcgctggcgtgacgtgtgccgaaacttcatgagacggtaccagtctagagtaactcaaggactggtcgcgggagaaacggcccaacagatttgcgaggatttacgc

SEQ ID NO: 165038 - DNA, 288 bp, Artificial Sequence
  derived and/or modified sequence
atggcaacgtgggccctgttgctgttggcagccatgctgttgggtaacccaggactcgtattttccgggagggactaccggacgtgcctgacgatcgttcagaagctcaagaagatggtggacaagcctacccagcgcagtgtcagtaatgcagcaacccgggtttgccgcaccggccgctctcgatggagagatgtgtgcaggaatttcatgaggcgctatcagtcccgcgtgacccagggtttggtggcaggcgagactgcccagcagatatgcgaggacttacgg

SEQ ID NO: 165039 - DNA, 288 bp, Artificial Sequence
  derived and/or modified sequence
atggctacctgggctctgttactactcgctgccatgttattggggaaccctggcctcgtgttttccgggcgtgactacaggacatgtctgaccatcgttcagaaactcaagaagatggtggataagcccacccaacggagcgtatctaatgccgctactcgggtctgcagaacaggccgctctcggtggagagatgtgtgtcggaactttatgagacgctaccagtcaagagttacgcagggactcgtcgcgggggaaacagcccagcagatttgcgaggatcttcgg

SEQ ID NO: 165040 - DNA, 288 bp, Artificial Sequence
  derived and/or modified sequence
atggcgacgtgggcactcttgctgcttgccgcaatgttgctgggtaacccaggacttgtgttttcgggaagagactaccgaacttgtctcaccattgtccagaaactcaagaagatggtggacaagcctactcaacgttccgtttcgaacgcagccacccgtgtgtgccgaactggcaggtctaggtggcgcgatgtgtgtcggaatttcatgagaaggtatcagtcccgagtcacccagggccttgtggcaggagagactgcgcaacaaatctgtgaagatctccgg

SEQ ID NO: 165041 - DNA, 288 bp, Artificial Sequence
  derived and/or modified sequence
atggcgacttgggcgttgctcctgcttgccgcgatgctgcttggcaaccccggactcgtgttcagcggtcgggattaccgtacttgcctcaccatcgtgcaaaagttgaaaaagatggtggacaagccaactcagcggtcagtctccaatgccgcaactcgagtgtgcaggaccggcaggtcgagatggcgcgacgtctgccggaactttatgcgccggtaccagtcgagagtgacccagggactggtggcgggggaaactgcccaacagatctgtgaggatctccgg

SEQ ID NO: 165042 - DNA, 288 bp, Artificial Sequence
  derived and/or modified sequence
atggccacctgggcattgctgcttctcgccgccatgctactcggtaaccccgggctcgtgttctcaggtagggactacagaacttgtctgactattgtgcagaagctcaaaaaaatggtcgataagccaacgcagcgatcagtgtcgaacgctgcaactcgagtttgtaggaccgggaggagcagatggcgggacgtttgtagaaacttcatgaggcgttaccagagccgtgttacacaagggctggtggctggggagacagcacagcagatatgtgaagacctgagg

SEQ ID NO: 165043 - DNA, 288 bp, Artificial Sequence
  derived and/or modified sequence
atggcgacttgggcattgctcctgttggctgctatgctgctagggaaccctggactcgttttctccggaagggattataggacctgtttaactattgtccaaaaactcaagaaaatggtggacaaaccgacacaacggtctgtttccaatgccgcgacccgcgtttgtagaactggacgttctcggtggcgtgacgtgtgtagaaattttatgagacgataccaatctagagttacgcaaggattggtggctggagaaaccgcgcaacaaatctgtgaagatctacgt

SEQ ID NO: 165044 - DNA, 288 bp, Artificial Sequence
  derived and/or modified sequence
atggcgacgtgggcacttttattgctggcggccatgctgttggggaacccgggtttggtgttcagcggccgcgactataggacctgcttaaccatagtccagaagctcaagaaaatggttgacaaaccaacgcaacgatctgtcagcaacgccgccacccgcgtgtgcaggactggcagatcgcgctggcgcgacgtctgtcgaaactttatgcgccgttaccagagccgggtgactcagggccttgtagccggagagactgcgcagcagatatgcgaagatctgaga

SEQ ID NO: 165045 - DNA, 288 bp, Artificial Sequence
  derived and/or modified sequence
atggcaacctgggccctcctgctgctcgctgcaatgcttctgggtaatccaggtttggtcttttcgggtcgggattaccgaacttgtctgactattgtccaaaagctgaagaaaatggtggacaaaccaacccagagatccgtcagcaacgcagccacccgggtgtgtagaactggaagatccaggtggcgcgatgtgtgtagaaactttatgcgacgctaccagtccagagtcacccaaggccttgtggcaggagaaactgcacagcagatctgcgaggaccttcgc

SEQ ID NO: 165046 - DNA, 288 bp, Artificial Sequence
  derived and/or modified sequence
atggccacttgggcactgctactgctggcagccatgctgcttggtaatcctggattggttttttcaggaagagactaccgcacatgcctcactatcgtacagaaactgaagaagatggtggacaagccgactcaaaggtcagtttcaaacgctgctacgcgcgtttgtcgcacaggacggagtcggtggcgcgacgtgtgtcgaaatttcatgcggcgctaccaaagccgagtgacccagggcctcgtggctggtgaaactgcgcagcagatctgtgaggaccttcgg

SEQ ID NO: 165047 - DNA, 288 bp, Artificial Sequence
  derived and/or modified sequence
atggccacatgggcactactgttgctggcggcaatgctccttggcaatccaggattggtgttctctggacgggactaccgcacatgtctgactatcgtgcagaaattgaaaaaaatggtcgataagcctactcagcgatcagttagcaatgcagcgaccagagtttgtaggactggtcgcagtcgctggagggatgtctgtcggaacttcatgcgccggtaccagagccgagtgactcaggggctggtcgcgggggaaactgctcaacaaatttgtgaggatttgcgt

SEQ ID NO: 165048 - DNA, 288 bp, Artificial Sequence
  derived and/or modified sequence
atggctacctgggcactgctcctgctcgcagcaatgctgcttggaaaccccggcttggtgttcagcggacgggactacagaacttgtctgactattgtgcagaagctgaagaagatggtggataagccaacccaaaggtcggtgtcgaacgccgcaacccgtgtgtgtcgcacgggccgttcccgttggcgcgatgtgtgccgcaactttatgaggagataccagtcacgggtcactcaaggtttggtggccggagaaactgcccagcaaatttgtgaggatctgaga

SEQ ID NO: 165049 - DNA, 288 bp, Artificial Sequence
  derived and/or modified sequence
atggccacatgggcactcctcctcctggccgctatgctgctcggtaatccaggactcgttttttctggcagagactacaggacatgtctcaccattgtacaaaagctgaagaagatggtggataaaccgacccagaggtcggttagtaatgcagcgaccagggtgtgccgcaccggtcgaagtagatggcgcgatgtatgccgtaatttcatgaggagataccagtctcgcgtgacacagggcctggtggccggcgagaccgcccagcagatatgcgaagacttgcga

SEQ ID NO: 165050 - DNA, 288 bp, Artificial Sequence
  derived and/or modified sequence
atggcaacttgggctctactgctgctcgccgctatgttgttaggcaatccaggcttggttttctccggaagagattataggacttgtctgactattgtccagaaattgaagaaaatggtggataaaccaacccagcgttccgtgtcaaacgccgctacccgtgtctgcagaactgggcgatcaaggtggcgagacgtgtgtaggaatttcatgagaaggtaccaaagtagagtgacccaagggcttgtggccggagagaccgcccaacagatttgcgaagatttgcgc

SEQ ID NO: 165051 - DNA, 288 bp, Artificial Sequence
  derived and/or modified sequence
atggctacatgggcactcctgttacttgcagccatgctgcttggcaatcctgggctggtcttcagtggaagggactacagaacatgcttgaccatagtgcaaaagctgaagaagatggtcgataaacccacccagcggtccgtctccaatgcagctacacgtgtgtgtcgaacggggagatcccgatggagagacgtctgtcgtaattttatgcgcaggtatcagtcaagagtgacgcagggactagtcgcgggagaaaccgcacagcagatctgcgaagacttgagg

SEQ ID NO: 165052 - DNA, 288 bp, Artificial Sequence
  derived and/or modified sequence
atggccacctgggccctgctcctgcttgccgctatgctcttgggtaaccccgggctggtctttagcggccgtgactaccggacctgccttactatcgttcagaagctgaagaagatggtcgataaaccgacgcaaagatccgtgtcgaacgcagctactcgagtgtgcagaacgggacggtcccgctggagggacgtgtgtcgcaatttcatgaggcgataccagtctcgggtgacccagggattggtcgcgggggaaactgctcaacagatctgcgaggatctgcgc

SEQ ID NO: 165053 - DNA, 288 bp, Artificial Sequence
  derived and/or modified sequence
atggctacatgggcactgctcctgctggctgctatgcttcttggtaatccaggcctggtgtttagcggacgagattacagaacctgtctgactatcgtccaaaagctgaaaaagatggtcgacaagccaactcagagaagcgtgtccaacgcagccacccgtgtgtgcaggaccgggaggtctcggtggagggatgtgtgcagaaatttcatgcgcaggtatcaaagcagggtgacacaaggcctggtagcgggcgagaccgcgcagcagatctgtgaggatctgaga

SEQ ID NO: 165054 - DNA, 288 bp, Artificial Sequence
  derived and/or modified sequence
atggctacttgggccctgctactcctggccgctatgctgctgggaaaccccggtttggttttctcggggcgggactataggacctgtttgaccatcgtgcaaaaattaaagaaaatggttgataagcccacccagaggagtgtcagcaacgccgccacccgggtttgtcggactgggagatcaagatggagggacgtgtgccgcaatttcatgcgtcgctatcaaagccgggtaacccaggggctggtggccggggagacagcccagcaaatttgtgaagacctgaga

SEQ ID NO: 165055 - DNA, 288 bp, Artificial Sequence
  derived and/or modified sequence
atggccacatgggcgttactgttacttgcggctatgcttttaggaaatcccggtttggtgttctcgggccgggattacagaacctgtctgaccatcgtgcagaaactgaaaaagatggtggataaaccaacccagcgtagcgtctcaaatgctgctacccgggtctgcaggacgggcagatcgcggtggagggatgtgtgccgaaattttatgcgtcggtatcagtcaagagtaacccaggggctcgtcgcgggcgaaaccgcacaacagatctgcgaggacttgaga

SEQ ID NO: 165056 - DNA, 288 bp, Artificial Sequence
  derived and/or modified sequence
atggccacttgggccttgctactcctggcagccatgctgcttggaaacccaggtctggttttcagcggacgggactatagaacctgcctaacaatagtgcagaagttgaaaaagatggttgacaagcccacccaacggagcgtaagcaacgcagcaactcgtgtgtgtaggacgggaagatcacggtggcgcgacgtgtgcagaaactttatgcgacggtaccagagccgggtcactcaggggttggtcgccggagagactgcacagcagatttgcgaagatctcagg

SEQ ID NO: 165057 - DNA, 288 bp, Artificial Sequence
  derived and/or modified sequence
atggcaacctgggccctcctcttgctggctgccatgttgctgggtaaccctggactggttttctctggcagggattacaggacctgcctcaccattgtgcagaagctgaaaaaaatggtcgacaagccgacccagcgatccgtgtccaatgcagcgactagggtgtgccgtaccggcagatctcgatggcgagacgtgtgcaggaactttatgcgtaggtatcagtcacgggtgactcagggcctcgtggcaggagagacggcacagcaaatctgtgaggacttgcga

SEQ ID NO: 165058 - DNA, 288 bp, Artificial Sequence
  derived and/or modified sequence
atggcgacctgggccctgctgctgctggcagcgatgctgttgggaaatcctggtctggtgttttcggggcgcgattaccggacgtgtctgaccatcgtccagaaattgaaaaagatggtggataagccaacccagagatccgtttcaaacgccgctacccgggtgtgtcgtacgggaaggtcgcggtggcgggacgtgtgcagaaatttcatgcgccgctaccaatcccgggtgactcagggccttgtggccggggaaacggcgcagcaaatctgcgaggatcttaga

SEQ ID NO: 165059 - DNA, 288 bp, Artificial Sequence
  derived and/or modified sequence
atggccacatgggcgttgttgctccttgcggccatgctgttagggaatccgggtctggtcttctcagggcgcgattaccgtacttgcctgactatcgtacaaaaactaaagaagatggttgataagcctacacaacgttctgtctccaatgcggccactcgagtttgtagaacgggccgttccagatggagagacgtctgccgcaacttcatgcgtcgttaccagtctagggttacgcaaggattggttgccggggaaactgcgcaacaaatttgtgaagaccttcgt

SEQ ID NO: 165060 - DNA, 288 bp, Artificial Sequence
  derived and/or modified sequence
atggcaacttgggctctgctcttgctggcagccatgctcctgggtaaccccggactcgtattttctggtcgtgattaccgcacctgccttaccattgtgcagaagcttaaaaagatggtggataaacccacacagaggtcagtctctaatgccgctacccgcgtttgcagaacaggtagatctaggtggcgtgacgtctgccgcaactttatgaggagataccagtcccgcgtcactcagggtctggtggcaggagagacagctcagcaaatctgcgaagatctgcgt

SEQ ID NO: 165061 - DNA, 288 bp, Artificial Sequence
  derived and/or modified sequence
atggcaacttgggctcttcttttgctcgcagcgatgctgctgggtaatcctgggctggtgttctctggtagagattacagaacctgtctgaccatcgtccaaaaactcaagaaaatggtcgacaagccgacccaacgatcggtcagcaatgcagccacgagggtgtgtagaactgggagatccagatggcgtgatgtctgccgaaactttatgcggcgataccagtcacgtgtgacccagggtttggtggcaggagaaaccgcccaacagatttgtgaagatctgcga

SEQ ID NO: 165062 - DNA, 288 bp, Artificial Sequence
  derived and/or modified sequence
atggcaacttgggcactgctcttgctggccgccatgttgctcggaaaccctggcctcgtgttttctggccgggattaccggacctgtcttacaattgtacaaaagctgaagaagatggtggacaagccaacgcagagatctgtgtccaacgccgctacgcgggtttgcagaacggggcgcagccgatggcgcgatgtttgccgaaatttcatgagacgctaccagagcagagtgacacagggtctggtggctggagaaacggcccagcaaatatgtgaggacctgaga

SEQ ID NO: 165063 - DNA, 288 bp, Artificial Sequence
  derived and/or modified sequence
atggccacctgggccctgctcctgctggccgccatgctccttgggaatccgggccttgtgttctcgggacgcgactaccgcacctgcctcactatcgtgcagaagttgaagaagatggtggacaagcctacccagagatcggtgagcaacgccgccaccagagtgtgccggaccggcagatcgcgctggagagacgtgtgccgcaacttcatgcgacgctaccaatccagggtgacgcaaggactcgtggcgggcgaaacggctcaacagatctgcgaagatctgcgc

SEQ ID NO: 165064 - DNA, 288 bp, Artificial Sequence
  derived and/or modified sequence
atggcgacttgggccttgctgctgctggcagcaatgctgctcggtaatcctggtcttgtcttttcgggacgggattacagaacttgcttgaccatcgtgcagaaactgaaaaagatggtcgataagcctacccaacgttcggtgtctaatgcagcaactcgggtttgccgcacgggccgctcaaggtggagagacgtgtgtaggaacttcatgaggcgctaccaatcgagagtgacccaaggactcgtggcaggagaaactgcacaacagatttgtgaagatctccgg

SEQ ID NO: 165065 - DNA, 288 bp, Artificial Sequence
  derived and/or modified sequence
atggcaacctgggcccttttactcttggccgcaatgttactgggaaatcctggcttagtattctcggggagggactaccgcacatgtctcactatcgtgcaaaaactaaagaagatggtggacaagccaacgcagcgatccgtgtcaaacgccgccacacgtgtgtgccgcactggtcgctcgcgctggagggacgtttgccggaactttatgaggcggtaccagagccgggttacacagggtctggtggcgggcgagaccgctcagcagatctgcgaggacctccga

SEQ ID NO: 165066 - DNA, 288 bp, Artificial Sequence
  derived and/or modified sequence
atggccacttgggctctgctgctcctggcggctatgctgctgggcaaccctggactcgtgttcagcggccgggattaccgcacctgcctgaccatcgtgcaaaagctgaagaagatggttgataaacctacccagcgctcagtgagcaatgcagcaacgcgggtgtgccgcaccggaagatcccggtggagagacgtgtgtcggaacttcatgagacggtaccaatcaagagtgactcagggtctggtcgcgggggaaaccgcacagcagatctgcgaggacctgcgg

SEQ ID NO: 165067 - DNA, 288 bp, Artificial Sequence
  derived and/or modified sequence
atggctacctgggctttgttgctgctcgcagcgatgctccttggtaacccaggtcttgtattctccggacgtgactatcgaacttgccttactattgtgcaaaagctaaaaaagatggtggataagccaacacagcggtccgtttccaatgcagccactcgtgtttgtaggaccgggaggtccaggtggagggatgtttgtcgtaatttcatgcgtaggtaccagtccagggtaacccagggtttggttgccggagaaactgctcaacagatctgtgaagacctccga

SEQ ID NO: 165068 - DNA, 288 bp, Artificial Sequence
  derived and/or modified sequence
atggcaacatgggcacttctgttacttgctgcaatgctacttggaaatccagggctagtgttttcagggcgggattacaggacttgtctcactatcgtccaaaaattaaagaaaatggtcgacaaacccacacagcggagtgtgtctaacgcagctacacgcgtatgtagaacagggaggtccagatggagggatgtttgtagaaattttatgcgtaggtaccagtctcgggtcacacagggactggtagcaggagaaacagctcagcagatctgcgaggatttaaga

SEQ ID NO: 165069 - DNA, 288 bp, Artificial Sequence
  derived and/or modified sequence
atggctacctgggcactccttctgctggccgccatgctcctcggtaatccagggctggtgttttccgggagggactaccggacgtgcctgaccatagtgcaaaaacttaagaagatggtggacaaacccactcaaagaagcgtcagcaacgccgcaacgagagtctgtcgaaccggtagaagcaggtggcgggatgtgtgtcggaacttcatgaggagataccagtcgagagtgacccaaggccttgtggctggagaaaccgcacaacaaatttgtgaagatctgcga

SEQ ID NO: 165070 - DNA, 288 bp, Artificial Sequence
  derived and/or modified sequence
atggcaacttgggcactgctcctcttggccgccatgttactgggcaatcctggactagtgttctctgggagggactatagaacctgcttgacaattgtccagaagctgaaaaaaatggtggataagcctacgcagcggagcgtcagtaacgcggcaacgcgcgtctgccggacgggtagaagtcgctggcgtgatgtgtgccgcaattttatgcgacggtaccagtcgcgagtcacccagggcttggttgcgggcgagacggctcaacagatctgcgaggatcttcgg

SEQ ID NO: 165071 - DNA, 288 bp, Artificial Sequence
  derived and/or modified sequence
atggccacctgggctctgctgctgctggcagcaatgctcctggggaatcccggcctggtcttcagcggccgggactaccgaacatgcctcacaatcgtgcagaaactcaagaaaatggtggacaagccaacgcaaagatcagtgagcaatgccgcaaccagggtgtgccggaccgggcgctcaaggtggcgtgatgtgtgccgaaatttcatgaggcggtaccagtcccgtgtcactcaaggactcgtcgctggcgagaccgcccaacaaatctgtgaagatctgagg

SEQ ID NO: 165072 - DNA, 288 bp, Artificial Sequence
  derived and/or modified sequence
atggccacatgggcactgctgcttctggccgccatgctgctggggaatcctgggctggtcttcagcggtcgtgattataggacctgtctgacaatcgttcagaaattgaagaaaatggtggataaacccacccagagaagtgtttctaacgccgcgacccgagtgtgtcgtaccggacgttccaggtggcgggacgtatgccgaaactttatgcgcagatatcagagtcgtgtaacccagggcctagtggcaggcgagacagcccagcagatatgtgaggatctgcgg

SEQ ID NO: 165073 - DNA, 288 bp, Artificial Sequence
  derived and/or modified sequence
atggcgacctgggccctgttgctactcgcagctatgctgctcggtaaccccggcctcgttttctcgggtcgtgactaccgtacctgcctgacgatcgtccagaaactaaagaagatggtcgacaagcccacacagcggtcggtgtccaacgctgctacgcgggtgtgccgcactggccgcagcagatggcgtgacgtttgtcgcaacttcatgcgtcgataccagagtcgtgttactcaggggttggtcgccggggagaccgcgcagcaaatttgtgaagacttgcgc

SEQ ID NO: 165074 - DNA, 288 bp, Artificial Sequence
  derived and/or modified sequence
atggccacgtgggcattgcttctgcttgcagcaatgctcctgggcaatccggggctcgtgtttagcggtcgagactaccgtacctgtctcaccattgtgcaaaagctgaagaagatggtggataaacccacgcagaggtccgtctcgaatgcagcgactcgagtgtgtaggaccggacgcagccgctggagagatgtgtgccgaaatttcatgcgaagataccagtcacgggtcacccagggactggtggcgggcgaaaccgcccaacaaatatgcgaagatctgcgg

SEQ ID NO: 165075 - DNA, 288 bp, Artificial Sequence
  derived and/or modified sequence
atggctacgtgggcgctgctgctgctcgctgctatgctgcttggaaaccctggtcttgtcttctcaggaagggattacaggacatgtctgaccatcgttcaaaaactgaagaaaatggtggacaagcccactcagaggagcgtcagcaacgccgctacaagggtgtgtaggacgggtaggagcagatggagagatgtctgcagaaacttcatgaggcgctaccaatcccgcgtgacccagggccttgttgcaggtgaaacggcacagcaaatctgtgaggatcttagg

SEQ ID NO: 165076 - DNA, 288 bp, Artificial Sequence
  derived and/or modified sequence
atggctacgtgggccctgctgttactggcggctatgttgcttggtaatccaggtctggtgttttcaggacgggactaccgaacttgtcttaccatcgttcagaaactgaaaaagatggtagataagccgacccagcgatccgtctcaaatgctgccactcgcgtgtgcagaactggccgcagccggtggagggacgtttgtagaaactttatgcgcagataccaaagcagagtgacacagggtctggtggctggtgagaccgcgcagcagatctgcgaagatctgaga

SEQ ID NO: 165077 - DNA, 288 bp, Artificial Sequence
  derived and/or modified sequence
atggcaacctgggcactgctgttattagccgccatgctgctcggcaaccctgggctcgtctttagcggacgagactataggacctgcctgacaattgttcagaagctgaagaagatggtcgataagcctacacagaggagcgtcagtaacgcggcaacacgggtatgtagaacagggagaagtcggtggagagatgtctgccgcaattttatgaggagataccagtctcgggtgacccaggggcttgttgcaggcgagacagcccaacagatttgtgaggatttgcgc

SEQ ID NO: 165078 - DNA, 288 bp, Artificial Sequence
  derived and/or modified sequence
atggctacctgggctctcctgctccttgcagcaatgctgctaggtaacccaggactggttttctcaggcagggactatcgcacttgcttgaccatagtgcagaagctgaaaaagatggtggataaaccaacccagaggagcgttagtaatgctgccacccgggtctgccggaccgggcgatcccgatggcgcgacgtgtgccggaattttatgcgccggtatcaaagtcgggtaacacagggtctggtggccggggaaacggcccagcaaatttgtgaggaccttcgc

SEQ ID NO: 165079 - DNA, 288 bp, Artificial Sequence
  derived and/or modified sequence
atggccacgtgggcactgctcttgctagccgcaatgctgctcggcaaccctggtctcgtgttttccgggagagactaccgcacctgcttaaccattgttcagaaactaaagaaaatggtggataagcccacgcagagatccgtaagcaacgcagccacaagggtttgcagaacaggacgcagtcgttggcgtgacgtctgcagaaacttcatgcgccggtaccaatcccgagtgacgcaggggctggtggcaggcgagacggcccagcagatttgcgaggatttgaga

SEQ ID NO: 165080 - DNA, 288 bp, Artificial Sequence
  derived and/or modified sequence
atggcaacctgggccctgctgctacttgctgccatgctcctgggcaatcccggccttgtgttctccgggcgggattacaggacatgtcttacaatcgtccaaaaactcaaaaaaatggtggataaacctacacagcggtctgtatcgaatgctgcaacacgtgtctgtcggaccgggagatctcgatggagggatgtatgccgcaacttcatgagaaggtaccagtcgcgagtgacccagggcctcgttgctggcgaaaccgctcagcagatttgtgaggacctgagg

SEQ ID NO: 165081 - DNA, 288 bp, Artificial Sequence
  derived and/or modified sequence
atggcgacttgggcgctcctgcttctggccgccatgctcctgggtaacccaggactggtgttctcaggaagggactaccgcacttgcctgaccatcgtccagaaacttaagaagatggtcgataaacctactcagcgctctgtctccaatgcggcaacccgcgtctgtcgcaccggacggagccggtggcgagacgtgtgtcgcaacttcatgcgccggtatcagagccgcgtgacccaaggactggtggcaggcgagactgcgcagcaaatctgcgaggatttgcga

SEQ ID NO: 165082 - DNA, 288 bp, Artificial Sequence
  derived and/or modified sequence
atggcgacatgggctctgctgcttctcgcggcgatgctcctcggcaatcccggcctggtgttttcgggacgggattaccgcacatgcctgactatcgtacagaagctgaaaaaaatggttgacaagccgactcagcggagcgtgagcaatgccgccacgcgcgtgtgtcgtacaggtcgcagccgatggcgcgatgtgtgtcgaaacttcatgcgccgttaccaatcacgggtgacgcagggcctggtggccggtgagacagctcagcaaatttgcgaggatctgaga

SEQ ID NO: 165083 - DNA, 288 bp, Artificial Sequence
  derived and/or modified sequence
atggcaacatgggcccttctccttctggctgcgatgcttctggggaatcctggacttgtcttttccggtagggactatagaacatgcctgacaatcgtgcagaaactgaagaagatggtcgacaagccaacacagcggtcagtctccaacgccgcaactcgggtgtgccgtactggtaggagtcgctggagagatgtctgcaggaacttcatgcgcagataccagagtcgagttactcagggcctggtggccggggagaccgcgcaacagatatgtgaggacttgcga

SEQ ID NO: 165084 - DNA, 288 bp, Artificial Sequence
  derived and/or modified sequence
atggcaacctgggcgctgttactcctagcagctatgttattgggcaatcccgggctagtctttagtggtagagattatcgtacgtgcctgacaattgtccaaaagttaaagaaaatggtggacaagcccacccagcgctccgtgtcaaatgcagcaactcgggtttgtagaaccggccgctcccgctggagagacgtgtgcaggaactttatgcggcgttatcagagtagagttacccaagggttagtggccggagaaactgctcagcagatatgcgaagacttgaga

SEQ ID NO: 165085 - DNA, 288 bp, Artificial Sequence
  derived and/or modified sequence
atggcaacttgggctttgctgctgcttgcggcaatgcttctcggtaaccctggacttgtcttttcgggtagagactacagaacttgcctgaccatcgtgcaaaagctgaaaaagatggtcgacaagcctacccagcgctcagtttctaacgcagcaaccagagtctgtcgcaccggtcgatcgagatggcgcgatgtgtgtagaaatttcatgcgccggtaccaatcgagggtgactcagggtctggtggcgggtgaaactgcacagcaaatttgtgaagatctcaga

SEQ ID NO: 165086 - DNA, 288 bp, Artificial Sequence
  derived and/or modified sequence
atggccacctgggctttgcttcttttggccgcaatgctcttgggaaaccctggactggttttttcgggtagagattaccgcacttgtctgaccattgtccaaaaactcaagaagatggtggataagccaactcagcggtccgtgtcgaacgctgcgacccgcgtttgccgcactgggcgatcacggtggagggatgtgtgtcgaaatttcatgcgtaggtaccaaagccgagtgacccaaggccttgtcgcgggtgaaacggcacagcagatctgtgaggaccttcgc

SEQ ID NO: 165087 - DNA, 288 bp, Artificial Sequence
  derived and/or modified sequence
atggctacttgggctttattacttttagctgcaatgcttcttggtaatccaggacttgttttttctggtcgtgattatagaacatgtttaactattgttcaaaaattaaagaaaatggtagataaacctacacaaagatcagtttcaaatgcagcaactagagtgtgtcgtactggacgatctagatggagagatgtttgtcgtaactttatgagaagatatcaatcaagagtcacacaaggattagttgcaggagaaacagcacaacaaatttgtgaagatcttaga

SEQ ID NO: 165088 - DNA, 288 bp, Artificial Sequence
  derived and/or modified sequence
atggcaacctgggcccttcttttgctcgcagccatgctgttgggaaacccaggtcttgtcttttcaggtcgggattacaggacctgtcttactatcgtgcagaagctgaaaaagatggtggacaaacctactcaaagatcggtaagtaatgccgctacgagggtctgtcgcaccggccgctccagatggcgggatgtgtgccggaactttatgcgcagataccagtcgcgtgtcactcaaggactcgtggctggagaaaccgcgcagcaaatttgtgaggatttgaga

SEQ ID NO: 165089 - DNA, 288 bp, Artificial Sequence
  derived and/or modified sequence
atggcaacctgggcacttctccttctggcagcgatgttgctgggcaaccctgggcttgtcttttcaggtcgtgattacagaacttgtcttactatcgtacagaagctcaagaagatggtggataaaccgacccaacgctctgtctcgaatgccgctacccgggtgtgccgaaccggaagatcacgttggagagacgtctgtagaaacttcatgagaagataccagtccagggtgacgcagggcttggtagccggagagacggcacaacaaatttgcgaagatctcaga

SEQ ID NO: 165090 - DNA, 288 bp, Artificial Sequence
  derived and/or modified sequence
atggccacctgggcgttgcttctgctcgctgcgatgctcctgggtaatccgggcctcgttttcagcggacgcgactaccggacctgcctcaccatcgtgcagaagttgaagaaaatggtggataagccgactcaacggagcgtttcgaatgcggcgactcgggtgtgcagaaccggaagatcgaggtggcgcgatgtgtgccgcaatttcatgcggagataccagtccagggtgacgcaaggcctggtggccggtgagacggcccagcagatctgcgaggacctgcgc

SEQ ID NO: 165091 - DNA, 288 bp, Artificial Sequence
  derived and/or modified sequence
atggccacctgggcactgctcctcctcgcggccatgctgctgggaaacccgggcctggtgttctcgggacgagactaccgtacctgcttgaccatcgtgcagaagctcaaaaagatggtggataaaccaactcagcgctcggtttccaacgccgctacgcgcgtgtgcaggactggacggtcaaggtggcgggacgtctgcaggaatttcatgcgtcgctaccagtctcgggtgactcaaggattggtcgccggggaaaccgcccaacagatctgtgaggatctgcgc

SEQ ID NO: 165092 - DNA, 288 bp, Artificial Sequence
  derived and/or modified sequence
atggcaacttgggcactgcttcttttggcagcaatgcttctgggaaacccagggctggtgttttcgggtagggactataggacttgtctgaccattgtgcaaaagctcaagaagatggtggacaagccgacccagaggtcggtgtccaatgccgcgacccgagtctgccggaccggaagaagccggtggagagacgtgtgtagaaacttcatgagacgctaccagtccagagtcactcagggactggtggcaggggagactgcacagcaaatatgtgaagatctgcgg

SEQ ID NO: 165093 - DNA, 288 bp, Artificial Sequence
  derived and/or modified sequence
atggcaacttgggctcttttgcttttggcagctatgctacttggaaaccctgggctggtgttttcagggcgagattataggacttgtcttacaattgtacagaagctaaaaaaaatggttgataaacctacacagcggtctgtatcaaacgccgctacaagggtttgtaggacagggcgctcacgttggagagatgtctgtcggaattttatgagacggtatcagtcacgggtgacacagggactagtggctggagaaactgcgcagcaaatatgtgaagatcttcga

SEQ ID NO: 165094 - DNA, 288 bp, Artificial Sequence
  derived and/or modified sequence
atggcgacttgggccctcttgctcctcgcagcaatgctgcttggaaatccaggattggtcttttctggaagggactaccgtacctgcctgactatcgtccagaagctgaagaagatggtggacaaaccgactcagcgctccgtctccaacgctgccacccgagtgtgtagaaccggcagatcaagatggcgcgacgtatgcagaaacttcatgcgccgctaccagagtcgggtgacccaaggtctggtggccggggagacggcacagcaaatctgcgaagatctccgc

SEQ ID NO: 165095 - DNA, 288 bp, Artificial Sequence
  derived and/or modified sequence
atggcaacctgggcccttttgctgctcgcggctatgctccttgggaacccgggactggtcttttcaggccgggattaccgcacgtgtctgactatcgtacagaagctgaagaaaatggtggacaagcctactcagcgctcggtgtccaacgccgccactagagtttgcaggaccggtcggagcagatggcgtgatgtctgccgcaatttcatgcgaaggtaccaatcgcgagtgacccagggcctggtggcaggagaaaccgcgcagcaaatctgcgaggacctcaga

SEQ ID NO: 165096 - DNA, 288 bp, Artificial Sequence
  derived and/or modified sequence
atggctacttgggctctgctcctgcttgcggccatgcttctgggaaacccgggcctggtgttctccggtcgcgattacaggacctgtctgactatcgtgcaaaagctcaaaaagatggtcgacaagcctacgcaaaggtctgtgagcaatgccgccaccagagtgtgtcgcactggtaggtcccgctggagagacgtgtgccgcaatttcatgcggcggtaccagtcccgcgtgacccagggtcttgtggcaggggaaaccgcgcagcagatttgcgaggacctgcgg

SEQ ID NO: 165097 - DNA, 288 bp, Artificial Sequence
  derived and/or modified sequence
atggcaacatgggcgctgctgcttctcgcagctatgttgcttggcaatccaggacttgtattcagcggccgcgattatcggacctgtttgaccatagtgcagaagctgaagaagatggtagacaagcccacccagaggtcagtgagcaatgccgccacccgtgtctgcaggactgggcgttcacggtggagagacgtatgccggaacttcatgaggagatatcagagcagagtaacacaggggttagtggcgggtgaaactgctcagcagatctgcgaagaccttaga

SEQ ID NO: 165098 - DNA, 288 bp, Artificial Sequence
  derived and/or modified sequence
atggctacttgggccctgcttcttttagcggctatgttactcggcaaccctggactggtgttttctggtagggactacaggacttgtctgacgatcgtgcagaaactgaaaaaaatggtggataagccaacgcaaagatctgtttcaaacgctgccactcgcgtgtgtcgcaccggacgcagtcgctggcgcgacgtctgtcgcaactttatgagaagataccagagccgcgtgacccagggcctcgtggctggggagacagcgcagcagatttgcgaggatctgaga

SEQ ID NO: 165099 - DNA, 288 bp, Artificial Sequence
  derived and/or modified sequence
atggctacctgggcacttctgctactcgcagccatgctgctgggaaatcctgggctagtgttcagtggacgggattaccgaacctgcctgacaatcgtgcagaagctgaagaaaatggtggacaaacccactcagcggagcgtgtcaaacgcagccacccgcgtgtgccggaccggacgctccagatggagagacgtttgcaggaactttatgaggcgttaccaatcccgggtgacacagggacttgtagccggcgaaaccgcacaacagatatgtgaagatttaaga

SEQ ID NO: 165100 - DNA, 288 bp, Artificial Sequence
  derived and/or modified sequence
atggcgacctgggcactcctgctgctggcagccatgcttctggggaatccaggactggtgttttcaggacgggactaccgaacctgtctgaccatagtccagaagctgaagaagatggtcgataaacctactcagcgaagcgtgtcgaacgccgccactcgcgtgtgcagaactgggcgttcccgatggagggatgtgtgccgtaactttatgaggcggtaccaatcgcgggtcacccaaggacttgtggcgggagaaactgcacaacaaatttgcgaagatctgaga

SEQ ID NO: 165101 - DNA, 288 bp, Artificial Sequence
  derived and/or modified sequence
atggccacgtgggcactgctgttgttggcagcgatgctgctgggtaatccgggcctggtgttctccggccgcgactacaggacgtgcttgacgatcgtgcaaaaattgaagaaaatggtggacaagcccactcaacgctctgtgtcgaatgccgccacccgggtgtgcagaacaggccgaagccgctggcgagatgtttgcaggaacttcatgcgccggtaccagagccgagtcacgcagggtctggttgcaggcgaaactgcgcagcagatctgtgaggacctacga

SEQ ID NO: 165102 - DNA, 288 bp, Artificial Sequence
  derived and/or modified sequence
atggccacctgggcccttctcctgctggcagcaatgctcctgggaaacccgggactggtgttctcgggacgcgattacagaacctgcctcactatcgtgcagaagctgaagaaaatggttgataagccaacccagcggagcgtgtcgaacgctgcgactcgggtctgccgcactgggcgctcaagatggagggacgtgtgccggaattttatgaggcgataccaatcccgcgtgacccaaggcttggtcgcgggtgaaacggcccagcagatctgtgaggacctgcgg

SEQ ID NO: 165103 - DNA, 288 bp, Artificial Sequence
  derived and/or modified sequence
atggcaacctgggccctgctgcttttggctgccatgctgttgggcaacccaggactcgtcttttcgggtagggactaccgcacttgtctcaccattgtccaaaagctgaagaaaatggtcgataagcctactcaacggtccgtcagcaacgcggccacccgcgtgtgtagaactggtcgcagccggtggagagacgtgtgtcggaactttatgcgccggtaccagtcgagagtgacccaaggactggtcgcaggagagacggcacaacagatctgtgaagatctgcgg

SEQ ID NO: 165104 - DNA, 288 bp, Artificial Sequence
  derived and/or modified sequence
atggccacttgggcactgctgcttctggccgcgatgcttctcggcaatccagggctggtgttctctggcagagactaccgcacttgcctgacgatcgtgcaaaaactgaagaagatggtggacaaaccgacccagcggtcagtctccaacgcggcgacccgtgtgtgtcgcacgggacggtcccgctggcgggatgtctgtagaaacttcatgcgccgctaccagtcgcgggtgactcagggcctggtggctggagaaaccgcacaacaaatctgcgaggacctgcgc

SEQ ID NO: 165105 - DNA, 288 bp, Artificial Sequence
  derived and/or modified sequence
atggccacatgggcactgctgctgctcgcggcgatgctgcttggtaacccaggccttgtgttctctggtcgagactataggacttgcctgaccatagttcaaaaactgaaaaaaatggtcgacaagcccacccagcgcagcgtgtcaaatgctgcaacaagggtttgccggacaggcagaagccggtggagggacgtgtgccgaaatttcatgcgaagatatcagtctcgcgtgactcaagggctggtcgcaggtgaaactgcccagcagatctgtgaagacctccgc

SEQ ID NO: 165106 - DNA, 288 bp, Artificial Sequence
  derived and/or modified sequence
atggccacctgggccctgcttctgcttgcagcgatgctgctcgggaatccgggactggtgttctcgggaagagactaccgaacttgtctcaccatcgtgcagaagctgaagaagatggtcgacaaacccacccagcggagcgtgtccaatgcggccacgcgcgtctgtagaactggacggagccgttggcgcgacgtctgcaggaacttcatgcgcaggtatcagtcaagggtcacccagggattggtggctggcgaaaccgcacaacaaatctgcgaggatctgcgg

SEQ ID NO: 165107 - DNA, 288 bp, Artificial Sequence
  derived and/or modified sequence
atggccacatgggctctgctattgttggcagccatgcttctgggcaacccaggcttagtgttttctgggcgggattacaggacatgtctgacgattgtgcagaagctgaaaaaaatggtcgacaagcctacacaacgctccgtgtccaacgccgccactcgtgtgtgtcgtacagggagatcaagatggagagatgtgtgtcggaactttatgcggcgctatcagagccgtgttacccaaggtctcgttgctggtgagacagcgcaacagatctgcgaagatctaagg

SEQ ID NO: 165108 - DNA, 288 bp, Artificial Sequence
  derived and/or modified sequence
atggccacttgggcgttgctccttctggccgcaatgctgctggggaaccctggcctcgtgttctccgggcgggactacaggacctgtctcactatcgttcagaaactcaaaaaaatggtggacaagccgactcaaagaagcgtgagcaacgccgccacgcgggtttgtagaacaggacgctcacgatggcgagacgtctgccgcaattttatgcggcggtaccagagccgcgtgactcagggcctcgtcgcgggtgagaccgcccagcagatctgcgaggacttgaga

SEQ ID NO: 165109 - DNA, 288 bp, Artificial Sequence
  derived and/or modified sequence
atggccacatgggccctgttgctgctggccgctatgctactgggtaatcccggcctcgtgttttccgggagggactaccggacttgtcttactatcgtacagaagcttaagaagatggtagacaagcctacgcagagatctgtaagtaatgccgctacccgcgtgtgtcggacaggacggagccgatggcgcgatgtgtgtcgcaattttatgagaaggtatcaaagccgggtgactcagggcttggtggcaggagagacagcacagcagatttgtgaggatctgcgg

SEQ ID NO: 165110 - DNA, 288 bp, Artificial Sequence
  derived and/or modified sequence
atggccacatgggcactactgctactcgcggcaatgctcctgggaaatcctgggttagttttttctgggcgcgactacagaacatgtctgactattgtgcagaaactgaagaaaatggtggacaaacctacgcagcggtcggtgtcaaacgccgccactagggtgtgccgcaccggtcggagccgatggcgggacgtgtgtcgaaacttcatgcgaaggtaccagtctcgcgtgacccagggactggtggcaggggagactgcccaacagatatgcgaagacctgaga

SEQ ID NO: 165111 - DNA, 288 bp, Artificial Sequence
  derived and/or modified sequence
atggcaacgtgggccctgcttcttcttgcagccatgctgctcggaaacccaggattggtgttttcaggtcgtgactatcgtacttgccttactatagtgcagaaactgaagaaaatggtcgataagcctacccaaagaagcgtgtccaacgcggcaactcgcgtgtgtcggaccggacggtcacgatggcgggacgtgtgtagaaatttcatgagacggtaccaatcacgggtcacgcaaggtctggtggcgggcgagactgcacaacaaatttgtgaagatttgcgc

SEQ ID NO: 165112 - DNA, 288 bp, Artificial Sequence
  derived and/or modified sequence
atggcgacgtgggcgttactattattagcggcgatgctattaggtaatccgggtttagttttttcgggtcgagattatcgtacgtgtttaacgatagtacaaaaactaaaaaaaatggtagataaaccgacgcaacgatcggtatcgaatgcggcgacgcgtgtttgtcgaacgggtcgttcgcgttggcgagatgtatgtcgtaattttatgcgacgatatcaatcgcgtgttacgcaaggtctagttgcgggtgaaacggcgcaacaaatatgtgaagatttacga

SEQ ID NO: 165113 - DNA, 288 bp, Artificial Sequence
  derived and/or modified sequence
atggccacctgggcacttttgctcctggctgccatgctgctcggaaatccgggccttgtgttttccggtcgggattatagaacctgtctcactattgtgcaaaagttgaagaagatggtcgataaacctacgcagcgctccgtgtccaacgctgcaactcgggtctgtcgaactgggagatcccggtggcgagacgtttgtcggaacttcatgagaaggtaccagtcacgggtgacccaaggactcgtggcaggtgagacggcgcaacagatctgcgaggacctccgc

SEQ ID NO: 165114 - DNA, 288 bp, Artificial Sequence
  derived and/or modified sequence
atggccacatgggcactcctgctgctcgccgccatgttgctcgggaaccccggcttagtattctccggaagagattaccggacatgcctcaccatcgtccagaagctgaagaagatggtcgacaagcccactcagaggtccgtgtctaatgctgctactagggtctgcagaacaggaaggtctcggtggagagacgtgtgcagaaacttcatgaggcgatatcagtctcgagtgacacagggactggtggctggcgaaactgcacagcagatctgcgaggacctaaga

SEQ ID NO: 165115 - DNA, 435 bp, Artificial Sequence
  derived and/or modified sequence
atggccacctgggccctgctgctgctggccgccatgctgctgggcaaccccggcctggtgttcagccgcctgagccccgagtactacgacctggcccgcgcccacctgcgcgacgaggagaagagctgcccctgcctggcccaggagggcccccagggcgacctgctgaccaagacccaggagctgggccgcgactaccgcacctgcctgaccatcgtgcagaagctgaagaagatggtggacaagcccacccagcgcagcgtgagcaacgccgccacccgcgtgtgccgcaccggccgcagccgctggcgcgacgtgtgccgcaacttcatgcgccgctaccagagccgcgtgacccagggcctggtggccggcgagaccgcccagcagatctgcgaggacctgcgcctgtgcatccccagcaccggccccctg

SEQ ID NO: 165116 - DNA, 288 bp, Artificial Sequence
  derived and/or modified sequence
atggccacctgggccctgctgctgctggccgccatgctgctgggcaaccccggcctggtgttcagcggccgcgactaccgcacctgcctgaccatcgtgcagaagctgaagaagatggtggacaagcccacccagcgcagcgtgagcaacgccgccacccgcgtgtgccgcaccggccgcagccgctggcgcgacgtgtgccgcaacttcatgcgccgctaccagagccgcgtgacccagggcctggtggccggcgagaccgcccagcagatctgcgaggacctgcgc

SEQ ID NO: 165117 - DNA, 624 bp, Artificial Sequence
  derived and/or modified sequence
taatacgactcactatagggaaataagagagaaaagaagagtaagaagaaatataagagccaccatggctacctgggccctcctgctccttgcagccatgctcctgggcaacccaggtctggtcttctctcgtctgagccctgagtactacgacctggcaagagcccacctgcgtgatgaggagaaatcctgcccgtgcctggcccaggagggcccccagggtgacctgttgaccaaaacacaggagctgggccgtgactacaggacctgtctgacgatagtccaaaaactgaagaagatggtggataagcccacccagagaagtgtttccaatgctgcgacccgggtgtgtaggacggggaggtcacgatggcgcgacgtctgcagaaatttcatgaggaggtatcagtctagagttacccagggcctcgtggccggagaaactgcccagcagatctgtgaggacctcaggttgtgtataccttctacaggtcccctctgataataggctggagcctcggtggccatgcttcttgccccttgggcctccccccagcccctcctccccttcctgcacccgtacccccgtggtctttgaataaagtctgagtgggcggctctaga

SEQ ID NO: 165118 - DNA, 601 bp, Artificial Sequence
  derived and/or modified sequence
gggaaataagagagaaaagaagagtaagaagaaatataagagccaccatggcaacttgggccctgctgcttcttgcagccatgttgctcggaaatcctggtctggtgttttcgcgcctttcaccggagtactacgatctcgctcgcgcacatctgcgcgacgaggagaagtcgtgcccatgtctcgcacaagaagggccacagggtgaccttttgaccaagacgcaagaacttggcagggactaccgaacctgtctgaccatcgtgcaaaagctgaagaaaatggtcgataaacctacccaaagaagcgtgtccaacgcagcgactcgggtgtgccggactggcagatccagatggcgggatgtgtgtagaaacttcatgagaaggtaccagagccgtgttactcagggactggtcgcgggagaaactgcccaacagatttgcgaagatctgcgactctgtattccttcaaccggacccctttgataataggctggagcctcggtggccatgcttcttgccccttgggcctccccccagcccctcctccccttcctgcacccgtacccccgtggtctttgaataaagtctgagtgggcggc

SEQ ID NO: 165119 - protein, 164 aa, Artificial Sequence
  derived and/or modified sequence
MNHIVQTFSPVNSGQPPNYEMLKEEQEVAMLGVPHNPAPPMSTVIHIRSETSVPDHVVVPVQHPLHECCLGFIAFAYSVKSRDRKMVGDVTGAQALHRQVPEHLGPDFGHLHDHSAHHHPSVGRPGPAIDQEASLRPGALPVTCIPRTLSSIPRPAPRGQELCP

SEQ ID NO: 165120 - protein, 132 aa, Artificial Sequence
  derived and/or modified sequence
MNHIVQTFSPVNSGQPPNYEMLKEEQEVAMLGVPHNPAPPMSTVIHIRSETSVPDHVVWSLFNTLFMNTCCLGFIAFAYSVKSRDRKMVGDVTGAQAYASTAKCLNIWALILGIFMTILLIIIPVLVVQAQR

SEQ ID NO: 165121 - DNA, 495 bp, Artificial Sequence
  derived and/or modified sequence
atgaatcacattgtgcagacgttttcacctgtgaattccgggcagccacccaactacgaaatgctcaaggaagagcaggaggttgccatgttaggggtcccacacaatcctgctccacccatgagtactgtgatccacattcggtccgaaacttccgtccctgatcatgtagtggtgccagtgcagcacccacttcacgagtgctgcttaggctttatcgcctttgcttactccgtgaaatcacgggacagaaagatggttggcgacgttacaggagcacaggcattgcacaggcaagtgcccgaacatctgggaccagactttggacatctacacgaccattctgctcaccaccacccctctgttggacgacctggacctgcaatcgaccaggaggctagcctgcggcctggcgccttacccgtgacatgcattcctcgcactctcagctccattccaagacccgctccccggggccaggagctgtgtccatag

SEQ ID NO: 165122 - DNA, 399 bp, Artificial Sequence
  derived and/or modified sequence
atgaaccacatcgttcagaccttctccccagtgaactcagggcagccaccgaactacgagatgctaaaggaggaacaagaagtggcaatgttaggggtgccccacaatccagctcctcccatgtctaccgtgattcatatccggtccgaaacctctgtgcccgatcacgtggtgtggtcactgtttaacactctgtttatgaacacgtgttgcctgggatttatcgcatttgcctacagcgtcaagagtcgtgaccggaagatggtcggcgacgtgacaggggctcaggcatacgcatctacagcgaagtgcctcaatatttgggctttaatattaggcatcttcatgacaattctgctgatcattatcccagttctggtcgttcaagcccaaaggtag

SEQ ID NO: 165123 - DNA, 648 bp, Artificial Sequence
  derived and/or modified sequence
atcccggtaacccgatcaccgctggtcaccatgaaccacattgtgcaaaccttctctcctgtcaacagcggccagcctcccaactacgagatgctcaaggaggagcaggaagtggctatgctgggggtgccccacaaccctgctcccccgatgtccaccgtgatccacatccgcagcgagacctccgtgcctgaccatgtggtcgtccctgttcaacaccctcttcatgaatgctgcctgggcttcatagcattcgcgtactccgtgaagtctagggacaggaagatggttggcgacgtgaccggggcccaggccctccaccgccaagtgcctgaacatctgggccctgattttgggcatcttcatgaccattctgctcatcatcatcccagtgttggtcgtccaggcccagcgatagatcaggaggcatcattgaggccaggagctctgcccgtgacctgtatcccacgtactctatcttccattcctcgccctgcccccagaggccaggagctctgcccttgacctgtattccacttactccaccttccattcctcgccctgtccccacagccgagtcctgcatcagccctttatcctcacacgcttttctacaatggcattcaataaagtgtatatgtttctggt

SEQ ID NO: 165124 - DNA, 659 bp, Artificial Sequence
  derived and/or modified sequence
atcccggtaacccgatcaccgctggtcaccatgaaccacattgtgcaaaccttctctcctgtcaacagcggccagcctcccaactacgagatgctcaaggaggagcaggaagtggctatgctgggggtgccccacaaccctgctcccccgatgtccaccgtgatccacatccgcagcgagacctccgtgcctgaccatgtggtctggtccctgttcaacaccctcttcatgaacacctgctgcctgggcttcatagcattcgcgtactccgtgaagtctagggacaggaagatggttggcgacgtgaccggggcccaggcctatgcctccaccgccaagtgcctgaacatctgggccctgattttgggcatcttcatgaccattctgctcatcatcatcccagtgttggtcgtccaggcccagcgatagatcaggaggcatcattgaggccaggagctctgcccgtgacctgtatcccacgtactctatcttccattcctcgccctgcccccagaggccaggagctctgcccttgacctgtattccacttactccaccttccattcctcgccctgtccccacagccgagtcctgcatcagccctttatcctcacacgcttttctacaatggcattcaataaagtgtatatgtttctggt

SEQ ID NO: 165125 - DNA, 495 bp, Artificial Sequence
  derived and/or modified sequence
atgaaccacatcgtgcagaccttcagccctgtgaacagcggccagccccccaactatgagatgctgaaggaggagcaggaggtggccatgctgggcgtgccccacaacccagccccacccatgagcaccgtcatccacatccgctctgagacctctgtgcctgaccacgtggtggtgcctgtgcagcaccccctgcacgagtgctgcctgggcttcatcgcctttgcctacagcgtgaagagccgggacaggaagatggtgggagatgtgactggagcccaggccctgcaccggcaggtgcctgagcacctgggccctgactttggccacctgcatgaccacagcgcccaccaccaccccagcgtgggccggcccggccctgccatcgaccaggaggccagcctgcggcctggggccctgcctgtgacctgcatccccaggaccctgagcagcatccccaggcctgccccccggggccaggagctgtgcccctag

SEQ ID NO: 165126 - DNA, 399 bp, Artificial Sequence
  derived and/or modified sequence
atgaaccacatcgtgcagaccttcagccctgtgaacagcggccagccccccaactatgagatgctgaaggaggagcaggaggtggccatgctgggcgtgccccacaacccagccccacccatgagcaccgtcatccacatccgctctgagacctctgtgcctgaccacgtggtgtggagcctcttcaacaccctcttcatgaacacctgctgcctgggcttcatcgcctttgcctacagcgtgaagagccgggacaggaagatggtgggagatgtgactggagcccaggcctatgccagcacagccaagtgcctgaacatctgggccctgatcctgggcatcttcatgaccatcctgctgatcatcatccctgtgctggtggtgcaggcccagaggtag

SEQ ID NO: 165127 - DNA, 495 bp, Artificial Sequence
  derived and/or modified sequence
atgaaccacatcgtgcagaccttcagccccgtgaacagcggccagccaccgaactacgaaatgttaaaagaggagcaggaggttgctatgctaggcgtgccgcataacccagccccccctatgtctaccgtaatccacattagatcggaaacatcggtgcctgatcacgtcgtcgttcccgtacagcatcctctgcatgagtgctgtctgggctttattgcattcgcctattctgtgaagagcagggacaggaagatggtcggcgacgtgacaggagcacaagcgctgcatcggcaagttcctgaacacctgggtccggactttggacatttgcacgatcattcggctcatcaccatccttcagtgggcaggccaggacccgccattgaccaggaagcctcattgcgacctggtgctcttcccgtcacttgcatacccagaacgctatcctcgatacctcgaccagcacctcgcggccaagaactatgcccatag

SEQ ID NO: 165128 - DNA, 399 bp, Artificial Sequence
  derived and/or modified sequence
atgaaccacatcgtgcagaccttcagccccgtgaacagcggccagccgcctaactacgaaatgctgaaggaggagcaggaggtggcaatgctgggtgtgccccacaacccggctccccccatgagcactgttatacacatacgttcagaaacatccgttcccgatcacgtggtatggtctctttttaatactctattcatgaacacttgctgcctggggtttatcgcattcgcttactctgtcaagtcccgcgatagaaagatggtaggagatgtcaccggggctcaagcgtatgcaagcacagctaaatgcctcaatatttgggccttaatcctagggatctttatgaccattctgttgattatcattccagtgctagtggtgcaggcccagagatag

SEQ ID NO: 165129 - DNA, 495 bp, Artificial Sequence
  derived and/or modified sequence
atgaatcacatcgttcagaccttctccccggtgaacagcggccagccacctaattatgagatgctaaaagaggagcaagaagtcgccatgctgggagtgccccacaaccctgcgccaccaatgtctaccgtgatccacattcgaagcgagacatccgtgccagaccacgttgttgtgcctgttcagcatccgttgcacgaatgctgtctgggctttatcgcattcgcatactctgtaaaatcccgggaccgaaagatggtgggggacgtaacaggcgctcaggctctgcatcgacaagtaccagaacatctaggccctgactttggccacctacatgaccacagtgcccatcaccaccctagcgtgggcagaccaggcccagccattgatcaggaagccagcctgagacctggagctcttcccgtaacctgcattcccaggaccctctctagtatccctcggccagccccaagaggccaggaattgtgtccatag

SEQ ID NO: 165130 - DNA, 399 bp, Artificial Sequence
  derived and/or modified sequence
atgaaccacatcgtccagaccttcagccccgtgaactccggtcagccccctaactatgagatgctgaaggaagaacaggaagtagctatgctaggagttcctcacaatcctgccccaccgatgtctactgtcattcacatccgcagtgagacatcagtgcccgaccatgtagtgtggagtctgtttaacaccttgttcatgaacacctgttgtctcggattcattgcctttgcatattccgtgaaatctcgggacaggaaaatggtcggtgacgtgacaggagcacaggcctatgcatctactgccaaatgcctgaacatatgggccctgattttgggcatatttatgaccattctgctgatcattataccggtgctcgtggtgcaggctcagcgctag

SEQ ID NO: 165131 - DNA, 495 bp, Artificial Sequence
  derived and/or modified sequence
atgaaccacatcgtgcagaccttcagccccgtgaacagcggccagccccccaactacgagatgctgaaggaggagcaggaggtggccatgctgggcgtgccccacaaccccgccccccccatgagcaccgtgatccacatcagaagcgagaccagcgtgcccgaccacgtggtggtgcccgtgcagcaccccctgcacgagtgctgcctgggcttcatcgccttcgcctacagcgtgaagagcagagacagaaagatggtgggcgacgtgaccggcgcccaggccctgcacagacaggtgcccgagcacctgggccccgacttcggccacctgcacgaccacagcgcccaccaccaccccagcgtgggcagacccggccccgccatcgaccaggaggccagcctgagacccggcgccctgcccgtgacctgcatccccagaaccctgagcagcatccccagacccgcccccagaggccaggagctgtgcccctag

SEQ ID NO: 165132 - DNA, 399 bp, Artificial Sequence
  derived and/or modified sequence
atgaaccacatcgtgcagaccttcagccccgtgaacagcggccagccccccaactacgagatgctgaaggaggagcaggaggtggccatgctgggcgtgccccacaaccccgccccccccatgagcaccgtgatccacatcagaagcgagaccagcgtgcccgaccacgtggtgtggagcctgttcaacaccctgttcatgaacacctgctgcctgggcttcatcgccttcgcctacagcgtgaagagcagagacagaaagatggtgggcgacgtgaccggcgcccaggcctacgccagcaccgccaagtgcctgaacatctgggccctgatcctgggcatcttcatgaccatcctgctgatcatcatccccgtgctggtggtgcaggcccagagatag

SEQ ID NO: 165133 - protein, 1724 aa, Artificial Sequence
  derived and/or modified sequence
MVMGIFANCIFCLKVKYLPQQQKKKLQTDIKENGGKFSFSLNPQCTHIILDNADVLSQYQLNSIQKNHVHIANPDFIWKSIREKRLLDVKNYDPYKPLDITPPPDQKASSSEVKTEGLCPDSATEEEDTVELTEFGMQNVEIPHLPQDFEVAKYNTLEKVGMEGGQEAVVVELQCSRDSRDCPFLISSHFLLDDGMETRRQFAIKKTSEDASEYFENYIEELKKQGFLLREHFTPEATQLASEQLQALLLEEVMNSSTLSQEVSDLVEMIWAEALGHLEHMLLKPVNRISLNDVSKAEGILLLVKAALKNGETAEQLQKMMTEFYRLIPHKGTMPKEVNLGLLAKKADLCQLIRDMVNVCETNLSKPNPPSLAKYRALRCKIEHVEQNTEEFLRVRKEVLQNHHSKSPVDVLQIFRVGRVNETTEFLSKLGNVRPLLHGSPVQNIVGILCRGLLLPKVVEDRGVQRTDVGNLGSGIYFSDSLSTSIKYSHPGETDGTRLLLICDVALGKCMDLHEKDFSLTEAPPGYDSVHGVSQTASVTTDFEDDEFVVYKTNQVKMKYIIKFSMPGDQIKDFHPSDHTELEEYRPEFSNFSKVEDYQLPDAKTSSSTKAGLQDASGNLVPLEDVHIKGRIIDTVAQVIVFQTYTNKSHVPIEAKYIFPLDDKAAVCGFEAFINGKHIVGEIKEKEEAQQEYLEAVTQGHGAYLMSQDAPDVFTVSVGNLPPKAKVLIKITYITELSILGTVGVFFMPATVAPWQQDKALNENLQDTVEKICIKEIGTKQSFSLTMSIEMPYVIEFIFSDTHELKQKRTDCKAVISTMEGSSLDSSGFSLHIGLSAAYLPRMWVEKHPEKESEACMLVFQPDLDVDLPDLASESEVIICLDCSSSMEGVTFLQAKQIALHALSLVGEKQKVNIIQFGTGYKELFSYPKHITSNTMAAEFIMSATPTMGNTDFWKTLRYLSLLYPARGSRNILLVSDGHLQDESLTLQLVKRSRPHTRLFACGIGSTANRHVLRILSQCGAGVFEYFNAKSKHSWRKQIEDQMTRLCSPSCHSVSVKWQQLNPDVPEALQAPAQVPSLFLNDRLLVYGFIPHCTQATLCALIQEKEFRTMVSTTELQKTTGTMIHKLAARALIRDYEDGILHENETSHEMKKQTLKSLIIKLSKENSLITQFTSFVAVEKRDENESPFPDIPKVSELIAKEDVDFLPYMSWQGEPQEAVRNQSLLASSEWPELRLSKRKHRKIPFSKRKMELSQPEVSEDFEEDGLGVLPAFTSNLERGGVEKLLDLSWTESCKPTATEPLFKKVSPWETSTSSFFPILAPAVGSYLPPTARAHSPASLSFASYRQVASFGSAAPPRQFDASQFSQGPVPGTCADWIPQSASCPTGPPQNPPSSPYCGIVFSGSSLSSAQSAPLQHPGGFTTRPSAGTFPELDSPQLHFSLPTDPDPIRGFGSYHPSASSPFHFQPSAASLTANLRLPMASALPEALCSQSRTTPVDLCLLEESVGSLEGSRCPVFAFQSSDTESDELSEVLQDSCFLQIKCDTKDDSILCFLEVKEEDEIVCIQHWQDAVPWTELLSLQTEDGFWKLTPELGLILNLNTNGLHSFLKQKGIQSLGVKGRECLLDLIATMLVLQFIRTRLEKEGIVFKSLMKMDDASISRNIPWAFEAIKQASEWVRRTEGQYPSICPRLELGNDWDSATKQLLGLQPISTVSPLHRVLHYSQG

SEQ ID NO: 165134 - DNA, 5175 bp, Artificial Sequence
  derived and/or modified sequence
atggtgatgggcatcttcgccaactgcatcttctgcctgaaggtgaagtacctgccccagcagcagaagaagaagctgcagaccgacatcaaggagaacggcggcaagttcagcttcagcctgaacccccagtgcacccacatcatcctggacaacgccgacgtgctgagccagtaccagctgaacagcatccagaagaaccacgtgcacatcgccaaccccgacttcatctggaagagcatcagagagaagagactgctggacgtgaagaactacgacccctacaagcccctggacatcacccccccccccgaccagaaggccagcagcagcgaggtgaagaccgagggcctgtgccccgacagcgccaccgaggaggaggacaccgtggagctgaccgagttcggcatgcagaacgtggagatcccccacctgccccaggacttcgaggtggccaagtacaacaccctggagaaggtgggcatggagggcggccaggaggccgtggtggtggagctgcagtgcagcagagacagcagagactgccccttcctgatcagcagccacttcctgctggacgacggcatggagaccagaagacagttcgccatcaagaagaccagcgaggacgccagcgagtacttcgagaactacatcgaggagctgaagaagcagggcttcctgctgagagagcacttcacccccgaggccacccagctggccagcgagcagctgcaggccctgctgctggaggaggtgatgaacagcagcaccctgagccaggaggtgagcgacctggtggagatgatctgggccgaggccctgggccacctggagcacatgctgctgaagcccgtgaacagaatcagcctgaacgacgtgagcaaggccgagggcatcctgctgctggtgaaggccgccctgaagaacggcgagaccgccgagcagctgcagaagatgatgaccgagttctacagactgatcccccacaagggcaccatgcccaaggaggtgaacctgggcctgctggccaagaaggccgacctgtgccagctgatcagagacatggtgaacgtgtgcgagaccaacctgagcaagcccaacccccccagcctggccaagtacagagccctgagatgcaagatcgagcacgtggagcagaacaccgaggagttcctgagagtgagaaaggaggtgctgcagaaccaccacagcaagagccccgtggacgtgctgcagatcttcagagtgggcagagtgaacgagaccaccgagttcctgagcaagctgggcaacgtgagacccctgctgcacggcagccccgtgcagaacatcgtgggcatcctgtgcagaggcctgctgctgcccaaggtggtggaggacagaggcgtgcagagaaccgacgtgggcaacctgggcagcggcatctacttcagcgacagcctgagcaccagcatcaagtacagccaccccggcgagaccgacggcaccagactgctgctgatctgcgacgtggccctgggcaagtgcatggacctgcacgagaaggacttcagcctgaccgaggccccccccggctacgacagcgtgcacggcgtgagccagaccgccagcgtgaccaccgacttcgaggacgacgagttcgtggtgtacaagaccaaccaggtgaagatgaagtacatcatcaagttcagcatgcccggcgaccagatcaaggacttccaccccagcgaccacaccgagctggaggagtacagacccgagttcagcaacttcagcaaggtggaggactaccagctgcccgacgccaagaccagcagcagcaccaaggccggcctgcaggacgccagcggcaacctggtgcccctggaggacgtgcacatcaagggcagaatcatcgacaccgtggcccaggtgatcgtgttccagacctacaccaacaagagccacgtgcccatcgaggccaagtacatcttccccctggacgacaaggccgccgtgtgcggcttcgaggccttcatcaacggcaagcacatcgtgggcgagatcaaggagaaggaggaggcccagcaggagtacctggaggccgtgacccagggccacggcgcctacctgatgagccaggacgcccccgacgtgttcaccgtgagcgtgggcaacctgccccccaaggccaaggtgctgatcaagatcacctacatcaccgagctgagcatcctgggcaccgtgggcgtgttcttcatgcccgccaccgtggccccctggcagcaggacaaggccctgaacgagaacctgcaggacaccgtggagaagatctgcatcaaggagatcggcaccaagcagagcttcagcctgaccatgagcatcgagatgccctacgtgatcgagttcatcttcagcgacacccacgagctgaagcagaagagaaccgactgcaaggccgtgatcagcaccatggagggcagcagcctggacagcagcggcttcagcctgcacatcggcctgagcgccgcctacctgcccagaatgtgggtggagaagcaccccgagaaggagagcgaggcctgcatgctggtgttccagcccgacctggacgtggacctgcccgacctggccagcgagagcgaggtgatcatctgcctggactgcagcagcagcatggagggcgtgaccttcctgcaggccaagcagatcgccctgcacgccctgagcctggtgggcgagaagcagaaggtgaacatcatccagttcggcaccggctacaaggagctgttcagctaccccaagcacatcaccagcaacaccatggccgccgagttcatcatgagcgccacccccaccatgggcaacaccgacttctggaagaccctgagatacctgagcctgctgtaccccgccagaggcagcagaaacatcctgctggtgagcgacggccacctgcaggacgagagcctgaccctgcagctggtgaagagaagcagaccccacaccagactgttcgcctgcggcatcggcagcaccgccaacagacacgtgctgagaatcctgagccagtgcggcgccggcgtgttcgagtacttcaacgccaagagcaagcacagctggagaaagcagatcgaggaccagatgaccagactgtgcagccccagctgccacagcgtgagcgtgaagtggcagcagctgaaccccgacgtgcccgaggccctgcaggcccccgcccaggtgcccagcctgttcctgaacgacagactgctggtgtacggcttcatcccccactgcacccaggccaccctgtgcgccctgatccaggagaaggagttcagaaccatggtgagcaccaccgagctgcagaagaccaccggcaccatgatccacaagctggccgccagagccctgatcagagactacgaggacggcatcctgcacgagaacgagaccagccacgagatgaagaagcagaccctgaagagcctgatcatcaagctgagcaaggagaacagcctgatcacccagttcaccagcttcgtggccgtggagaagagagacgagaacgagagccccttccccgacatccccaaggtgagcgagctgatcgccaaggaggacgtggacttcctgccctacatgagctggcagggcgagccccaggaggccgtgagaaaccagagcctgctggccagcagcgagtggcccgagctgagactgagcaagagaaagcacagaaagatccccttcagcaagagaaagatggagctgagccagcccgaggtgagcgaggacttcgaggaggacggcctgggcgtgctgcccgccttcaccagcaacctggagagaggcggcgtggagaagctgctggacctgagctggaccgagagctgcaagcccaccgccaccgagcccctgttcaagaaggtgagcccctgggagaccagcaccagcagcttcttccccatcctggcccccgccgtgggcagctacctgccccccaccgccagagcccacagccccgccagcctgagcttcgccagctacagacaggtggccagcttcggcagcgccgccccccccagacagttcgacgccagccagttcagccagggccccgtgcccggcacctgcgccgactggatcccccagagcgccagctgccccaccggccccccccagaacccccccagcagcccctactgcggcatcgtgttcagcggcagcagcctgagcagcgcccagagcgcccccctgcagcaccccggcggcttcaccaccagacccagcgccggcaccttccccgagctggacagcccccagctgcacttcagcctgcccaccgaccccgaccccatcagaggcttcggcagctaccaccccagcgccagcagccccttccacttccagcccagcgccgccagcctgaccgccaacctgagactgcccatggccagcgccctgcccgaggccctgtgcagccagagcagaaccacccccgtggacctgtgcctgctggaggagagcgtgggcagcctggagggcagcagatgccccgtgttcgccttccagagcagcgacaccgagagcgacgagctgagcgaggtgctgcaggacagctgcttcctgcagatcaagtgcgacaccaaggacgacagcatcctgtgcttcctggaggtgaaggaggaggacgagatcgtgtgcatccagcactggcaggacgccgtgccctggaccgagctgctgagcctgcagaccgaggacggcttctggaagctgacccccgagctgggcctgatcctgaacctgaacaccaacggcctgcacagcttcctgaagcagaagggcatccagagcctgggcgtgaagggcagagagtgcctgctggacctgatcgccaccatgctggtgctgcagttcatcagaaccagactggagaaggagggcatcgtgttcaagagcctgatgaagatggacgacgccagcatcagcagaaacatcccctgggccttcgaggccatcaagcaggccagcgagtgggtgagaagaaccgagggccagtaccccagcatctgccccagactggagctgggcaacgactgggacagcgccaccaagcagctgctgggcctgcagcccatcagcaccgtgagccccctgcacagagtgctgcactacagccagggctag

SEQ ID NO: 165135 - DNA, 5175 bp, Artificial Sequence
  derived and/or modified sequence
atggtgatggggatttttgccaactgtattttctgcctaaaggtcaagtacctcccacagcaacagaagaagaagctccagactgatatcaaagaaaacggtgggaaattttccttttcattgaacccgcagtgcacacatatcattctggataacgcggacgttctgtctcagtaccagctcaactctatccagaagaatcatgtccacatcgcgaacccagatttcatctggaaatctatacgtgaaaaacgtcttctggatgtgaaaaactatgatccctacaaaccactggacataactccccctcctgaccagaaggcctcttcctcggaggtgaagaccgaaggactctgccctgatagcgccaccgaggaggaagacacagtcgagttgaccgagtttgggatgcaaaatgtagaaattccacacttaccccaggattttgaggtggctaagtacaatactctggagaaagtgggcatggagggcggacaggaggccgtcgtcgtggaactgcagtgctctagggatagccgtgactgcccattcctgatctcaagccatttccttctcgatgacgggatggagacacgcaggcagttcgccattaaaaagaccagcgaagatgcttccgaatatttcgaaaactatatcgaggagctaaaaaaacagggtttcttgctgcgcgagcacttcacacccgaggccactcaacttgcttcagaacagttacaggcactgttacttgaagaggtgatgaactcctccaccttgtctcaggaggtcagtgacctggtggaaatgatctgggccgaagccctgggccacctggagcatatgttattgaaaccggttaataggataagtctaaatgacgtgagcaaagctgagggcatcctcctcctggtgaaagcggctctcaaaaacggtgagaccgctgagcagcttcagaaaatgatgaccgagttctataggctaatcccccataaggggaccatgcccaaggaagtgaacttgggattactggcaaagaaggcagacctctgtcagctaattcgcgacatggtgaatgtctgcgagaccaatctcagtaaacctaatccacccagtctggccaaatatagagccctcaggtgtaagattgaacatgtggaacagaacacggaggagtttttaagagtgcgcaaggaggtgttacagaaccaccattcaaagtctccggtcgatgtgctgcagatctttcgtgtcggccgagtcaatgagaccaccgagttcctgagcaagttaggcaatgtgagacctttgctccatgggtctcctgttcagaacatagtggggatcttatgccgaggtttgttactccctaaagtcgtggaagatcgtggcgttcagaggaccgacgttggcaacctggggtctgggatttatttttctgattccctgagcacctccatcaaatattctcaccctggcgagacagatgggactaggttactcttgatctgcgatgtcgcattgggcaagtgcatggatctgcacgaaaaggatttcagtcttactgaggccccaccaggatatgatagcgtgcacggggtctcacagaccgccagcgtgacgacagatttcgaggatgatgagtttgtggtgtacaaaacaaatcaggttaaaatgaagtatattataaagttttcaatgccaggggaccaaataaaagactttcacccaagcgaccacactgagcttgaggagtataggccggaattctccaacttttctaaagttgaagactatcaattgccagatgccaagactagttccagcaccaaagctgggctgcaggacgccagcggcaacctcgtgccactggaagatgttcacatcaagggcagaatcatagacactgtcgctcaggtgatagtgttccagacctacaccaacaaatcccacgtcccaattgaggcaaaatatatctttccactcgacgataaggccgccgtttgtggcttcgaggctttcattaatgggaaacatatagtaggggaaatcaaagaaaaagaagaagctcagcaagagtacctcgaagccgtgactcagggacatggagcttatctaatgagtcaggacgctcctgacgtgtttacagtgtcagtgggaaatcttccccctaaagcgaaggtcctgataaagatcacatacattaccgagctttctatcctgggcacagtcggggtgtttttcatgcctgccacagtcgcgccctggcagcaggataaggccctgaacgaaaacctccaagataccgtcgaaaaaatctgcatcaaggagattgggacaaagcagagctttagcctcactatgtccattgaaatgccatacgtaatcgagtttatattctccgacacccatgagctcaagcaaaaacgaactgactgtaaggcggtgatctctacaatggaaggatctagtctggacagcagtggcttcagcctgcacattgggctgtccgcagcttacttgcctagaatgtgggtagaaaagcatccagagaaggagagtgaggcctgtatgttggttttccagcctgatctcgacgtcgaccttccagatcttgcaagcgaatctgaagtgattatctgcttggattgcagcagcagtatggagggtgtaacctttctgcaggctaaacagatcgctctgcacgctctctctctggtcggcgaaaaacagaaagtcaacattatccagtttggcactggatacaaggagcttttttcatacccaaagcacattacatccaacacgatggccgccgaattcataatgtccgccacccctaccatgggtaataccgacttctggaaaactctgaggtatctgtcgctcttgtacccagctaggggctctcgaaacatattgcttgtgagtgacggccaccttcaagatgagtcccttactctccagctagtgaagagaagcagacctcatactcggttgttcgcttgcgggattggatctactgctaaccgacacgtgctccgcattctgtcccagtgcggcgcgggagtattcgagtatttcaacgcgaaaagtaaacattcctggcgaaagcagatcgaggaccagatgacacgcctctgcagtccatcatgccacagtgtcagcgtgaagtggcagcaactgaatccagacgtccccgaggcactccaggcccctgcccaggtaccctccttgttcctgaatgataggctgctggtttatggctttattccacactgcacccaggccacactttgtgcccttatccaggagaaagaatttcgcaccatggtgtctacgaccgagctgcagaagacgaccgggaccatgattcacaaactggccgctagggctctaatacgggactacgaggatggcatactgcatgagaacgaaacttctcacgagatgaagaaacagacattgaagtcccttatcattaaacttagcaaagaaaacagcctgattacacagtttacgagcttcgttgccgtggagaagagagatgagaacgagtctccctttcccgacattcccaaggtttcagaactgatagcaaaggaggacgtggactttcttccctatatgagctggcagggggagcctcaggaagccgttaggaaccagagcttgttggcctcctccgagtggccagaactcaggttgagtaaaaggaagcataggaagataccctttagcaagcggaaaatggagctcagtcagcctgaagtctcagaagacttcgaagaagatgggctgggggtactccccgcattcaccagtaacctggagaggggtggcgtggaaaaactgcttgatttaagctggacagagagctgtaagcctaccgctacagaacctctgtttaaaaaggtgtcgccatgggagaccagtacatcctcgttttttcctatcctggcgccggccgtgggctcttacctacctccgaccgcccgggcacatagtcccgccagccttagcttcgctagttataggcaagtagccagctttggttcggcggcaccaccacgccagttcgacgcgtcccagttcagtcaaggaccagtgccaggaacctgcgcagactggattcctcagtcggcgtcatgcccaaccggacctccgcaaaaccccccaagcagtccatactgtggaatcgtcttttcagggtcctccctgtcatccgcacagtcagcccccctacaacacccaggtgggttcacaacaagaccaagcgccggcaccttccctgagctcgattctccgcagttgcacttcagtctgcccaccgatccggatccaattagggggttcggctcataccacccaagcgcttcaagtcccttccattttcaaccctcagctgcctctcttaccgccaacctgcggctgcccatggcctccgctttacccgaggctttgtgctctcagtcacgaactacaccggtggacttgtgccttttagaagagtctgtgggctctttagaaggatccaggtgccccgtattcgcttttcagtccagcgatactgagagcgacgaactgtctgaggttcttcaggactcctgttttctccagattaaatgtgataccaaggatgatagtatcttgtgctttctggaggtcaaggaagaagacgagatcgtatgtatccagcactggcaggacgctgtgccttggaccgagctgttgtctctccagaccgaggacgggttctggaaacttacacccgagttaggactgattttaaacctgaacactaacggcttgcattccttcctgaaacagaaaggcattcaatcattgggcgtcaagggaagagagtgcctgctggatctgatagcaaccatgctagtcctgcagtttatacggaccagacttgagaaagaagggattgtgtttaagtctcttatgaaaatggatgacgcttctatcagtcggaatatcccttgggctttcgaagccatcaaacaggcgtcagagtgggtccgacgaacagagggacagtacccatcaatctgccccaggctggaactaggaaatgattgggattctgctaccaagcagcttctggggctgcagccaatatccaccgtgtcgccactacacagggtgttgcattactctcaagggtag

SEQ ID NO: 165136 - DNA, 5175 bp, Artificial Sequence
  derived and/or modified sequence
atggtgatgggcatctttgccaactgcatcttctgcctgaaggtgaagtacctgccccagcagcagaagaagaagctgcagacagacatcaaggaaaatggaggcaagttctccttcagcctgaacccccagtgcacccacatcatcctggacaatgctgatgtgctgagccagtaccagctgaacagcatccagaagaaccacgtgcacatcgccaacccagacttcatctggaagagcatccgggagaagaggctgctggatgtgaagaactatgacccctacaagcccctggacatcaccccacctccagaccagaaggccagcagcagcgaggtgaagacagagggcctgtgcccagacagcgccacagaggaggaggacacagtggagctgacagaatttggcatgcagaatgtggagatcccccacctgccccaggactttgaggtggccaagtacaacaccctggagaaggtgggcatggagggcggccaggaggccgtggtggtggagctgcagtgcagccgggacagccgggactgccccttcctgatcagcagccacttcctgctggatgatggcatggagacccggcggcagtttgccatcaagaagaccagtgaagatgccagcgagtactttgagaactacatcgaggagctgaagaagcagggcttcctgctgcgggagcacttcaccccagaggccacccagctggccagcgagcagctgcaggccctgctgctggaggaggtgatgaacagcagcaccctgagccaggaggtgtctgacctggtggagatgatctgggccgaggccctgggccacctggagcacatgctgctgaagcctgtgaaccgcatcagcctgaatgatgtgtccaaggccgagggcatcctgctgctggtgaaggccgccctgaagaatggagaaacagctgagcagctgcagaagatgatgacagagttctaccgcctcatcccccacaagggcaccatgcccaaggaggtgaacctgggcctgctggccaagaaggctgacctgtgccagctgatccgggacatggtgaatgtgtgtgagaccaacctgagcaagcccaacccccccagcctggccaagtaccgggccctgcgctgcaagattgagcacgtggagcagaacacagaggagttcctgcgggtgaggaaggaggtgctgcagaaccaccacagcaagagccctgtggatgtgctgcagatcttccgggtgggccgggtgaatgagaccacagagttcctgagcaagctgggcaatgtgcggcccctgctgcacggcagccctgtgcagaacatcgtgggcatcctgtgccggggcctgctgctgcccaaggtggtggaggacagaggagtgcagaggacagatgtgggcaacctgggcagcggcatctacttcagtgacagcctgagcaccagcatcaagtacagccaccctggagaaacagatggcacccggctgctgctgatctgtgatgtggccctgggcaagtgcatggacctgcacgagaaggacttcagcctgacagaggcccctcctggctatgattctgtgcatggagtgtcccagacagcctctgtgaccacagactttgaagatgatgaatttgtggtgtacaagaccaaccaggtgaagatgaagtacatcatcaagttctccatgcctggggaccagatcaaggacttccaccccagcgaccacacagagctggaggagtacagacctgagttcagcaacttcagcaaggtggaggactaccagctgcctgatgccaagaccagcagcagcaccaaggccggcctgcaggatgccagcggcaacctggtgcccctggaggatgtgcacatcaagggccgcatcatcgacacagtggcccaggtgattgtgttccagacctacaccaacaagagccacgtgcccatcgaggccaagtacatcttccccctggatgacaaggctgctgtgtgtggctttgaggccttcatcaatggcaagcacatcgtgggggagatcaaggagaaggaggaggcccagcaggagtacctggaggccgtgacccagggccatggagcctacctgatgagccaggatgccccagatgtgttcaccgtgtctgtgggcaacctgccccccaaggccaaggtgctgatcaagatcacctacatcacagagctgagcatcctgggcaccgtgggcgtcttcttcatgcctgccaccgtggccccctggcagcaggacaaggccctgaatgaaaacctgcaggacacagtggagaagatctgcatcaaggagatcggcaccaagcagagcttcagcctgaccatgagcattgagatgccctacgtgattgagttcatcttcagtgacacccatgagctgaagcagaagaggacagactgcaaggccgtcatcagcaccatggagggcagcagcctggacagcagcggcttcagcctgcacatcggcctgtctgctgcctacctgcccaggatgtgggtggagaagcaccctgagaaggagagcgaggcctgcatgctggtgttccagcctgacctggatgtggacctgcctgacctggccagcgagagcgaggtgatcatctgcctggactgcagcagctccatggagggcgtgaccttcctgcaggccaagcagatcgccctgcacgccctgagcctggtgggggagaagcagaaggtgaacatcatccagtttggaacaggctacaaggagctgttctcctaccccaagcacatcaccagcaacaccatggctgctgagttcatcatgtctgccacccccaccatgggcaacacagacttctggaagaccctgcgctacctgagcctgctgtacccagcccggggcagcaggaacatcctgctggtgtctgatggccacctgcaggatgagagcctgaccctgcagctggtgaagaggagccggccccacacccggctgtttgcctgtggcatcggcagcacagccaacagacatgtgctgcgcatcctgagccagtgtggggccggcgtgtttgagtacttcaatgccaagagcaagcacagctggaggaagcagatcgaggaccagatgacccggctgtgcagccccagctgccacagcgtgtctgtgaagtggcagcagctgaacccagatgtgcctgaggccctgcaggccccagcccaggtgcccagcctcttcctgaatgaccggctgctggtgtatggcttcatcccccactgcacccaggccaccctgtgtgccctgatccaggagaaggagttccgcaccatggtgtccaccacagagctgcagaagaccaccggcaccatgatccacaagctggccgcccgggccctgatccgggactatgaagatggcatcctgcatgaaaatgagaccagccatgagatgaagaagcagaccctgaagagcctcatcatcaagctgagcaaagaaaacagcctcatcacccagttcaccagctttgtggccgtggagaagagagatgaaaatgaaagccccttcccagacatccccaaggtgtctgagctgattgccaaggaggatgtggacttcctgccctacatgtcctggcagggcgagccccaggaggccgtgaggaaccagagcctgctggccagcagcgagtggccagagctgcggctgagcaagaggaagcacaggaagatccccttcagcaagaggaagatggagctgagccagcctgaggtgtctgaagattttgaagaagatggcctgggcgtgctgcctgccttcaccagcaacctggagcggggcggcgtggagaagctgctggacctgtcctggacagagagctgcaagcccacagccacagagcccctcttcaagaaggtgagcccctgggagaccagcaccagcagcttcttccccatcctggccccagctgtgggcagctacctgcccccaacagcccgggcccacagccctgccagcctgagctttgccagctaccggcaggtggccagctttggcagcgctgccccaccccggcagtttgatgccagccagttcagccagggccctgtgcccggcacctgtgccgactggatcccccagagcgccagctgccccactggaccaccccagaacccccccagcagcccctactgcggcatcgtgttcagcggcagcagcctgagcagcgcccagagcgcccccctgcagcaccctgggggcttcaccacccggcccagcgctggcaccttccctgagctggacagcccccagctgcacttcagcctgcccacagatcctgaccccatccggggcttcggcagctaccaccccagcgccagcagccccttccacttccagcccagcgctgccagcctgacagccaacctgcggctgcccatggccagcgccctgcctgaggccctgtgcagccagagcaggaccacccctgtggacctgtgcctgctggaggagagcgtgggcagcctggagggcagccgctgccctgtgtttgccttccagagcagtgacacagaaagtgatgagctgtctgaggtgctgcaggacagctgcttcctgcagatcaagtgtgacaccaaggatgacagcatcctgtgcttcctggaggtgaaggaggaggatgaaattgtgtgcatccagcactggcaggatgctgtgccctggacagagctgctgagcctgcagacagaagatggcttctggaagctgaccccagagctgggcctcatcctgaacctgaacaccaacggcctgcacagcttcctgaagcagaagggcatccagagcctgggcgtgaagggcagagaatgtctgctggacctgattgccaccatgctggtgctgcagttcatccgcacccggctggagaaggagggcatcgtgttcaagagcctgatgaagatggatgatgccagcatcagcaggaacatcccctgggcctttgaggccatcaagcaggccagcgagtgggtgagaagaacagagggccagtaccccagcatctgcccccggctggagctgggcaatgactgggacagcgccaccaagcagctgctgggcctgcagcccatcagcacagtgagccccctgcaccgggtgctgcactacagccagggctag

SEQ ID NO: 165137 - DNA, 5175 bp, Artificial Sequence
  derived and/or modified sequence
atggtgatgggcatcttcgccaactgcatcttctgcctgaaggtgaaatacctcccccagcagcagaagaaaaagcttcagaccgacatcaaggagaatggcgggaagtttagtttttcacttaacccccagtgcacacacatcattttagacaacgcggacgtgctgagccaataccaattaaactcaatacaaaagaaccacgtgcacatcgccaatcccgactttatctggaagagcatcagagagaaacgactcctagacgtcaaaaactatgacccttacaaacctctggacatcacacctcctcccgatcagaaagccagttctagcgaagtgaagaccgaaggcctgtgcccagacagcgcgactgaggaggaggacacagtcgagttaacagaattcggcatgcaaaacgtggaaatcccacaccttcctcaagactttgaagtggccaaatataacacacttgagaaggttgggatggaggggggccaggaggccgtggtggttgaactacagtgctcccgcgacagcagggactgccctttcttaatctcttctcacttcctgctggacgatggcatggagactagacggcagttcgccataaaaaagacttccgaggatgcttccgaatacttcgagaattacatcgaagaattgaagaagcagggctttcttctgcgtgaacactttacacctgaggccacacagttagcatcagagcagctacaggctctgctactggaagaagtcatgaacagctcaacattgtctcaggaggtgagcgaccttgtggaaatgatctgggccgaggctcttggccatctggaacacatgctgctcaaacctgtcaatcgaatctctctgaatgatgtgtcaaaagccgagggtattctgctactggtcaaggctgccctgaagaatggagagacggctgagcagcttcagaaaatgatgactgaattttatcggctgatcccacacaaagggacaatgccaaaagaggtgaacctaggcttgctcgcaaagaaggccgatctctgtcagctgattcgcgatatggtgaatgtttgtgagaccaacctgagtaaacctaaccctccctctctggcaaaatacagagccctgagatgcaagatcgagcacgtggagcagaataccgaagagttcctcagggttcggaaagaggtcctgcagaatcatcactccaaaagccccgtggacgtccttcaaatcttccgcgtcggaagagtgaatgagaccacggaattcttgtccaagcttgggaacgtccggcctctgctccacggatcaccagtgcagaacatcgtgggaatattgtgcagagggcttttgcttcccaaggtggtggaggatcgcggtgtccagcggacggatgtcggcaatctcggctccggcatctactttagcgattcattaagtacatctattaaatattcccatcctggggaaactgacggaacgaggctgttacttatttgcgatgtcgccctcggaaagtgcatggacctgcatgagaaggatttcagcctcaccgaggcacctccgggttacgattctgtgcatggagtgtcccaaacagccagtgtaacgaccgacttcgaagacgacgaattcgttgtctacaaaaccaatcaagttaagatgaaatacattattaaattttccatgccgggggaccaaattaaagatttccatccctccgatcatactgaacttgaggagtaccgtcccgaattctcaaactttagcaaggtagaggattaccagttacccgatgcgaaaacatccagttctacaaaagccggactccaggatgcctccggaaacctggtaccactggaagacgtacatatcaagggccgtattatcgatactgtggctcaagtgatcgttttccagacttatacaaataagtcccacgtccccatcgaggcaaagtacatctttccactcgatgacaaggccgcagtgtgtgggttcgaggcctttatcaatgggaagcacatcgtcggggaaatcaaggagaaggaagaagcacagcaggagtacctggaggctgtcacccagggccacggcgcgtatctcatgagccaagacgcacccgacgtgtttaccgtgagtgttgggaatctcccacccaaggcaaaagtactgatcaagataacctacatcactgagctttctatactggggacagttggggtgttcttcatgcctgcgaccgtggccccctggcagcaagacaaagcgctgaacgagaacctgcaggataccgtggagaagatctgtatcaaggaaataggaaccaagcagtccttttcgctgactatgtccattgagatgccctacgtgatagaattcatattttccgatacccacgaactgaagcagaagcgcacggattgcaaggcagttatttccaccatggaggggtcctctttggactcctcgggcttttcacttcatattggactcagcgccgcttatttgccacgtatgtgggtagaaaagcaccctgaaaaggagtctgaagcctgtatgctcgtgttccaaccagatctggacgtggacctccccgacctggcatcggagtccgaagttatcatctgcctggactgcagctcttccatggagggtgtcaccttcctacaagctaagcaaatcgcacttcacgcactaagtcttgttggtgagaagcagaaggttaatataattcaatttggtacaggatataaggagctcttctcctacccaaagcatatcacctctaacaccatggcagccgaattcattatgtccgctactcccactatgggaaacaccgacttctggaaaacgctgagatacctttctctgttgtacccggctcgcggtagccgcaacatcctcctcgtatctgacggacacctgcaagacgaaagcctgacgctacagctggtcaaacggagccgccctcatacacgtctgtttgcttgcggaataggctccactgccaacaggcatgtgctgaggatcctgagccagtgcggggcaggcgtcttcgaatactttaacgccaaatccaaacattcatggcggaagcagatcgaggatcagatgactcgcctgtgtagccctagctgtcatagcgtgtccgtcaaatggcagcagctcaatccagatgtcccggaagcactccaggcccccgcccaggttccttctcttttcttgaacgaccgcctactggtctatggttttatacctcactgtacccaggctacactctgtgcacttatccaggaaaaggagttcagaaccatggtctcaaccaccgaattgcagaagacaacagggacaatgatacacaagctcgccgcgcgcgcgctcatcagagactacgaagacggcatcctgcatgagaatgaaactagtcacgaaatgaaaaagcagactctgaagtcacttatcattaaactatctaaggaaaattcactcataacacagttcacgtcctttgtggctgtggagaaacgagacgaaaacgagagccccttccctgacattcctaaggtgagtgagctcatcgccaaggaagacgtggacttcttgccttacatgagctggcagggggagccccaggaggcagtcaggaatcagtcattgctggctagcagcgagtggcccgagctgcggctcagcaagcggaaacacagaaaaatccctttctccaagcggaagatggaactctcccaaccagaagtaagcgaggattttgaggaggatggcttgggggtgctgccagcatttaccagcaatctcgagaggggaggagtcgagaagctccttgacctcagctggactgaatcctgcaagccaacagccacagagcctctgtttaagaaggtgtcaccttgggagacatccacatccagtttcttcccaatactggccccggccgtgggcagttacctgcctccgaccgcgcgcgcccattctcctgctagcctatcgtttgcctcataccgacaggtagcttcattcgggtccgccgcacctccgcggcagttcgacgcctctcagttttctcaggggcccgtgcctggtacctgtgctgactggatcccacagagcgccagttgcccaactggtccaccgcagaatccaccgtcttcaccatattgcggcattgttttctctgggagcagcttgtcgagcgctcagtccgccccacttcagcatcccggaggcttcacaacccggcctagcgccggaacctttcccgaattggactctccccaactgcacttttctcttccaaccgaccccgaccctatccgtgggttcgggagttaccaccctagcgcctcctctcctttccactttcagccatcagctgcttctctcacggccaacctacgcctgcctatggcttccgcgctacccgaagccctttgctcccagtctagaacgaccccggtcgatctgtgcctgttagaggaaagtgtgggtagcctggaaggcagccggtgtcctgtgtttgcctttcagagctccgatacagagagcgacgaactgtcggaagtgctccaggattcctgctttcttcagatcaagtgcgatactaaggacgatagtattttatgcttcctggaagtgaaggaggaggacgagatcgtttgcattcagcactggcaggatgctgtgccctggaccgaattgctgtctctccagaccgaggacggattctggaaactgaccccggagttaggactcatcttgaacctgaacactaacggcctccatagcttcttaaagcaaaagggcatccaaagtcttggtgtaaaggggagagaatgcctcttggacttaattgctaccatgttagttctacagtttattagaacgaggctggagaaagaaggtatcgtgttcaagagcctcatgaaaatggacgacgctagcatctctagaaatatcccctgggcctttgaagctattaaacaggcatccgagtgggtccgccgcactgaagggcagtatccttccatttgtccacgccttgagttggggaacgattgggatagcgcaaccaagcaactgctcggcttgcagcccatttcaactgttagccctcttcatcgtgtgctccactatagccaggggtag

SEQ ID NO: 165138 - DNA, 5174 bp, Artificial Sequence
  derived and/or modified sequence
atggtcatggggattttcgccaattgtatcttctgcttaaaggtcaagtatctcccgcagcagcaaaaaaaaaagctccaaacagacataaaagagaacggaggtaaattttcattctctctgaatcctcagtgcacccatattatattggacaacgcagatgtactgagtcagtatcagctgaactccattcagaagaatcacgttcacatcgctaatcccgacttcatttggaaatccatacgagaaaaacggctcttggacgttaagaactatgacccctacaaacctctggacatcacacctccgccagatcagaaagcttcgtcgagcgaggtgaaaacagaaggcctatgccccgattccgcaacagaagaggaggacactgttgagctcaccgaattcggaatgcagaatgttgaaatccctcatctgccacaggacttcgaggtggccaagtacaacacgctagaaaaggtgggaatggaaggcggacaggaggccgtcgtagtggagctgcaatgcagtcgcgactctcgcgactgccctttccttatttcatcacacttccttctggatgatggtatggagacacgtaggcagttcgccatcaaaaagacaagtgaagatgcatctgaatactttgaaaactacatcgaggagttgaagaaacagggattcctgcttcgggaacacttcactcccgaagcaactcagctcgcctcggagcagctacaggcactgctgcttgaggaagtgatgaacagttcgacactatctcaggaggtgtcagacctcgtggaaatgatctgggccgaagccctgggccacctggaacacatgctgttaaaaccagttaaccgcatttccctgaatgatgtgagcaaggccgaggggatcctcctgctggtgaaggccgcattgaaaaatggagaaaccgccgagcagttgcagaaaatgatgaccgagttttatcggctgattcctcataaagggacaatgcccaaggaggtgaacctcggattactggccaaaaaggcagacctatgtcagcttatcagggatatggtgaacgtgtgtgagactaacctgtctaaacccaaccccccatctctcgctaagtaccgcgcactgcggtgcaagatcgaacacgttgagcaaaataccgaggaatttttgagagtaagaaaggaggttctgcagaatcatcacagtaaatcaccagtcgatgttctccagattttccgagtcggcagggtgaacgagactactgagttcctttccaaactgggcaatgtccgcccattgttacatggtagccctgtgcaaaacatagttggtatcttgtgccgcggacttctccttcccaaggtcgtggaggatagaggagttcagagaactgacgtgggtaatctgggctctgggatttattttagcgactcgctttcaacctccatcaagtactcccaccccggagagaccgatggcactaggctgctgctgatctgtgatgtcgcgctgggcaagtgtatggatctgcacgagaaggattttagtcttactgaggcgccacctgggtacgactcggttcacggggtaagccagaccgcgtctgtaaccaccgatttcgaggatgacgagtttgtggtctataaaaccaaccaggtgaaaatgaaatacattatcaaattcagcatgccaggagaccagatcaaggattttcatccttctgatcataccgagcttgaggagtatagacccgagttctcaaacttctctaaggtggaagattaccagcttcctgacgccaagacatcaagcagcactaaagcaggactccaggacgccagtgggaatctcgttcctctggaagatgtccacattaaaggccgaatcattgataccgtggcccaggtgatagtctttcagacttatactaacaagtcccacgtgcctattgaagccaagtatatctttcctctcgacgacaaagccgctgtctgcggcttcgaggcctttattaatggtaagcacatcgttggtgagatcaaggagaaggaggaagcccagcaagagtacctggaggccgtgacacaaggacatggcgcttatcttatgtctcaggatgccccagatgtatttaccgtgagtgtaggcaacctgccaccaaaggcaaaagtgctaatcaagatcacttatatcacagaactgtcaattctgggcacagtgggcgtcttttttatgcctgccacagtggctccatggcagcaagacaaagccctgaacgaaaacctgcaggacactgtggagaaaatttgcattaaagagattgggaccaagcagtctttttctctgaccatgagcatcgagatgccttatgtcattgagttcatcttttccgatacccatgaactcaaacaaaaaagaactgattgcaaagctgttatatccaccatggagggaagctctctggattcttctggattttcactgcatatcggtctttcagctgcttatctcccccgtatgtgggtggagaagcacccggagaaagaatcagaggcatgtatgttagtctttcagcctgatcttgacgttgatctgcccgacttggccagcgaaagtgaggttattatctgtctagattgttcctccagcatggaaggggttaccttcttgcaagccaagcagatcgccctgcatgcactcagcttggtgggtgaaaagcagaaagtgaacatcattcagtttggaactggatataaggagctatttagctaccccaagcatataacatctaacacaatggctgcggagtttatcatgtctgccacgcccactatgggcaatactgacttctggaagactctgagatatttgagcctgctttatcccgcaagggggagtaggaacattctcctggttagtgatggccaccttcaggacgaatctttgacactgcaacttgttaagcggtctcgaccccatactcgcctgttcgcgtgcgggatcggaagtacggcaaataggcacgttctcagaatcctttcacaatgtggggcaggagtatttgaatactttaacgctaagagtaaacattcttggagaaaacagatcgaagatcaaatgacccgattatgttctccctcttgccactccgtgtcagtcaaatggcaacaactaaatcccgatgttcccgaggccctgcaggctcctgcccaggtgccttcccttttcttaaacgatcggctcctggtgtatggcttcatccctcattgtactcaagctacactgtgtgccctgatccaggagaaggagttccgcaccatggtcagtacaacagaattacagaagacgactggcaccatgatccacaaattagcggcacgggctctgatcagagactacgaggacggcatcctacatgagaacgagaccagccatgaaatgaaaaagcaaaccctgaagtccctgataatcaaactgagtaaagaaaacagcctgatcactcagtttacaagtttcgtcgcagttgaaaaacgggacgagaatgagtctccttttccagacattcccaaagtgagcgagctgatagccaaggaagacgtggattttctgccttatatgtcctggcaaggagagccccaggaagccgtgagaaatcagtccctgctggcaagcagcgagtggcccgagttgcgcctctccaagcgtaaacaccgtaagatcccgttctcaaaaagaaagatggaactgagccaacccgaggtatctgaagactttgaggaggacggcctgggcgtcctccccgctttcacatccaacttggaaagggggggtgtggaaaagctgttagacctctcttggaccgagtcttgcaagcccactgccactgagcctctctttaagaaagtatccccctgggagacatcgacctcaagcttttttcccatcttggcccctgccgtcgggtcctacttgcctcctacagcgagggcacatagccccgcttctttatcctttgcctcttatagacaggtagcctcattcggttccgctgcaccaccacgtcagtttgatgcatcccagttcagccaaggcccagtgcctggcacctgtgccgactggatcccgcaatccgcgagttgtccgaccggcccaccccagaatcctccctctagcccctactgtgggattgttttctcaggcagttccctctcgtccgcccagagcgctccactacagcacccagggggatttactacccgcccttccgccggaacgttcccagagctggacagcccccagctgcatttttctctcccaacagacccagatccaattcgaggttttggcagctatcacccttccgcatcttctccctttcattttcaacctagtgcagccagcttgactgcgaacctccggcttcccatggcttctgccctgcctgaggcactttgcagtcagtcaaggactactcctgtggatctttgccttctggaggagtctgtgggtagcctggaaggtagcaggtgtccagtgttcgcatttcaatctagtgacactgagtctgacgagctttccgaggtcttgcaggattcatgctttctgcagatcaaatgcgacactaaggatgatagtatactctgtttcctggaagtgaaagaggaggacgaaatcgtgtgtatccaacactggcaggatgcagtcccctggaccgagctgctgtctttacagacagaggacggattttggaagctgacgcccgaactcgggttgattctgaatcttaatacaaacgggctgcactccttcttaaagcagaagggaatccagtccctgggggtgaagggcagagaatgtctgctggacttgatcgccactatgctggtgcttcaatttatacgtactagactggaaaaggaaggaatagtttttaaaagtctcatgaagatggacgatgcatcaatctccagaaacattccctgggccttcgaggctattaagcaggctagtgagtgggttcgtaggactgagggccagtacccgagcatttgtcccaggctggaattgggtaacgactgggactccgcaactaagcagttgcttgggctacaacccatctcgacggtgtctcccctccacagggtccttcactattcgcagggcta

SEQ ID NO: 165139 - DNA, 5474 bp, Artificial Sequence
  derived and/or modified sequence
cgcccgcccagccccgggggcagggagagcctagattacggaagtaccgcgagcaaggagcgcggaatcggggagcgtccggagctagctggatcctctaggcaggatggtgatgggaatctttgcaaattgtatcttctgtttgaaagtgaagtacttacctcagcagcagaagaaaaagctacaaactgacattaaggaaaatggcggaaagttttccttttcgttaaatcctcagtgcacacatataatcttagataatgctgatgttctgagtcagtaccaactgaattctatccaaaagaaccacgttcatattgcaaacccagattttatatggaaatctatcagggaaaagagactcttggatgtaaagaattatgatccttataagcccctggacatcacaccacctcctgatcagaaggcgagcagttctgaagtgaaaacagaaggtctatgcccggacagtgccacagaggaggaagacactgtggaactcactgagtttggtatgcagaatgttgaaattcctcatcttcctcaagattttgaagttgcaaaatataacaccttggagaaagtgggaatggagggaggccaggaagctgtggtggtggagcttcagtgttcgcgggactccagggactgtcctttcctgatatcctcacacttcctcctggatgatggcatggagactagaagacagtttgctataaagaaaacctctgaagatgcaagtgaatactttgaaaattacattgaagaactgaagaaacaaggatttctactaagagaacatttcacacctgaagcaacccaattagcatctgaacaattgcaagcattgcttttggaggaagtcatgaattcaagcactctgagccaagaggtgagcgatttagtagagatgatttgggcagaggccctgggccacctggaacacatgcttctcaagccagtgaacaggattagcctcaacgatgtgagcaaggcagaggggattctccttctagtaaaggcagcactgaaaaatggagaaacagcagagcaattgcaaaagatgatgacagagttttacagactgatacctcacaaaggcacaatgcccaaagaagtgaacctgggactattggctaagaaagcagacctctgccagctaataagagacatggttaatgtctgtgaaactaatttgtccaaacccaacccaccatccctggccaaataccgagctttgaggtgcaaaattgagcatgttgaacagaatactgaagaatttctcagggttagaaaagaggttttgcagaatcatcacagtaagagcccagtggatgtcttgcagatatttagagttggcagagtgaatgaaaccacagagtttttgagcaaacttggtaatgtgaggcccttgttgcatggttctcctgtacaaaacatcgtgggaatcttgtgtcgagggttgcttttacccaaagtagtggaagatcgtggtgtgcaaagaacagacgtcggaaaccttggaagtgggatttatttcagtgattcgctcagtacaagtatcaagtactcacacccgggagagacagatggcaccagactcctgctcatttgtgacgtagccctcggaaagtgtatggacttacatgagaaggacttttccttaactgaagcaccaccaggctacgacagtgtgcatggagtttcgcaaacagcctctgtcaccacagactttgaggatgatgaatttgttgtctataaaaccaatcaggttaaaatgaaatatattattaaattttccatgcctggagatcagataaaggactttcatcctagtgatcatactgaattagaggaatacagacctgagttttcaaatttttcaaaggttgaagattaccagttaccagatgccaaaacttccagcagcaccaaggccggcctccaggatgcctctgggaacttggttcctctggaggatgtccacatcaaagggagaatcatagacactgtagcccaggtcattgtttttcagacatacacaaataaaagtcacgtgcccattgaggcaaaatatatctttcctttggatgacaaggccgctgtgtgtggcttcgaagccttcatcaatgggaagcacatagttggagagattaaagagaaggaagaagcccagcaagagtacctagaagccgtgacccagggccatggcgcttacctgatgagtcaggatgctccggacgtttttactgtaagtgttggaaacttaccccctaaggctaaggttcttataaaaattacctacatcacagaactcagcatcctgggcactgttggtgtctttttcatgcccgccaccgtagcaccctggcaacaggacaaggctttgaatgaaaaccttcaggatacagtagagaagatttgtataaaagaaataggaacaaagcaaagcttctctttgactatgtctattgagatgccgtatgtgattgaattcattttcagtgatacacatgaactgaaacaaaagcgcacagactgcaaagctgtcattagcaccatggaaggcagctccttagacagcagtggattttctctccacatcggtttgtctgctgcctatctcccaagaatgtgggttgaaaaacatccagaaaaagaaagcgaggcttgcatgcttgtctttcaacccgatctcgatgtcgacctccctgacctagccagtgagagcgaagtgattatttgtcttgactgctccagttccatggagggtgtgacattcttgcaagccaagcaaatcgccttgcatgcgctgtccttggtgggtgagaagcagaaagtaaatattatccagttcggcacaggttacaaggagctattttcgtatcctaagcatatcacaagcaataccatggcagcagagttcatcatgtctgccacacctaccatggggaacacagacttctggaaaacactccgatatcttagcttattgtaccctgctcgagggtcacggaacatcctcctggtgtctgatgggcacctccaggatgagagcctgacattacagctcgtgaagaggagccgcccgcacaccaggttattcgcctgcggtatcggttctacagcaaatcgtcacgtcttaaggattttgtcccagtgtggtgccggagtatttgaatattttaatgcaaaatccaagcatagttggagaaaacagatagaagaccaaatgaccaggctatgttctccgagttgccactctgtctccgtcaaatggcagcaactcaatccagatgtgcccgaggccctgcaggccccagcccaggtgccgtccttgtttctcaatgatcgactccttgtctatggattcattcctcactgcacacaggcaactctgtgtgcactaattcaagagaaagaatttcgtacaatggtgtcgactactgagcttcagaagacaactggaactatgatccacaagctggcagcccgagctctaatcagagattatgaagatggcattcttcacgaaaatgaaaccagtcatgagatgaaaaaacaaaccttgaaatctctgattattaaactcagtaaagaaaactctctcataacacaatttacaagctttgtggcagttgagaaaagggatgagaatgagtcgccttttcctgatattccaaaagtttctgaacttattgccaaagaagatgtagacttcctgccctacatgagctggcagggggagccccaagaagccgtcaggaaccagtctcttttagcatcctctgagtggccagaattacgtttatccaaacgaaaacataggaaaattccattttccaaaagaaaaatggaattatctcagccagaagtttctgaagattttgaagaggatggcttaggtgtactaccagctttcacatcaaatttggaacgtggaggtgtggaaaagctattggatttaagttggacagagtcatgtaaaccaacagcaactgaaccactatttaagaaagtcagtccatgggaaacatctacttctagcttttttcctattttggctccggccgttggttcctatcttcccccgactgcccgcgctcacagtcctgcttccttgtcttttgcctcatatcgtcaggtagctagtttcggttcagctgctcctcccagacagtttgatgcatctcaattcagccaaggccctgtgcctggcacttgtgctgactggatcccacagtcggcgtcttgtcccacaggacctccccagaacccaccttcttcaccctattgtggcattgttttttcagggagctcattaagctctgcacagtctgctccactgcaacatcctggaggctttactaccaggccttctgctggcaccttccctgagctggattctccccagcttcatttctctcttcctacagaccctgatcccatcagaggttttgggtcttatcatccctctgcttcctctccttttcattttcaaccttccgcagcctctttgactgccaaccttaggctgccaatggcctctgctttacctgaggctctttgcagtcagtcccggactaccccagtagatctctgtcttctagaagaatcagtaggcagtctcgaaggaagtcgatgtcctgtctttgcttttcaaagttctgacacagaaagtgatgagctatcagaagtacttcaagacagctgctttttacaaataaaatgtgatacaaaagatgacagtatcctgtgctttctggaagtaaaagaagaggatgaaatagtgtgcatacaacactggcaggatgctgtgccttggacagaactcctcagtctacagacagaggatggcttctggaaacttacaccagaactgggacttatattaaatcttaatacaaatggtttgcacagctttcttaaacaaaaaggcattcaatctctaggtgtaaaaggaagagaatgtctcctggacctaattgccacaatgctggtactacagtttattcgcaccaggttggaaaaagagggaatagtgttcaaatcactgatgaaaatggatgacgcttctatttccaggaatattccctgggcttttgaggcaataaagcaagcaagtgaatgggtaagaagaactgaaggacagtacccatctatctgcccacggcttgaactggggaacgactgggactctgccaccaagcagttgctgggactccagcccataagcactgtgtcccctcttcatagagtcctccattacagtcaaggctaagtcaaatgaaactgaattttaaactttttgcatgcttctatgtagaaaataatcaaatgataatagatacttataatgaaacttcattaaggtttcattcagtgtagcaattactgtctttaaaaattaagtggaagaagaattactttaatcaactaacaagcaataataaaatgaaacttaaaatatttca

SEQ ID NO: 165140 - DNA, 207 bp, Artificial Sequence
  derived and/or modified sequence
tgactgtgcatgggcatcatcctgatcctgagcgccagaagcacccaggagatcgagatcaactacaccagaatctgcgccaactgcgccaagctgagagagaacgccagcaacttcgacaaggagtgcacctgcagcatccccttctacctgagcggcaagatgatggtgggcgagatccaggagaccagactgaccctgcactag

SEQ ID NO: 165141 - protein, 277 aa, Artificial Sequence
  derived and/or modified sequence
MNGFASLLRRNQFILLVLFLLQIQSLGLDIDSRPTAEVCATHTISPGPKGDDGEKGDPGEEGKHGKVGRMGPKGIKGELGDMGDQGNIGKTGPIGKKGDKGEKGLLGIPGEKGKAGTVCDCGRYRKFVGQLDISIARLKTSMKFVKNVIAGIRETEEKFYYIVQEEKNYRESLTHCRIRGGMLAMPKDEAANTLIADYVAKSGFFRVFIGVNDLEREGQYMFTDNTPLQNYSNWNEGEPSDPYGHEDCVEMLSSGRWNDTECHLTMYFVCEFIKKKK

SEQ ID NO: 165142 - DNA, 834 bp, Artificial Sequence
  derived and/or modified sequence
atgaacggattcgcgtcgctccttcgtcggaatcagttcattctgttggtacttttcctcctccaaatccagagtctgggcctggacatcgacagccgtcccactgccgaggtgtgtgccactcatacaataagccctggccccaagggcgacgatggggaaaagggcgatcctggggaagaaggtaaacacggcaaggtggggcgtatgggcccaaaggggattaagggggagctaggagatatgggtgatcaagggaatatcgggaagacaggaccaatcgggaagaagggggataaaggcgagaagggtcttttaggtattccaggcgagaaggggaaagctggcacggtgtgtgattgcgggaggtatcgcaagtttgtcggacagctcgacatcagcatcgctagactgaagacttctatgaagtttgttaagaatgtgatcgccggtatacgggagacagaagagaagttttactatattgttcaagaggagaaaaattacagagagtccctgacccattgtaggatccgtggtgggatgctcgccatgcccaaagatgaagctgccaacactctgatcgccgattatgtcgctaagtcaggtttttttagggtatttataggagtaaacgacctcgagagagagggtcagtatatgttcaccgacaatactcccctacagaactactctaattggaatgagggagaaccctcagacccatacgggcacgaagactgtgttgaaatgctgagcagtggacgatggaatgacacagagtgccatttgaccatgtatttcgtatgtgagttcattaagaaaaaaaagtag

SEQ ID NO: 165143 - DNA, 834 bp, Artificial Sequence
  derived and/or modified sequence
atgaatggatttgccagcctgctgcggaggaaccagttcatcctgctggtgctcttcctgctgcagatccagagcctgggcctggacatcgacagccggcccacagctgaggtgtgtgccacccacaccatcagccctggccccaagggagatgatggagagaagggggaccccggggaggagggcaagcacggcaaggtgggccgcatgggccccaagggcatcaagggggagctgggggacatgggagaccagggcaacatcggcaagacaggccccatcggcaagaagggggacaagggggagaagggcctgctgggcatccctggagagaagggcaaggccggcaccgtgtgtgactgtggccgctacaggaagtttgtgggccagctggacatcagcatcgcccggctgaagacctccatgaagtttgtgaagaatgtgattgctggcatccgggagacagaggagaagttctactacatcgtgcaggaggagaagaactaccgggagagcctgacccactgccgcatccggggcggcatgctggccatgcccaaggatgaggccgccaacaccctgattgctgactatgtggccaagagcggcttcttccgggtcttcatcggcgtgaatgacctggagcgggagggccagtacatgttcacagacaacacccccctgcagaactacagcaactggaatgaaggagagcccagcgacccctacggccacgaggactgtgtggagatgctgagcagcggccgctggaatgacacagagtgccacctgaccatgtactttgtgtgtgagttcatcaagaagaagaagtag

SEQ ID NO: 165144 - DNA, 834 bp, Artificial Sequence
  derived and/or modified sequence
atgaacggcttcgccagcctgctgcggcggaaccagttcatcctgctggttctttttctgctgcagatccagagtttagggcttgatatcgacagtagacccaccgccgaagtctgtgctacacatacaatctcacccggccctaagggcgatgacggggagaaaggagacccaggcgaggagggcaagcacgggaaggtcggtcggatgggccctaaagggataaagggggaactgggggacatgggagaccagggaaacattggcaagaccggtcccatagggaagaaaggggacaaaggggagaaaggcctcttgggcattccgggagagaaaggtaaggctggtactgtgtgcgactgcgggcgataccggaagtttgtcggccagctggacataagtatagccagactgaaaacaagcatgaagttcgtcaagaatgtgattgccggaatccgggaaaccgaggagaaattttattacatcgttcaggaggagaaaaattaccgcgagtcactgacccactgccgtattcgggggggaatgctggccatgcctaaagatgaagcagctaacactctcattgccgattatgtggctaagagcggtttctttagagtattcataggtgtgaatgatttagagcgcgaaggtcaatacatgtttactgataatacgcccctgcagaattattcaaactggaatgaaggcgagccgagcgatccgtacggccatgaggactgtgtcgaaatgttaagctctgggcggtggaatgataccgagtgtcatctgaccatgtattttgtttgcgaatttatcaagaaaaagaagtag

SEQ ID NO: 165145 - DNA, 834 bp, Artificial Sequence
  derived and/or modified sequence
atgaatggattcgccagtctgctcagaagaaaccagttcatcctgttagtgctcttcctcctgcaaattcagagccttgggctggacatcgattctcgccctaccgccgaggtgtgtgctacacatacgataagccctggccctaaaggagatgatggggaaaagggcgaccccggagaggaagggaaacatggcaaggtgggtcggatgggcccaaagggaataaagggggaactcggcgacatgggagatcagggaaacattggaaagacgggtccaattgggaaaaaaggcgacaagggagaaaaaggcctgctcggcattccgggagaaaagggcaaagctggcacagtgtgtgactgcggcagataccgaaagtttgtgggccagttggatatatcaattgcacggctgaagacttcaatgaaattcgtcaaaaacgtgatcgctggaatccgtgagaccgaggagaaattttactacattgtgcaggaggagaaaaactaccgggagtccctcacccactgtcgtattcggggtggtatgttagctatgcccaaagacgaggcggctaataccctgatcgctgactacgtcgccaagagcggctttttccgggtcttcattggcgtgaacgaccttgagcgcgagggccagtacatgttcaccgataacacgccattacagaattactcaaactggaatgagggagagccatcagacccctacggtcatgaggactgcgtggagatgcttagctctggcagatggaacgataccgaatgtcatttaacaatgtactttgtctgcgaattcattaaaaagaaaaagtag

SEQ ID NO: 165146 - DNA, 1266 bp, Artificial Sequence
  derived and/or modified sequence
tttggcatttctgggagacccttttctgaggaaccacagcaatgaatggctttgcatccttgcttcgaagaaaccaatttatcctcctggtactatttcttttgcaaattcagagtctgggtctggatattgatagccgtcctaccgctgaagtctgtgccacacacacaatttcaccaggacccaaaggagatgatggtgaaaaaggagatccaggagaagagggaaagcatggcaaagtgggacgcatggggccgaaaggaattaaaggagaactgggtgatatgggagatcagggcaatattggcaagactgggcccattgggaagaagggtgacaaaggggaaaaaggtttgcttggaatacctggagaaaaaggcaaagcaggtactgtctgtgattgtggaagataccggaaatttgttggacaactggatattagtattgctcggctcaagacatctatgaagtttgtcaagaatgtgatagcagggattagggaaactgaagagaaattctactacatcgtgcaggaagagaagaactacagggaatccctaacccactgcaggattcggggtggaatgctagccatgcccaaggatgaagctgccaacacactcatcgctgactatgttgccaagagtggcttctttcgggtgttcattggcgtgaatgaccttgaaagggagggacagtacatgttcacagacaacactccactgcagaactatagcaactggaatgagggggaacccagcgacccctatggtcatgaggactgtgtggagatgctgagctctggcagatggaatgacacagagtgccatcttaccatgtactttgtctgtgagttcatcaagaagaaaaagtaacttccctcatcctacgtatttgctattttcctgtgaccgtcattacagttattgttatccatcctttttttcctgattgtactacatttgatctgagtcaacatagctagaaaatgctaaactgaggtatggagcctccatcatcatgctcttttgtgatgattttcatattttcacacatggtatattattgacccaataactcgccaggttacatgggtcttgagagagaattttaattactaattgtgcacgagatagttggttgtctatatgtcaaatgagttgttctcttggtatttgctctaccatctctccctagagcactctgtgtctatcccagtggataatttcccagtttactggtgatgattaggaaggttgttgatgg

SEQ ID NO: 165147 - DNA, 834 bp, Artificial Sequence
  derived and/or modified sequence
atgaacggcttcgccagcctgctgagaagaaaccagttcatcctgctggtgctgttcctgctgcagatccagagcctgggcctggacatcgacagcagacccaccgccgaggtgtgcgccacccacaccatcagccccggccccaagggcgacgacggcgagaagggcgaccccggcgaggagggcaagcacggcaaggtgggcagaatgggccccaagggcatcaagggcgagctgggcgacatgggcgaccagggcaacatcggcaagaccggccccatcggcaagaagggcgacaagggcgagaagggcctgctgggcatccccggcgagaagggcaaggccggcaccgtgtgcgactgcggcagatacagaaagttcgtgggccagctggacatcagcatcgccagactgaagaccagcatgaagttcgtgaagaacgtgatcgccggcatcagagagaccgaggagaagttctactacatcgtgcaggaggagaagaactacagagagagcctgacccactgcagaatcagaggcggcatgctggccatgcccaaggacgaggccgccaacaccctgatcgccgactacgtggccaagagcggcttcttcagagtgttcatcggcgtgaacgacctggagagagagggccagtacatgttcaccgacaacacccccctgcagaactacagcaactggaacgagggcgagcccagcgacccctacggccacgaggactgcgtggagatgctgagcagcggcagatggaacgacaccgagtgccacctgaccatgtacttcgtgtgcgagttcatcaagaagaagaagtag

SEQ ID NO: 165148 - protein, 359 aa, Artificial Sequence
  derived and/or modified sequence
MIAAQAKLVYQLNKYYTERCQARKAAIAKTIREVCKVVSDVLKEVEVQEPRFISSLSEIDARYEGLEVISPTEFEVVLYLNQMGVFNFVDDGSLPGCAVLKLSDGRKRSMSLWVEFITASGYLSARKIRSRFQTLVAQAVDKCSYRDVVKMIADTSEVKLRIRERYVVQITPAFKCTGIWPRSAAQWPMPHIPWPGPNRVAEVKAEGFNLLSKECYSLTGKQSSAESDAWVLQFGEAENRLLMGGCRNKCLSVLKTLRDRHLELPGQPLNNYHMKTLLLYECEKHPRETDWDESCLGDRLNGILLQLISCLQCRRCPHYFLPNLDLFQGKPHSALESAAKQTWRLAREILTNPKSLDKL

SEQ ID NO: 165149 - DNA, 2767 bp, Artificial Sequence
  derived and/or modified sequence
ggagagagagaaagaaagagagagggagagagagagacagagagagttagaggaaagaagagagagcgagcacgaggaaggggggcgggggagagaagcagggggagagcggggcgagaaagaggtcggaggggagaggagggggagagacgactcagaaagtggaatctgtaaaagcaagctagaggagaagaaggaaaaccctgaatcgttataactacaccccagatgcaacgcaagcaacgacttcgtcacactaaaacggattttgtgagggccaaaagtataaattacgaagcagaaatgattatcaaacaacttccagcggtttgcacctaaagaaacacaaggagaacccactacaaacaaacaaacccagtccaaacaacgcctccagtaggaaaagaggaaaactgcgataacacgaccccccgagaagagacgagaccaacacgctgagactgtggggcgtcagcaaacctccaagtgcacggcggactgagttgtacttcgcagctctctggacattaattacctcctgcaccttccatttgggggagggtgaggaagaaggcactcacctacactgagcgaagaagtcctatcagcgtggaagagaagtttaagaatgaaccactgaatgtttcgcttttatttttaaatttactttggcacttaaaaaacctcatttccagatttctggacaatctcggctgcagacatctaagcctaaccttttggtatcctgagttttttccctctccttctccttcctcacgcccaccccgcttctctcgcacacggtcatctttacatatcaagagaaagcaaaaaggttccaagaggtacttttctttttagaaaatcaccttttctcccctaattcttctgcagaagaaaagaggtttcgaaagagggaaaaggaaaaaacaagccggctacggtatcagccggtcagcccaggtggaaaacgagagtgaaagtagggcttaacggggagcgcaccgcctctttcgaaagccgctgggccaccaccagtgcgtgagccttggatccctcaacgtattgcgagacgccggtgtatagcccggacctgtgccccaacatgatcgccgctcaggccaagctggtttaccagctcaataagtactacactgagcgctgtcaggcgcgcaaggcggccatcgccaaaaccatccgagaggtctgtaaggtggtctcggacgtgctcaaggaagtggaggtgcaggagcctcgcttcatcagctccttgagcgagatcgatgcccgctacgaggggctcgaggtcatttcgcccaccgaatttgaggtggtgctctacctaaaccagatgggcgtcttcaacttcgtggacgacggctcgctgcccggctgcgcagtgctcaaactgagcgatgggcggaagcggagcatgtctctctgggtcgagttcatcacggcgtcgggctatctctcagcgcgtaagatccgctcgcgtttccagacgctggtggcccaggcggtggacaagtgcagctatcgggatgtggtcaagatgatcgcggacaccagcgaggtcaagttgcgcatcagggagcgctatgtggtgcaaatcactccggcgttcaagtgcaccgggatctggcctcgcagcgcggcacagtggcctatgccccacatcccttggcccggccccaatcgggtggccgaggtcaaggccgaagggttcaacttgctctcgaaggagtgctactcgctgaccggcaagcagagctcggcagagagcgacgcctgggtgctacagttcggggaggcggagaaccgcctgctgatgggcggctgccgaaacaagtgcctctcagtgctgaagactctgcgggaccgccacctggagctacccggccagccgctcaacaactaccacatgaagacgctgctgctgtacgagtgcgagaaacacccacgagaaacggactgggacgagtcgtgcctgggcgaccggctcaacggcatcctgctgcagctcatctcctgcctgcagtgccgccgctgccctcactactttctgcccaacctcgacctctttcagggcaagccccattcggccctggagagcgctgccaagcagacctggaggttggccagggaaattctcaccaatcccaaaagcctggacaaactatagggtgctggggactgcttgaaaagcgacacaaacgggcgtgctctctcagacacacaactctgctataaacagcagaaactctggacacaaacttttatgtaagtcacctgaaataggaatccggcagaagaccttcattaattaagaagcaaacaaaaagagagcaacccaaccaaaacaaatcacattcttgcacaaaagtgatcgttttcttccaaacaatgtgaatttaaaaggtcacacaaaagaagcaatcgggctccgccaccacaaaatgaaacccaaggtacattttcaaatcaatgtatagtagttccccccccttttccttctttccccctatcctttttctctccaccccatccccccccccatttcgttttgcttttggttgcctgaatgttgtcaccaagtgaaaaaattatttaactatatgtaaaatttctcttttaaaaaaaagttttactgatgttaaacgttctcagtgccaatgtcagactgtgctcctccctctcctgaacctctaccctcaccctgagctgtcttgttgaaaacagtaataaaaacattactttacattgt

SEQ ID NO: 165150 - DNA, 1080 bp, Artificial Sequence
  derived and/or modified sequence
atgatcgccgcccaggccaagctggtgtatcagcttaataaatactacactgagcgttgtcaggcccggaaagccgcgatcgcaaagaccatcagagaggtctgtaaagtggtgagcgacgtgctgaaggaggtcgaggttcaggaaccacgcttcatctcaagcttaagcgaaattgacgcacgttatgaagggctagaggtcatttcacctacagagtttgaggtggtcctgtacctgaatcagatgggagtgtttaacttcgtggatgatggttctctgcccggctgtgcagtgctgaaactgtccgacggacggaaaagaagcatgagtttgtgggtggagtttatcaccgcttctggctacctatcagcacgcaagattcgcagtcgattccagacactagtggcccaagctgtggataaatgtagctacagggatgtggtgaagatgatcgctgatacctccgaggtcaaactccgaatcagggaacggtatgtggtgcagatcaccccagctttcaaatgcaccggcatttggccacggtctgccgcacaatggcccatgcctcacattccttggcctgggcccaatcgtgttgcggaagttaaagccgaaggctttaacctcctaagcaaagaatgctatagtctcaccggtaagcagagcagcgctgaaagcgatgcatgggttctgcaatttggagaggcggagaatagattgctgatgggcgggtgtaggaacaagtgtctgagcgtattgaaaacattgagggataggcacctcgagctgcctgggcagcctctcaataattatcatatgaaaaccctcctgttatacgagtgtgagaagcacccgcgggaaaccgactgggatgagtcgtgcctaggcgaccgacttaacgggattctgcttcaattaatcagctgtctgcagtgccgacgttgccctcactattttctgcccaatcttgatctgttccagggcaagccacattctgctctcgagagcgcggccaaacaaacctggcgactggccagagagatcctgaccaatcccaagagtcttgataaattgtag

SEQ ID NO: 165151 - DNA, 1080 bp, Artificial Sequence
  derived and/or modified sequence
atgattgctgcccaggccaagctggtgtaccagctgaacaagtactacacagagcgctgccaggccaggaaggccgccatcgccaagaccatccgggaggtgtgcaaggtggtgtctgatgtgctgaaggaggtggaggtgcaggagccccgcttcatcagcagcctgtctgaaattgatgcccgctatgagggcctggaggtgatcagccccacagaatttgaggtggtgctgtacctgaaccagatgggcgtcttcaactttgtggatgatggcagcctgcccggctgtgctgtgctgaagctgagtgatggcaggaagaggtccatgagcctgtgggtggagttcatcacagccagcggctacctgagcgccaggaagatccgcagccgcttccagaccctggtggcccaggccgtggacaagtgcagctacagagatgtggtgaagatgattgctgacaccagcgaggtgaagctgcgcatccgggagcgctacgtggtgcagatcaccccagccttcaagtgcaccggcatctggcccaggtctgctgcccagtggcccatgccccacatcccctggccaggccccaacagagtggccgaggtgaaggccgagggcttcaacctgctgagcaaggagtgctacagcctgaccgggaagcagagcagcgctgagagtgatgcctgggtgctgcagtttggagaggccgagaaccggctgctgatgggcggctgcaggaacaagtgcctgtctgtgctgaagaccctgcgggacagacacctggagctgcccggccagcccctgaacaactaccacatgaagaccctgctgctgtatgaatgtgagaagcacccccgggagacagactgggatgagagctgcctgggggaccggctgaatggcatcctgctgcagctgatcagctgcctgcagtgccgccgctgcccccactacttcctgcccaacctggacctcttccagggcaagccccacagcgccctggagagcgctgccaagcagacctggaggctggcccgggagatcctgaccaaccccaagagcctggacaagctgtag

SEQ ID NO: 165152 - DNA, 1080 bp, Artificial Sequence
  derived and/or modified sequence
atgatcgccgcccaggccaagctggtgtaccagctgaacaagtactacacagagcgctgccaggcccgaaaggctgcgattgctaaaacgattagagaagtgtgtaaggtggtttctgacgttctgaaggaagtggaggtccaggaaccgagatttataagtagcctgtccgagatagatgcaaggtacgaagggctcgaggtgatctctcctacagagttcgaggttgtgctatacctgaaccagatgggcgtttttaattttgtggacgacgggagcctcccaggctgcgccgttttaaaattatcagacgggcgcaaaagatctatgtcactgtgggtcgaattcataaccgccagtggctatttatcggctaggaaaatccgatcacggttccagacgctggtggcccaggccgtggacaagtgttcttatcgggacgtcgtgaagatgatcgccgacaccagtgaagttaagctgaggattcgtgagcggtatgtggttcaaatcacgccagcatttaagtgtaccggcatctggcctcgaagtgccgcccagtggccaatgccccacatcccttggccgggccctaatcgggttgccgaagttaaggcagaggggttcaacctgctaagcaaagagtgttatagtctcactgggaaacagagctctgccgagtccgatgcatgggtgttgcagttcggtgaggcagaaaaccgcctgctaatgggcggatgccggaataaatgcctttcagtcctgaaaactctccgggataggcacctggagctcccagggcagcctttaaataattatcatatgaaaacgctcttgttgtacgaatgcgaaaaacacccacgagagactgactgggatgaaagctgtctgggtgacagattgaatgggatcctgttgcagctgattagctgtctgcaatgcagacgctgccctcattacttcctccccaatttagatctgtttcaaggcaaacctcactcagctttggagagtgctgctaagcagacctggaggctcgccagagaaatcctgaccaatcccaaatcactcgacaagttgtag

SEQ ID NO: 165153 - DNA, 1080 bp, Artificial Sequence
  derived and/or modified sequence
atgattgccgctcaagcaaagctagtgtaccaactcaacaagtattatactgaacgctgccaggctagaaaggccgctatcgcgaaaacgattcgcgaggtctgtaaggtggttagcgatgttttgaaagaggtggaggtccaggaaccaagattcatctcatcattgtcagagattgatgctcgctatgagggcctcgaagtaatcagcccaacagaattcgaggtggtcctttacctgaaccagatgggtgtcttcaatttcgtagacgacggcagcttgcccggatgcgccgtgctcaaactctctgacggcagaaaacggtccatgtccctgtgggtggagttcataaccgcctccggctatctttccgccagaaaaattaggtcacggtttcaaaccctggttgcccaagccgtggacaagtgctcctacagagacgtggttaagatgatagcagataccagcgaggtgaagctgcgtatccgcgaacgatacgtagttcagatcacaccagcctttaagtgcacaggtatctggccccgaagtgcagcccaatggcccatgccacacattccatggccgggacccaaccgtgttgccgaggtaaaggctgaaggattcaatctgctcagcaaggagtgctatagcctaacaggcaagcagtcttccgcggaatccgatgcttgggtgctgcagtttggcgaggccgagaatcggctgctcatgggcggatgccgcaataagtgtttgtctgtgcttaaaactttaagagaccgtcacttagagctgcctggtcagccactaaacaactatcacatgaagactctgctcttatacgaatgtgagaaacacccaagggagactgactgggacgagtcctgcttaggtgaccgtctaaatggaatcttgctgcagctcatctcctgtctccaatgcagacgctgtccacattatttcctgcccaaccttgacctctttcaggggaaaccacattcagcgctcgaaagcgcagccaagcaaacttggcgactggccagggaaatcttgacgaatccaaaatcacttgacaagctctag

SEQ ID NO: 165154 - DNA, 1080 bp, Artificial Sequence
  derived and/or modified sequence
atgatcgccgcccaggccaagctggtgtaccagctgaacaagtactacaccgagagatgccaggccagaaaggccgccatcgccaagaccatcagagaggtgtgcaaggtggtgagcgacgtgctgaaggaggtggaggtgcaggagcccagattcatcagcagcctgagcgagatcgacgccagatacgagggcctggaggtgatcagccccaccgagttcgaggtggtgctgtacctgaaccagatgggcgtgttcaacttcgtggacgacggcagcctgcccggctgcgccgtgctgaagctgagcgacggcagaaagagaagcatgagcctgtgggtggagttcatcaccgccagcggctacctgagcgccagaaagatcagaagcagattccagaccctggtggcccaggccgtggacaagtgcagctacagagacgtggtgaagatgatcgccgacaccagcgaggtgaagctgagaatcagagagagatacgtggtgcagatcacccccgccttcaagtgcaccggcatctggcccagaagcgccgcccagtggcccatgccccacatcccctggcccggccccaacagagtggccgaggtgaaggccgagggcttcaacctgctgagcaaggagtgctacagcctgaccggcaagcagagcagcgccgagagcgacgcctgggtgctgcagttcggcgaggccgagaacagactgctgatgggcggctgcagaaacaagtgcctgagcgtgctgaagaccctgagagacagacacctggagctgcccggccagcccctgaacaactaccacatgaagaccctgctgctgtacgagtgcgagaagcaccccagagagaccgactgggacgagagctgcctgggcgacagactgaacggcatcctgctgcagctgatcagctgcctgcagtgcagaagatgcccccactacttcctgcccaacctggacctgttccagggcaagccccacagcgccctggagagcgccgccaagcagacctggagactggccagagagatcctgaccaaccccaagagcctggacaagctgtag

SEQ ID NO: 165155 - protein, 494 aa, Artificial Sequence
  derived and/or modified sequence
MEDQAGQRDYDLLVVGGGSGGLACAKEAAQLGRKVAVVDYVEPSPQGTRWGLGGTCVNVGCIPKKLMHQAALLGGLIQDAPNYGWEVAQPVPHDWRKMAEAVQNHVKSLNWGHRVQLQDRKVKYFNIKASFVDEHTVCGVAKGGKEILLSADHIIIATGGRPRYPTHIEGALEYGITSDDIFWLKESPGKTLVVGASYVALECAGFLTGIGLDTTIMMRSIPLRGFDQQMSSMVIEHMASHGTRFLRGCAPSRVRRLPDGQLQVTWEDSTTGKEDTGTFDTVLWAIGRVPDTRSLNLEKAGVDTSPDTQKILVDSREATSVPHIYAIGDVVEGRPELTPIAIMAGRLLVQRLFGGSSDLMDYDNVPTTVFTPLEYGCVGLSEEEAVARHGQEHVEVYHAHYKPLEFTVAGRDASQCYVKMVCLREPPQLVLGLHFLGPNAGEVTQGFALGIKCGASYAQVMRTVGIHPTCSEEVVKLRISKRSGLDPTVTGCCG

SEQ ID NO: 165156 - protein, 524 aa, Artificial Sequence
  derived and/or modified sequence
MAAMAVALRGLGGRFRWRTQAVAGGVRGAARGAAAGQRDYDLLVVGGGSGGLACAKEAAQLGRKVAVVDYVEPSPQGTRWGLGGTCVNVGCIPKKLMHQAALLGGLIQDAPNYGWEVAQPVPHDWRKMAEAVQNHVKSLNWGHRVQLQDRKVKYFNIKASFVDEHTVCGVAKGGKEILLSADHIIIATGGRPRYPTHIEGALEYGITSDDIFWLKESPGKTLVVGASYVALECAGFLTGIGLDTTIMMRSIPLRGFDQQMSSMVIEHMASHGTRFLRGCAPSRVRRLPDGQLQVTWEDSTTGKEDTGTFDTVLWAIGRVPDTRSLNLEKAGVDTSPDTQKILVDSREATSVPHIYAIGDVVEGRPELTPIAIMAGRLLVQRLFGGSSDLMDYDNVPTTVFTPLEYGCVGLSEEEAVARHGQEHVEVYHAHYKPLEFTVAGRDASQCYVKMVCLREPPQLVLGLHFLGPNAGEVTQGFALGIKCGASYAQVMRTVGIHPTCSEEVVKLRISKRSGLDPTVTGCCG

SEQ ID NO: 165157 - protein, 521 aa, Artificial Sequence
  derived and/or modified sequence
MAAMAVALRGLGGRFRWRTQAVAGGVRGAARGAAGQRDYDLLVVGGGSGGLACAKEAAQLGRKVAVVDYVEPSPQGTRWGLGGTCVNVGCIPKKLMHQAALLGGLIQDAPNYGWEVAQPVPHDWRKMAEAVQNHVKSLNWGHRVQLQDRKVKYFNIKASFVDEHTVCGVAKGGKEILLSADHIIIATGGRPRYPTHIEGALEYGITSDDIFWLKESPGKTLVVGASYVALECAGFLTGIGLDTTIMMRSIPLRGFDQQMSSMVIEHMASHGTRFLRGCAPSRVRRLPDGQLQVTWEDSTTGKEDTGTFDTVLWAIGRVPDTRSLNLEKAGVDTSPDTQKILVDSREATSVPHIYAIGDVVEGRPELTPIAIMAGRLLVQRLFGGSSDLMDYDNVPTTVFTPLEYGCVGLSEEEAVARHGQEHVEVYHAHYKPLEFTVAGRDASQCYVKMVCLREPPQLVLGLHFLGPNAGEVTQGFALGIKCGASYAQVMRTVGIHPTCSEEVVKLRISKRSGLDPTVTGC

SEQ ID NO: 165158 - protein, 522 aa, Artificial Sequence
  derived and/or modified sequence
MAAMAVALRGLGGRFRWRTQAVAGGVRGAARGAAAGQRDYDLLVVGGGSGGLACAKEAAQLGRKVAVVDYVEPSPQGTRWGLGGTCVNVGCIPKKLMHQAALLGGLIQDAPNYGWEVAQPVPHDWRKMAEAVQNHVKSLNWGHRVQLQDRKVKYFNIKASFVDEHTVCGVAKGGKEILLSADHIIIATGGRPRYPTHIEGALEYGITSDDIFWLKESPGKTLPVSVSYVALECAGFLTGIGLDTTIMMRSIPLRGFDQQMSSMVIEHMASHGTRFLRGCAPSRVRRLPDGQLQVTWEDSTTGKEDTGTFDTVLWAIGRVPDTRSLNLEKAGVDTSPDTQKILVDSREATSVPHIYAIGDVVEGRPELTPIAIMAGRLLVQRLFGGSSDLMDYDNVPTTVFTPLEYGCVGLSEEEAVARHGQEHVEVYHAHYKPLEFTVAGRDASQCYVKMVCLREPPQLVLGLHFLGPNAGEVTQGFALGIKCGASYAQVMRTVGIHPTCSEEVVKLRISKRSGLDPTVTGC

SEQ ID NO: 165159 - protein, 426 aa, Artificial Sequence
  derived and/or modified sequence
MHQAALLGGLIQDAPNYGWEVAQPVPHDWRKMAEAVQNHVKSLNWGHRVQLQDRKVKYFNIKASFVDEHTVCGVAKGGKEILLSADHIIIATGGRPRYPTHIEGALEYGITSDDIFWLKESPGKTCVVAHAYVALECAGFLTGIGLDTTIMMRSIPLRGFDQQMSSMVIEHMASHGTRFLRGCAPSRVRRLPDGQLQVTWEDSTTGKEDTGTFDTVLWAIGRVPDTRSLNLEKAGVDTSPDTQKILVDSREATSVPHIYAIGDVVEGRPELTPIAIMAGRLLVQRLFGGSSDLMDYDNVPTTVFTPLEYGCVGLSEEEAVARHGQEHVEVYHAHYKPLEFTVAGRDASQCYVKMVCLREPPQLVLGLHFLGPNAGEVTQGFALGIKCGASYAQVMRTVGIHPTCSEEVVKLRISKRSGLDPTVTGC

SEQ ID NO: 165160 - protein, 492 aa, Artificial Sequence
  derived and/or modified sequence
MEDQAGQRDYDLLVVGGGSGGLACAKEAAQLGRKVAVVDYVEPSPQGTRWGLGGTCVNVGCIPKKLMHQAALLGGLIQDAPNYGWEVAQPVPHDWRKMAEAVQNHVKSLNWGHRVQLQDRKVKYFNIKASFVDEHTVCGVAKGGKEILLSADHIIIATGGRPRYPTHIEGALEYGITSDDIFWLKESPGKTLVVGASYVALECAGFLTGIGLDTTIMMRSIPLRGFDQQMSSMVIEHMASHGTRFLRGCAPSRVRRLPDGQLQVTWEDSTTGKEDTGTFDTVLWAIGRVPDTRSLNLEKAGVDTSPDTQKILVDSREATSVPHIYAIGDVVEGRPELTPIAIMAGRLLVQRLFGGSSDLMDYDNVPTTVFTPLEYGCVGLSEEEAVARHGQEHVEVYHAHYKPLEFTVAGRDASQCYVKMVCLREPPQLVLGLHFLGPNAGEVTQGFALGIKCGASYAQVMRTVGIHPTCSEEVVKLRISKRSGLDPTVTGC

SEQ ID NO: 165161 - DNA, 1485 bp, Artificial Sequence
  derived and/or modified sequence
atggaggaccaggccggccagagagactacgacctgctggtggtgggcggcggcagcggcggcctggcctgcgccaaggaggccgcccagctgggcagaaaggtggccgtggtggactacgtggagcccagcccccagggcaccagatggggcctgggcggcacctgcgtgaacgtgggctgcatccccaagaagctgatgcaccaggccgccctgctgggcggcctgatccaggacgcccccaactacggctgggaggtggcccagcccgtgccccacgactggagaaagatggccgaggccgtgcagaaccacgtgaagagcctgaactggggccacagagtgcagctgcaggacagaaaggtgaagtacttcaacatcaaggccagcttcgtggacgagcacaccgtgtgcggcgtggccaagggcggcaaggagatcctgctgagcgccgaccacatcatcatcgccaccggcggcagacccagataccccacccacatcgagggcgccctggagtacggcatcaccagcgacgacatcttctggctgaaggagagccccggcaagaccctggtggtgggcgccagctacgtggccctggagtgcgccggcttcctgaccggcatcggcctggacaccaccatcatgatgagaagcatccccctgagaggcttcgaccagcagatgagcagcatggtgatcgagcacatggccagccacggcaccagattcctgagaggctgcgcccccagcagagtgagaagactgcccgacggccagctgcaggtgacctgggaggacagcaccaccggcaaggaggacaccggcaccttcgacaccgtgctgtgggccatcggcagagtgcccgacaccagaagcctgaacctggagaaggccggcgtggacaccagccccgacacccagaagatcctggtggacagcagagaggccaccagcgtgccccacatctacgccatcggcgacgtggtggagggcagacccgagctgacccccatcgccatcatggccggcagactgctggtgcagagactgttcggcggcagcagcgacctgatggactacgacaacgtgcccaccaccgtgttcacccccctggagtacggctgcgtgggcctgagcgaggaggaggccgtggccagacacggccaggagcacgtggaggtgtaccacgcccactacaagcccctggagttcaccgtggccggcagagacgccagccagtgctacgtgaagatggtgtgcctgagagagcccccccagctggtgctgggcctgcacttcctgggccccaacgccggcgaggtgacccagggcttcgccctgggcatcaagtgcggcgccagctacgcccaggtgatgagaaccgtgggcatccaccccacctgcagcgaggaggtggtgaagctgagaatcagcaagagaagcggcctggaccccaccgtgaccggctgctgaggctag

SEQ ID NO: 165162 - DNA, 1575 bp, Artificial Sequence
  derived and/or modified sequence
atggccgccatggccgtggccctgagaggcctgggcggcagattcagatggagaacccaggccgtggccggcggcgtgagaggcgccgccagaggcgccgccgccggccagagagactacgacctgctggtggtgggcggcggcagcggcggcctggcctgcgccaaggaggccgcccagctgggcagaaaggtggccgtggtggactacgtggagcccagcccccagggcaccagatggggcctgggcggcacctgcgtgaacgtgggctgcatccccaagaagctgatgcaccaggccgccctgctgggcggcctgatccaggacgcccccaactacggctgggaggtggcccagcccgtgccccacgactggagaaagatggccgaggccgtgcagaaccacgtgaagagcctgaactggggccacagagtgcagctgcaggacagaaaggtgaagtacttcaacatcaaggccagcttcgtggacgagcacaccgtgtgcggcgtggccaagggcggcaaggagatcctgctgagcgccgaccacatcatcatcgccaccggcggcagacccagataccccacccacatcgagggcgccctggagtacggcatcaccagcgacgacatcttctggctgaaggagagccccggcaagaccctggtggtgggcgccagctacgtggccctggagtgcgccggcttcctgaccggcatcggcctggacaccaccatcatgatgagaagcatccccctgagaggcttcgaccagcagatgagcagcatggtgatcgagcacatggccagccacggcaccagattcctgagaggctgcgcccccagcagagtgagaagactgcccgacggccagctgcaggtgacctgggaggacagcaccaccggcaaggaggacaccggcaccttcgacaccgtgctgtgggccatcggcagagtgcccgacaccagaagcctgaacctggagaaggccggcgtggacaccagccccgacacccagaagatcctggtggacagcagagaggccaccagcgtgccccacatctacgccatcggcgacgtggtggagggcagacccgagctgacccccatcgccatcatggccggcagactgctggtgcagagactgttcggcggcagcagcgacctgatggactacgacaacgtgcccaccaccgtgttcacccccctggagtacggctgcgtgggcctgagcgaggaggaggccgtggccagacacggccaggagcacgtggaggtgtaccacgcccactacaagcccctggagttcaccgtggccggcagagacgccagccagtgctacgtgaagatggtgtgcctgagagagcccccccagctggtgctgggcctgcacttcctgggccccaacgccggcgaggtgacccagggcttcgccctgggcatcaagtgcggcgccagctacgcccaggtgatgagaaccgtgggcatccaccccacctgcagcgaggaggtggtgaagctgagaatcagcaagagaagcggcctggaccccaccgtgaccggctgctgaggctag

SEQ ID NO: 165163 - DNA, 1566 bp, Artificial Sequence
  derived and/or modified sequence
atggccgccatggccgtggccctgagaggcctgggcggcagattcagatggagaacccaggccgtggccggcggcgtgagaggcgccgccagaggcgccgccggccagagagactacgacctgctggtggtgggcggcggcagcggcggcctggcctgcgccaaggaggccgcccagctgggcagaaaggtggccgtggtggactacgtggagcccagcccccagggcaccagatggggcctgggcggcacctgcgtgaacgtgggctgcatccccaagaagctgatgcaccaggccgccctgctgggcggcctgatccaggacgcccccaactacggctgggaggtggcccagcccgtgccccacgactggagaaagatggccgaggccgtgcagaaccacgtgaagagcctgaactggggccacagagtgcagctgcaggacagaaaggtgaagtacttcaacatcaaggccagcttcgtggacgagcacaccgtgtgcggcgtggccaagggcggcaaggagatcctgctgagcgccgaccacatcatcatcgccaccggcggcagacccagataccccacccacatcgagggcgccctggagtacggcatcaccagcgacgacatcttctggctgaaggagagccccggcaagaccctggtggtgggcgccagctacgtggccctggagtgcgccggcttcctgaccggcatcggcctggacaccaccatcatgatgagaagcatccccctgagaggcttcgaccagcagatgagcagcatggtgatcgagcacatggccagccacggcaccagattcctgagaggctgcgcccccagcagagtgagaagactgcccgacggccagctgcaggtgacctgggaggacagcaccaccggcaaggaggacaccggcaccttcgacaccgtgctgtgggccatcggcagagtgcccgacaccagaagcctgaacctggagaaggccggcgtggacaccagccccgacacccagaagatcctggtggacagcagagaggccaccagcgtgccccacatctacgccatcggcgacgtggtggagggcagacccgagctgacccccatcgccatcatggccggcagactgctggtgcagagactgttcggcggcagcagcgacctgatggactacgacaacgtgcccaccaccgtgttcacccccctggagtacggctgcgtgggcctgagcgaggaggaggccgtggccagacacggccaggagcacgtggaggtgtaccacgcccactacaagcccctggagttcaccgtggccggcagagacgccagccagtgctacgtgaagatggtgtgcctgagagagcccccccagctggtgctgggcctgcacttcctgggccccaacgccggcgaggtgacccagggcttcgccctgggcatcaagtgcggcgccagctacgcccaggtgatgagaaccgtgggcatccaccccacctgcagcgaggaggtggtgaagctgagaatcagcaagagaagcggcctggaccccaccgtgaccggctgctag

SEQ ID NO: 165164 - DNA, 1569 bp, Artificial Sequence
  derived and/or modified sequence
atggccgccatggccgtggccctgagaggcctgggcggcagattcagatggagaacccaggccgtggccggcggcgtgagaggcgccgccagaggcgccgccgccggccagagagactacgacctgctggtggtgggcggcggcagcggcggcctggcctgcgccaaggaggccgcccagctgggcagaaaggtggccgtggtggactacgtggagcccagcccccagggcaccagatggggcctgggcggcacctgcgtgaacgtgggctgcatccccaagaagctgatgcaccaggccgccctgctgggcggcctgatccaggacgcccccaactacggctgggaggtggcccagcccgtgccccacgactggagaaagatggccgaggccgtgcagaaccacgtgaagagcctgaactggggccacagagtgcagctgcaggacagaaaggtgaagtacttcaacatcaaggccagcttcgtggacgagcacaccgtgtgcggcgtggccaagggcggcaaggagatcctgctgagcgccgaccacatcatcatcgccaccggcggcagacccagataccccacccacatcgagggcgccctggagtacggcatcaccagcgacgacatcttctggctgaaggagagccccggcaagaccctgcccgtgagcgtgagctacgtggccctggagtgcgccggcttcctgaccggcatcggcctggacaccaccatcatgatgagaagcatccccctgagaggcttcgaccagcagatgagcagcatggtgatcgagcacatggccagccacggcaccagattcctgagaggctgcgcccccagcagagtgagaagactgcccgacggccagctgcaggtgacctgggaggacagcaccaccggcaaggaggacaccggcaccttcgacaccgtgctgtgggccatcggcagagtgcccgacaccagaagcctgaacctggagaaggccggcgtggacaccagccccgacacccagaagatcctggtggacagcagagaggccaccagcgtgccccacatctacgccatcggcgacgtggtggagggcagacccgagctgacccccatcgccatcatggccggcagactgctggtgcagagactgttcggcggcagcagcgacctgatggactacgacaacgtgcccaccaccgtgttcacccccctggagtacggctgcgtgggcctgagcgaggaggaggccgtggccagacacggccaggagcacgtggaggtgtaccacgcccactacaagcccctggagttcaccgtggccggcagagacgccagccagtgctacgtgaagatggtgtgcctgagagagcccccccagctggtgctgggcctgcacttcctgggccccaacgccggcgaggtgacccagggcttcgccctgggcatcaagtgcggcgccagctacgcccaggtgatgagaaccgtgggcatccaccccacctgcagcgaggaggtggtgaagctgagaatcagcaagagaagcggcctggaccccaccgtgaccggctgctag

SEQ ID NO: 165165 - DNA, 1281 bp, Artificial Sequence
  derived and/or modified sequence
atgcaccaggccgccctgctgggcggcctgatccaggacgcccccaactacggctgggaggtggcccagcccgtgccccacgactggagaaagatggccgaggccgtgcagaaccacgtgaagagcctgaactggggccacagagtgcagctgcaggacagaaaggtgaagtacttcaacatcaaggccagcttcgtggacgagcacaccgtgtgcggcgtggccaagggcggcaaggagatcctgctgagcgccgaccacatcatcatcgccaccggcggcagacccagataccccacccacatcgagggcgccctggagtacggcatcaccagcgacgacatcttctggctgaaggagagccccggcaagacctgcgtggtggcccacgcctacgtggccctggagtgcgccggcttcctgaccggcatcggcctggacaccaccatcatgatgagaagcatccccctgagaggcttcgaccagcagatgagcagcatggtgatcgagcacatggccagccacggcaccagattcctgagaggctgcgcccccagcagagtgagaagactgcccgacggccagctgcaggtgacctgggaggacagcaccaccggcaaggaggacaccggcaccttcgacaccgtgctgtgggccatcggcagagtgcccgacaccagaagcctgaacctggagaaggccggcgtggacaccagccccgacacccagaagatcctggtggacagcagagaggccaccagcgtgccccacatctacgccatcggcgacgtggtggagggcagacccgagctgacccccatcgccatcatggccggcagactgctggtgcagagactgttcggcggcagcagcgacctgatggactacgacaacgtgcccaccaccgtgttcacccccctggagtacggctgcgtgggcctgagcgaggaggaggccgtggccagacacggccaggagcacgtggaggtgtaccacgcccactacaagcccctggagttcaccgtggccggcagagacgccagccagtgctacgtgaagatggtgtgcctgagagagcccccccagctggtgctgggcctgcacttcctgggccccaacgccggcgaggtgacccagggcttcgccctgggcatcaagtgcggcgccagctacgcccaggtgatgagaaccgtgggcatccaccccacctgcagcgaggaggtggtgaagctgagaatcagcaagagaagcggcctggaccccaccgtgaccggctgctag

SEQ ID NO: 165166 - DNA, 1479 bp, Artificial Sequence
  derived and/or modified sequence
atggaggaccaggccggccagagagactacgacctgctggtggtgggcggcggcagcggcggcctggcctgcgccaaggaggccgcccagctgggcagaaaggtggccgtggtggactacgtggagcccagcccccagggcaccagatggggcctgggcggcacctgcgtgaacgtgggctgcatccccaagaagctgatgcaccaggccgccctgctgggcggcctgatccaggacgcccccaactacggctgggaggtggcccagcccgtgccccacgactggagaaagatggccgaggccgtgcagaaccacgtgaagagcctgaactggggccacagagtgcagctgcaggacagaaaggtgaagtacttcaacatcaaggccagcttcgtggacgagcacaccgtgtgcggcgtggccaagggcggcaaggagatcctgctgagcgccgaccacatcatcatcgccaccggcggcagacccagataccccacccacatcgagggcgccctggagtacggcatcaccagcgacgacatcttctggctgaaggagagccccggcaagaccctggtggtgggcgccagctacgtggccctggagtgcgccggcttcctgaccggcatcggcctggacaccaccatcatgatgagaagcatccccctgagaggcttcgaccagcagatgagcagcatggtgatcgagcacatggccagccacggcaccagattcctgagaggctgcgcccccagcagagtgagaagactgcccgacggccagctgcaggtgacctgggaggacagcaccaccggcaaggaggacaccggcaccttcgacaccgtgctgtgggccatcggcagagtgcccgacaccagaagcctgaacctggagaaggccggcgtggacaccagccccgacacccagaagatcctggtggacagcagagaggccaccagcgtgccccacatctacgccatcggcgacgtggtggagggcagacccgagctgacccccatcgccatcatggccggcagactgctggtgcagagactgttcggcggcagcagcgacctgatggactacgacaacgtgcccaccaccgtgttcacccccctggagtacggctgcgtgggcctgagcgaggaggaggccgtggccagacacggccaggagcacgtggaggtgtaccacgcccactacaagcccctggagttcaccgtggccggcagagacgccagccagtgctacgtgaagatggtgtgcctgagagagcccccccagctggtgctgggcctgcacttcctgggccccaacgccggcgaggtgacccagggcttcgccctgggcatcaagtgcggcgccagctacgcccaggtgatgagaaccgtgggcatccaccccacctgcagcgaggaggtggtgaagctgagaatcagcaagagaagcggcctggaccccaccgtgaccggctgctag

SEQ ID NO: 165167 - DNA, 1485 bp, Artificial Sequence
  derived and/or modified sequence
atggaggaccaggcaggccagagagactatgatctgctggttgtaggagggggcagtggcggacttgcctgtgccaaggaagctgctcagctcggcaggaaagtggctgtcgtggactatgtggagccctcaccccagggcacaagatggggactcgggggaacctgcgtgaacgttggctgcattccaaaaaaacttatgcatcaggctgctttgttagggggactgatccaggacgcccccaactacgggtgggaagtggcccagccagtgccacacgattggcgaaagatggccgaagctgtgcaaaatcacgtgaagtcactgaattgggggcacagggtgcagctccaagaccggaaggtgaaatatttcaacattaaggcgtccttcgttgatgagcacactgtgtgcggtgttgccaaggggggaaaggaaatcctgctgagcgcggaccatattatcatcgccaccggaggcagacctcgctaccctacacacatcgagggcgcattggagtatggaataacctccgacgacatcttctggttgaaggaatctccagggaaaacactagtggtcggagcaagctatgtagcattggagtgcgccggctttttaaccggcattgggctggatactaccattatgatgcgcagcattcctctgcgcggttttgatcaacagatgagtagtatggtaattgaacatatggcttctcacggtacacgattcctgcgcgggtgcgcccctagtagggtccggaggctgcctgatggccagttgcaagtcacttgggaggatagcaccacgggcaaagaagatacaggcacatttgacactgtactctgggctatcggacgggtccctgacacccgcagccttaatctggaaaaggccggggttgatactagtcctgatacccaaaaaattctggtggattccagagaggccacatcagtccctcatatctacgcgattggcgacgttgtggaaggaaggccagagctgactccaatcgctataatggctgggagactgctggtccagcgccttttcggtggttcgtccgacctgatggattacgacaacgtcccaacaaccgtgttcacgcctctggaatatgggtgtgtaggtctctccgaggaagaggcagtcgcacgacatgggcaggagcacgtggaggtgtaccatgcccactataagccccttgagtttactgtagcaggacgagacgcatctcagtgctacgtgaaaatggtatgtctccgcgaaccgccacaactggtcctgggcttgcactttctggggcccaacgcaggtgaagtgacacaaggtttcgctctggggataaagtgtggtgcttcctatgcccaggtcatgcggacagtgggcattcacccgacctgctccgaggaggtcgtgaagctgcggatatccaaaagaagtgggcttgaccctacagtgaccgggtgttgagggtag

SEQ ID NO: 165168 - DNA, 1575 bp, Artificial Sequence
  derived and/or modified sequence
atggccgccatggctgtcgcgctgcggggcctgggaggacggtttagatggagaacacaggccgtagctggaggagtcaggggcgccgctaggggggccgcagccgggcagagagactacgacctgcttgtggttggtgggggatcaggcggcctcgcatgtgctaaggaggccgcacagctcggcaggaaggttgcggtggtagactacgtggagccttctcctcagggcacacgctggggcctcgggggcacatgtgttaatgttggatgcatccccaagaaacttatgcatcaagctgcactactcggcggactgattcaggacgcacccaactatggctgggaagtggcacagcctgtgccacacgactggaggaagatggcggaagcagtacagaaccacgtgaaatctctgaattggggtcaccgggtccagctgcaagaccgcaaggtgaaatatttcaacatcaaagcctcttttgtggatgagcacacagtgtgtggcgttgccaaaggaggcaaggagatactgttgtccgctgatcacatcattatcgccaccggcgggcgtccacgctaccccacacatatagaaggcgccctggagtatggaattaccagtgacgatatcttctggttaaaggaaagcccaggcaaaacattagtcgtcggcgcatcctatgttgcacttgaatgtgccggttttctcactggtatcggcctggatacgacaattatgatgcgatctatcccactcaggggtttcgaccagcaaatgagcagtatggtcatagagcacatggcatctcacggaacacgatttctgagggggtgcgcgcccagccgggtgagaagacttcctgacgggcagctgcaggtaacatgggaggactcaacgactggcaaagaggatactggaacatttgacacagttctatgggctataggacgcgtaccagataccagaagtctgaatctcgaaaaggccggagtcgatacttcccccgatacacagaagatccttgtcgattcacgggaggcaaccagcgttccccatatatatgcaatcggagacgtcgtggagggccggcccgaattgacccccatcgcaatcatggcgggaaggctcttagtacagcgcctgtttggcggctcaagtgacttgatggactatgataacgtgccgaccacggtattcactccgttggagtacggctgcgtgggcctttccgaggaggaggcagttgcacggcacggtcaggagcacgttgaagtgtaccacgcccactacaagcccttggaatttactgtggccggccgcgacgcttctcagtgctacgtgaaaatggtttgtctgcgtgaacccccacagctggtcctgggcctgcatttcctcggccccaacgccggcgaagttacccagggcttcgcactcgggatcaaatgtggagcctcctacgcccaggttatgaggacagtgggaatccaccccacctgtagcgaagaagttgtgaaattgcgcatttccaaaagaagtggcctagaccccacagtgaccggttgctgagggtag

SEQ ID NO: 165169 - DNA, 1566 bp, Artificial Sequence
  derived and/or modified sequence
atggcagctatggcagtggcactcaggggtctaggcggcagattccgctggaggacacaagccgtggctggcggcgttagaggtgcagcacgtggagccgctggccagagggactatgatctgcttgtggtgggtggtggttcagggggcctagcctgtgcaaaagaggctgctcagctgggacggaaagttgcagtggtggactacgtggagccatctccacaaggaactcggtggggactgggtgggacctgtgttaacgtagggtgcattcctaaaaagctcatgcaccaagccgccttactcggggggcttatacaggatgctcctaattacggttgggaagttgcacagcccgtgccacacgactggagaaaaatggccgaagccgtgcagaaccatgtcaaatcattgaattggggccaccgcgtgcagctccaggatcgtaaagtgaagtactttaacataaaagcaagctttgtggacgagcatacagtttgtggcgtcgccaaggggggaaaggagatactgttgagcgcagaccatataattattgctactggtgggcgccctcgctaccccacgcatatcgagggagccctggaatatgggatcacctctgatgatatattctggctgaaggagtcgccagggaaaactcttgtcgtgggggcgtcttacgttgccctggaatgcgctggcttccttaccggtattggtctcgataccaccattatgatgaggagcatacctctccgggggttcgatcagcagatgagcagtatggtgatcgagcatatggccagccacgggacaagatttttgcggggctgtgcacctagccgggtaaggagactgcctgacggtcagctgcaggtgacctgggaggactcaactacgggcaaagaggacacagggacgttcgatactgtgctgtgggctatcggccgcgtccccgacacaagatctctaaatttagaaaaagccggcgttgatacgagtccagacacccagaagattctcgtcgacagtcgggaagctacaagtgtccctcacatatatgcaatcggcgacgttgtggagggtagaccggagcttacccccatcgcaattatggctggtaggctgctcgtgcagcgcttgtttggaggtagcagcgatctcatggattatgacaatgtacccacaacagttttcacacccttggagtatggatgcgttggactctccgaggaagaagctgtggctaggcacggtcaggaacacgtcgaggtctaccacgcacattataaaccgctcgaattcacagttgccgggagggatgctagccaatgttatgtgaaaatggtgtgtctcagagagccacctcagctcgtattaggcttacacttcctgggccccaatgcaggagaagtgactcaggggttcgccctgggcatcaagtgtggcgcaagttatgcccaggttatgagaacagtcggaatccaccccacttgcagcgaggaggtggtgaaactgagaatctccaagagatcgggtcttgatccaaccgtgactgggtgttag

SEQ ID NO: 165170 - DNA, 1569 bp, Artificial Sequence
  derived and/or modified sequence
atggctgccatggctgtggctctccgaggccttggcgggcggttccgttggcgaacgcaggcagtggccggcggcgtgcgtggtgcagcacgcggagccgccgctgggcaacgagactacgatctcctcgtggtcggcggaggaagtggcggcctggcttgtgcaaaagaagccgctcagctgggcaggaaggttgcagtggttgattatgtagaaccttcaccacagggtacacggtggggactcggtgggacatgtgtcaatgtgggttgcatccccaagaaattgatgcaccaggcagccctgctgggcggtcttattcaggatgcgcccaattacggttgggaagtggcacagccggtgcctcacgattggaggaaaatggctgaggcggtgcagaaccacgtaaaatctctgaactggggtcacagagtgcagttgcaagaccgaaaggttaagtattttaatattaaggcatcatttgtggacgagcatacagtttgcggcgtcgcgaagggaggaaaagaaatcctgctgagcgcggatcatataatcatagccaccggggggaggcccaggtacccaacacacatcgagggcgccttggagtatggcatcacgagcgatgacatcttctggctcaaggagagccccggcaaaaccctgccagtaagcgtctcgtatgtggcactcgagtgcgccggatttctaacggggattggtctagacacaacgattatgatgagatctatcccccttcggggcttcgaccagcaaatgtccagtatggtgatagagcacatggcctctcatggtaccagattcctccgcgggtgcgccccgtccagggtgcgacgcctgcctgacggtcaattgcaggtcacctgggaagattcaacaacaggtaaagaggacaccggtacattcgacaccgtcctgtgggctattgggagggtgccagacacacggagcctgaacctcgagaaagccggcgtagacactagccccgatactcagaagattctggttgactccagggaggcaacttctgtccctcatatatatgccattggggacgtggttgagggcaggccggaactgactccaatcgccattatggcgggacggctgttagtgcagcgtctattcggagggtcctccgacctgatggattacgacaacgtccccactaccgttttcacccccctagaatatggctgtgttggcctaagcgaagaggaagccgtcgccagacacggccaggagcacgtggaagtttaccacgctcattataaacctctcgagttcactgttgccggaagagatgcctcacagtgttacgtgaagatggtctgcctgagggagcctccacaacttgtcctgggcctgcattttcttggccctaacgccggcgaagtgactcaagggttcgcgttaggaataaagtgtggagcgtcatacgctcaggtgatgcggacggtggggatccatcctacttgtagtgaagaagtggtgaaactgcgtatctccaagaggagtggactggacccgaccgtgacgggctgctag

SEQ ID NO: 165171 - DNA, 1281 bp, Artificial Sequence
  derived and/or modified sequence
atgcaccaggcagccctcctgggcggattgatacaggacgctcctaactacgggtgggaagtggcacaacccgtgccacatgattggcgaaagatggcagaggcagttcagaatcatgtgaagtcactcaactggggccatcgagtgcagctacaagaccggaaagtaaagtacttcaatattaaggccagttttgtggacgaacacaccgtgtgtggtgtggcaaaaggaggcaaagaaattctattaagcgccgaccatattatcattgctaccggcggccggccacggtatcccacacacattgagggcgccctcgaatacggaatcacttcagacgacattttctggctgaaggaaagccctggcaagacctgcgtagtagcacacgcctatgtcgctctcgaatgcgccggtttcctcactggcattgggctggatacaaccattatgatgcgttccattcccttaagaggttttgatcaacagatgtcttcaatggtcatcgaacacatggctagccacgggacccgattcctgcgtgggtgtgccccaagtcgggtgcggcgcctgcctgatggtcagctgcaagttacgtgggaggactccacaacaggtaaggaggatacaggcaccttcgacaccgtcttgtgggctattggtcgcgtaccggacactaggtctctgaatcttgagaaggccggtgttgacacttctccagatacacagaaaatcctggtggactctcgagaagctactagcgtgcctcatatatacgccatcggagatgtcgtggaaggcagaccagagttaacacccatcgccatcatggccggccgcctcttggtacagcgcttattcggaggctcctccgatctgatggactacgataatgttcccacgactgtgttcactccgttagagtacgggtgtgtgggactctctgaggaggaagctgtcgcccgccatggacaggaacacgtggaggtgtaccacgcccattacaagccgctggagttcaccgtcgcaggcagagatgccagccagtgctacgtgaaaatggtgtgcctgagagagcctcctcagctcgtcttaggactccactttctcgggcccaacgcgggggaggtgacccaaggcttcgcgctgggaattaaatgtggcgcttcatacgcacaggtcatgcgaactgttggcatccaccctacttgcagcgaggaggttgtcaagttgcggatttctaagagatctggcttagaccctacggtgacgggctgttag

SEQ ID NO: 165172 - DNA, 1479 bp, Artificial Sequence
  derived and/or modified sequence
atggaagaccaggccgggcaacgggactatgatctcctcgtcgtagggggtgggtcagggggcttagcctgcgctaaggaggccgcacaactagggagaaaggtcgcggtcgtagactacgtcgagccttccccgcagggaacccgatgggggctgggcggcacttgtgtaaacgttgggtgtatacccaagaagctgatgcatcaggctgccctgctgggcggactaattcaggacgctcctaattacgggtgggaagtggcccagcctgtgcctcacgactggcggaaaatggccgaggccgtccaaaaccacgtaaagagcttgaattggggccatcgggttcagcttcaagaccggaaagtgaaatattttaatatcaaggcctcttttgtggatgaacatacagtctgcggcgtggcaaagggcggaaaagaaatactgctgtcagccgatcacattatcatcgcaacaggtggcaggccccgataccctacccatatcgaaggcgctctggagtatgggattacatcagatgacatcttctggttgaaggagagccccggcaagaccctggtggttggcgcctcctatgtcgccctggaatgtgctggcttccttacaggcatcgggctcgacactaccataatgatgcgttccataccactcagaggcttcgatcagcagatgagcagtatggtcattgagcacatggcatcccatggcacgcgctttctgagaggttgtgctcctagccgagttcgacgcttgcctgacggtcagctgcaagtcacctgggaagattccacaaccggcaaggaggacactgggaccttcgacacagtgttgtgggccataggacgcgttccagatacccggtccctcaacctcgagaaggcgggcgtggacacaagcccagacacacagaaaatcctggtagatagcagagaggccacaagtgtacctcacatatacgcgataggagatgttgtcgagggccggccagagctgactccaatcgccattatggctgggcggttgctcgtgcagcgcctatttggcggatcctctgatctgatggattatgataacgttccgaccaccgtgtttaccccactagagtatgggtgcgtcggcctgtctgaggaggaggctgtggcacggcatgggcaggaacatgtcgaagtgtaccatgcccactacaagcctctcgaattcacagtggccggccgcgatgccagccaatgctacgtgaagatggtgtgtctgcgggagccaccccaattggtgcttggactgcactttctcggccctaatgccggagaagtgacacagggtttcgcactgggtatcaagtgcggggcatcatacgcccaggtgatgagaacggtgggaattcacccaacctgttctgaggaggtcgtgaaacttcgcatctccaaaagaagcggactcgatcccaccgtcactgggtgctag

SEQ ID NO: 165173 - DNA, 1479 bp, Artificial Sequence
  derived and/or modified sequence
atggaggaccaggccggccagagggactatgacctgctggtggtgggcggcggcagcggcggcctggcctgtgccaaggaggccgcccagctgggcaggaaggtggccgtggtggactatgtggagcccagcccccagggcacccgctggggcctgggcggcacctgtgtgaatgtgggctgcatccccaagaagctgatgcaccaggccgccctgctgggcggcctcatccaggatgcccccaactacggctgggaggtggcccagcctgtgccccatgactggaggaagatggccgaggccgtgcagaaccacgtgaagagcctgaactggggccaccgggtgcagctgcaggacaggaaggtgaagtacttcaacatcaaggccagctttgtggatgagcacacagtgtgtggggtggccaagggcggcaaggagatcctgctgtctgctgaccacatcatcatcgccaccggcggccggccccgctaccccacccacatcgagggcgccctggagtatggcatcaccagtgatgacatcttctggctgaaggagagccctgggaagaccctggtggtgggcgccagctatgtggccctggagtgtgccggcttcctgaccggcatcggcctggacaccaccatcatgatgaggagcatccccctgcggggctttgaccagcagatgagctccatggtgattgagcacatggccagccacggcacccgcttcctgcggggctgtgcccccagccgggtgcggcggctgcctgatggccagctgcaggtgacctgggaggacagcaccaccgggaaggaggacaccggcacctttgacacagtgctgtgggccatcggccgggtgcctgacaccaggagcctgaacctggagaaggccggcgtggacaccagcccagacacccagaagatcctggtggacagccgggaggccacctctgtgccccacatctatgccatcggagatgtggtggagggccggcctgagctgacccccatcgccatcatggccggccgcctgctggtgcagaggctgtttggaggcagcagtgacctgatggactatgacaacgtgcccaccaccgtcttcacccccctggagtatggctgtgtgggcctgtctgaggaggaggccgtggcccggcacggccaggagcacgtggaggtgtaccacgcccactacaagcccctggagttcaccgtggccggcagagatgccagccagtgctacgtgaagatggtgtgcctgcgggagcccccccagctggtgctgggcctgcacttcctgggccccaatgctggggaggtgacccagggctttgccctgggcatcaagtgtggggccagctatgcccaggtgatgaggacagtgggcatccaccccacctgcagcgaggaggtggtgaagctgcgcatcagcaagaggagcggcctggaccccaccgtgacaggctgctag

SEQ ID NO: 165174 - DNA, 1569 bp, Artificial Sequence
  derived and/or modified sequence
atggccgccatggctgtggccctgcggggcctgggcggccgcttccgctggaggacccaggccgtggccggcggcgtgagaggagctgcccggggagctgctgctggccagagggactatgacctgctggtggtgggcggcggcagcggcggcctggcctgtgccaaggaggccgcccagctgggcaggaaggtggccgtggtggactatgtggagcccagcccccagggcacccgctggggcctgggcggcacctgtgtgaatgtgggctgcatccccaagaagctgatgcaccaggccgccctgctgggcggcctcatccaggatgcccccaactacggctgggaggtggcccagcctgtgccccatgactggaggaagatggccgaggccgtgcagaaccacgtgaagagcctgaactggggccaccgggtgcagctgcaggacaggaaggtgaagtacttcaacatcaaggccagctttgtggatgagcacacagtgtgtggggtggccaagggcggcaaggagatcctgctgtctgctgaccacatcatcatcgccaccggcggccggccccgctaccccacccacatcgagggcgccctggagtatggcatcaccagtgatgacatcttctggctgaaggagagccctgggaagaccctggtggtgggcgccagctatgtggccctggagtgtgccggcttcctgaccggcatcggcctggacaccaccatcatgatgaggagcatccccctgcggggctttgaccagcagatgagctccatggtgattgagcacatggccagccacggcacccgcttcctgcggggctgtgcccccagccgggtgcggcggctgcctgatggccagctgcaggtgacctgggaggacagcaccaccgggaaggaggacaccggcacctttgacacagtgctgtgggccatcggccgggtgcctgacaccaggagcctgaacctggagaaggccggcgtggacaccagcccagacacccagaagatcctggtggacagccgggaggccacctctgtgccccacatctatgccatcggagatgtggtggagggccggcctgagctgacccccatcgccatcatggccggccgcctgctggtgcagaggctgtttggaggcagcagtgacctgatggactatgacaacgtgcccaccaccgtcttcacccccctggagtatggctgtgtgggcctgtctgaggaggaggccgtggcccggcacggccaggagcacgtggaggtgtaccacgcccactacaagcccctggagttcaccgtggccggcagagatgccagccagtgctacgtgaagatggtgtgcctgcgggagcccccccagctggtgctgggcctgcacttcctgggccccaatgctggggaggtgacccagggctttgccctgggcatcaagtgtggggccagctatgcccaggtgatgaggacagtgggcatccaccccacctgcagcgaggaggtggtgaagctgcgcatcagcaagaggagcggcctggaccccaccgtgacaggctgctag

SEQ ID NO: 165175 - DNA, 1566 bp, Artificial Sequence
  derived and/or modified sequence
atggccgccatggctgtggccctgcggggcctgggcggccgcttccgctggaggacccaggccgtggccggcggcgtgagaggagctgcccggggagctgctggccagagggactatgacctgctggtggtgggcggcggcagcggcggcctggcctgtgccaaggaggccgcccagctgggcaggaaggtggccgtggtggactatgtggagcccagcccccagggcacccgctggggcctgggcggcacctgtgtgaatgtgggctgcatccccaagaagctgatgcaccaggccgccctgctgggcggcctcatccaggatgcccccaactacggctgggaggtggcccagcctgtgccccatgactggaggaagatggccgaggccgtgcagaaccacgtgaagagcctgaactggggccaccgggtgcagctgcaggacaggaaggtgaagtacttcaacatcaaggccagctttgtggatgagcacacagtgtgtggggtggccaagggcggcaaggagatcctgctgtctgctgaccacatcatcatcgccactggaggccggccccgctaccccacccacattgaaggagccctggagtatggcatcaccagtgatgacatcttctggctgaaggagagccctgggaagaccctggtggtgggcgccagctatgtggccctggagtgtgccggcttcctgactggaattggcctggacaccaccatcatgatgaggagcatccccctgcggggctttgaccagcagatgagctccatggtgattgagcacatggccagccacggcacccgcttcctgcggggctgtgcccccagccgggtgcggcggctgcctgatggccagctgcaggtgacctgggaggacagcaccaccgggaaggaggacaccggcacctttgacacagtgctgtgggccatcggccgggtgcctgacaccaggagcctgaacctggagaaggccggcgtggacaccagcccagacacccagaagatcctggtggacagccgggaggccacctctgtgccccacatctatgccatcggagatgtggtggagggccggcctgagctgacccccatcgccatcatggccggccgcctgctggtgcagaggctgtttggaggcagcagtgacctgatggactatgacaacgtgcccaccaccgtcttcacccccctggagtatggctgtgtgggcctgtctgaggaggaggccgtggcccggcacggccaggagcacgtggaggtgtaccacgcccactacaagcccctggagttcaccgtggccggcagagatgccagccagtgctacgtgaagatggtgtgcctgcgggagcccccccagctggtgctgggcctgcacttcctgggccccaatgctggggaggtgacccagggctttgccctgggcatcaagtgtggggccagctatgcccaggtgatgaggacagtgggcatccaccccacctgcagcgaggaggtggtgaagctgcgcatcagcaagaggagcggcctggaccccaccgtgacaggctgctag

SEQ ID NO: 165176 - DNA, 1569 bp, Artificial Sequence
  derived and/or modified sequence
atggccgccatggctgtggccctgcggggcctgggcggccgcttccgctggaggacccaggccgtggccggcggcgtgagaggagctgcccggggagctgctgctggccagagggactatgacctgctggtggtgggcggcggcagcggcggcctggcctgtgccaaggaggccgcccagctgggcaggaaggtggccgtggtggactatgtggagcccagcccccagggcacccgctggggcctgggcggcacctgtgtgaatgtgggctgcatccccaagaagctgatgcaccaggccgccctgctgggcggcctcatccaggatgcccccaactacggctgggaggtggcccagcctgtgccccatgactggaggaagatggccgaggccgtgcagaaccacgtgaagagcctgaactggggccaccgggtgcagctgcaggacaggaaggtgaagtacttcaacatcaaggccagctttgtggatgagcacacagtgtgtggggtggccaagggcggcaaggagatcctgctgtctgctgaccacatcatcatcgccaccggcggccggccccgctaccccacccacatcgagggcgccctggagtatggcatcaccagtgatgacatcttctggctgaaggagagccctgggaagaccctgcctgtgtctgtgtcctatgtggccctggagtgtgccggcttcctgaccggcatcggcctggacaccaccatcatgatgaggagcatccccctgcggggctttgaccagcagatgagctccatggtgattgagcacatggccagccacggcacccgcttcctgcggggctgtgcccccagccgggtgcggcggctgcctgatggccagctgcaggtgacctgggaggacagcaccaccgggaaggaggacaccggcacctttgacacagtgctgtgggccatcggccgggtgcctgacaccaggagcctgaacctggagaaggccggcgtggacaccagcccagacacccagaagatcctggtggacagccgggaggccacctctgtgccccacatctatgccatcggagatgtggtggagggccggcctgagctgacccccatcgccatcatggccggccgcctgctggtgcagaggctgtttggaggcagcagtgacctgatggactatgacaacgtgcccaccaccgtcttcacccccctggagtatggctgtgtgggcctgtctgaggaggaggccgtggcccggcacggccaggagcacgtggaggtgtaccacgcccactacaagcccctggagttcaccgtggccggcagagatgccagccagtgctacgtgaagatggtgtgcctgcgggagcccccccagctggtgctgggcctgcacttcctgggccccaatgctggggaggtgacccagggctttgccctgggcatcaagtgtggggccagctatgcccaggtgatgaggacagtgggcatccaccccacctgcagcgaggaggtggtgaagctgcgcatcagcaagaggagcggcctggaccccaccgtgacaggctgctag

SEQ ID NO: 165177 - DNA, 1281 bp, Artificial Sequence
  derived and/or modified sequence
atgcaccaggccgccctgctgggcggcctcatccaggatgcccccaactacggctgggaggtggcccagcctgtgccccatgactggaggaagatggccgaggccgtgcagaaccacgtgaagagcctgaactggggccaccgggtgcagctgcaggacaggaaggtgaagtacttcaacatcaaggccagctttgtggatgagcacacagtgtgtggggtggccaagggcggcaaggagatcctgctgtctgctgaccacatcatcatcgccaccggcggccggccccgctaccccacccacatcgagggcgccctggagtatggcatcaccagtgatgacatcttctggctgaaggagagccctgggaagacctgtgtggtggcccacgcctacgtggccctggagtgtgccggcttcctgaccggcatcggcctggacaccaccatcatgatgaggagcatccccctgcggggctttgaccagcagatgagctccatggtgattgagcacatggccagccacggcacccgcttcctgcggggctgtgcccccagccgggtgcggcggctgcctgatggccagctgcaggtgacctgggaggacagcaccaccgggaaggaggacaccggcacctttgacacagtgctgtgggccatcggccgggtgcctgacaccaggagcctgaacctggagaaggccggcgtggacaccagcccagacacccagaagatcctggtggacagccgggaggccacctctgtgccccacatctatgccatcggagatgtggtggagggccggcctgagctgacccccatcgccatcatggccggccgcctgctggtgcagaggctgtttggaggcagcagtgacctgatggactatgacaacgtgcccaccaccgtcttcacccccctggagtatggctgtgtgggcctgtctgaggaggaggccgtggcccggcacggccaggagcacgtggaggtgtaccacgcccactacaagcccctggagttcaccgtggccggcagagatgccagccagtgctacgtgaagatggtgtgcctgcgggagcccccccagctggtgctgggcctgcacttcctgggccccaatgctggggaggtgacccagggctttgccctgggcatcaagtgtggggccagctatgcccaggtgatgaggacagtgggcatccaccccacctgcagcgaggaggtggtgaagctgcgcatcagcaagaggagcggcctggaccccaccgtgacaggctgctag

SEQ ID NO: 165178 - DNA, 1485 bp, Artificial Sequence
  derived and/or modified sequence
atggaggaccaggccggccagcgggactacgacctgctggtggtgggcggcggcagcggaggcctcgcctgtgccaaggaagctgcacaactcggtcgaaaggtggccgtcgtggactacgttgagcctagtccacagggtactagatggggattgggaggaacctgcgtcaacgtaggatgtatccctaagaaactgatgcaccaagccgccttactgggcggactcatccaggacgctccaaattatggttgggaggtcgcacagccagtccctcatgattggcgcaagatggccgaggccgtgcaaaaccacgtcaagagcctaaactggggtcaccgggtccaactgcaggatcgcaaagtgaaatattttaacatcaaggcaagcttcgtagacgaacataccgtctgtggagtcgcaaagggtggaaaggaaattttacttagcgcagaccacattattatcgcaacaggcggccggccacgataccctacacatattgagggtgctctggagtatggcatcacttccgatgatattttctggcttaaagaaagtccagggaaaaccctagtggtaggggctagctatgtggctctggagtgcgcagggttcttgacaggcatcggcctggatacaacgattatgatgagaagcatcccgctgcgcggattcgaccaacagatgagttcaatggtgattgagcatatggcgtcccatggaacccgcttcctgcgaggatgtgccccatctcgagtgcgacgcctgccagacggccagctacaggtgacttgggaagactccactaccgggaaagaagacacgggaacttttgacactgtcctctgggccatcggacgggttcctgatactcgttcgctcaacctggaaaaagcaggcgtcgatacctcaccagatactcagaagatccttgtggactccagggaagcaacgtcagtcccccacatttacgccatcggtgatgtagtcgagggccggcccgagttaactcccattgctattatggccggacgactgctcgtgcaaagattgtttggcggctcaagtgatctgatggactatgataatgtacctacaacagtgttcacccctctggagtacggctgcgttgggcttagtgaggaggaagctgtcgccaggcatggtcaggagcatgttgaggtctatcacgcccactataagcccctcgaattcaccgtggctggaagggacgcctcccagtgctatgtgaagatggtgtgcctgcgggaacccccgcaactggttcttggtctgcactttctcggccctaatgcaggggaagtgacgcaggggtttgccctcgggatcaagtgcggtgcctcatacgcacaggtcatgcgcaccgtaggaattcacccaacatgctctgaggaggttgtgaaactgagaataagcaagcgatctggattggacccaaccgtgaccgggtgctgaggatag

SEQ ID NO: 165179 - DNA, 1575 bp, Artificial Sequence
  derived and/or modified sequence
atggccgccatggccgtggccctgcggggcctgggcggccggttcagatggcggactcaggccgtggcgggtggagtgaggggagccgcgcggggagcggcagccggccagcgcgactacgacctcctggtggtgggcgggggctcagggggactcgcatgcgccaaagaagccgctcagcttggaagaaaagtcgccgtggtcgattacgttgagcccagtccacaagggacacgttggggtctgggaggcacatgcgtgaacgttggatgtatccctaaaaagttgatgcaccaggccgcgctcctgggaggcttgatccaggacgcccctaactacggatgggaagttgcccagcccgtaccccatgattggcgcaagatggctgaagcagttcagaatcacgtcaaatctctgaactggggacaccgagtccaactgcaagataggaaagtcaaatacttcaatatcaaagcatccttcgttgatgagcataccgtttgtggcgtggctaaggggggcaaagaaatactgctctccgctgatcatatcattatcgccacaggaggtcggccaagataccccacccatatcgagggcgcactagagtacggaatcactagcgacgatatattttggttaaaagaatctccaggcaaaactctggttgtgggagcttcatacgtcgctctggagtgtgctggcttcttaaccggtatcggattggacacaaccattatgatgagatctattccattgagaggtttcgaccagcagatgagtagcatggttatcgaacatatggcctcccacggtacaaggtttctccgggggtgtgctcccagccgcgtgagaaggctcccagatgggcagctgcaagtgacatgggaggattcgactactggaaaagaggatactgggacctttgacactgtgctgtgggctattggacgtgtacctgataccaggtctcttaacttggagaaagcaggggttgatacttcccccgatacacagaaaatcctggttgacagtcgagaggccacttcagtgcctcatatttacgccatcggggatgtggttgaaggaaggcccgagttgactccgatagccattatggccggcaggttgcttgttcaaaggctgtttggcggttcctctgacctcatggactacgataatgtcccaactacagtgttcaccccattagaatatggatgtgtcggcctgtctgaagaggaagctgttgcccggcatggccaggagcacgttgaggtgtaccacgctcactacaagccactcgagtttactgtggcaggtagggatgctagccaatgctatgtgaaaatggtgtgccttcgggagcccccacagctcgtcctggggcttcacttcctggggcccaatgcaggggaggtaactcaaggctttgcgcttggtattaagtgtggtgcctcctacgctcaggtaatgaggactgtgggtatccacccaacatgctcagaggaagtggtaaaactccgaatcagtaagcgatctggcctggatcctacggtcacaggctgctgagggtag

SEQ ID NO: 165180 - DNA, 1566 bp, Artificial Sequence
  derived and/or modified sequence
atggccgccatggccgtggccctgcggggcctgggcggccggttccgatggcgaactcaggctgtggccgggggggtccgtggagctgctcggggcgcagccggacagcgagactatgacctcttagttgttgggggcggaagtgggggactagcgtgcgcaaaagaggccgctcaattgggaaggaaagtggcagttgtggattacgtggaaccgtcccctcagggtacccgttggggtttaggggggacctgtgtgaatgttggatgcattcctaagaagcttatgcatcaagcggcactgctcggtggactcatccaggatgctccaaactatggttgggaagtggctcagcccgtgccccacgactggcggaaaatggctgaggcagtgcagaaccacgtgaaatctctgaactgggggcaccgtgtgcaactgcaggatagaaaggtcaaatacttcaacatcaaggcttcattcgttgacgaacatacagtgtgtggtgtggccaaagggggtaaagaaattctcttatctgctgaccacatcatcattgcaaccggtggtaggccccgatatccgacccacattgaaggagcgctcgagtatggaatcaccagcgatgacattttttggttgaaggagagccccggaaagacacttgttgttggggcgagctatgttgccctggaatgtgctggttttttgacggggattgggctcgatactactattatgatgaggagcattcccttaagaggatttgaccaacagatgtcctctatggtcatagagcacatggctagtcatgggacaaggtttctcagggggtgcgctccgagcagagtgcgccgcctacccgacgggcagctgcaggtaacctgggaagacagtactaccggcaaggaggacacaggcacgtttgacacagtgttgtgggctataggccgggtccccgatacgcgatctctgaacttggagaaagctggggtagacactagcccggacacacagaagatcctggtcgacagccgagaggccacctccgtaccacatatttacgctattggcgacgtggtggaggggagacctgagctaacccctatcgctataatggctggacgccttctggtacagaggctgtttgggggaagttccgatctcatggactatgacaatgtcccaacaaccgtattcacaccccttgagtatggttgtgtcggactcagcgaggaggaagccgtggctcggcatggccaggagcatgtggaagtgtaccacgctcactataagccacttgagtttaccgtggccggccgggatgcttcccaatgctatgtgaaaatggtgtgccttcgcgaacctccccagctggtgctcgggctgcattttctggggcctaacgcaggcgaagttacacagggcttcgccttgggaatcaagtgtggagcctcttacgcacaggttatgcggaccgtgggaattcatcctacgtgtagtgaagaagtcgtgaagctgaggatcagcaagaggagcggtctggatcccaccgtgaccgggtgctag

SEQ ID NO: 165181 - DNA, 1569 bp, Artificial Sequence
  derived and/or modified sequence
atggccgccatggccgtggccctgcggggcctgggcggccggttccgctggcgcacgcaggcagttgcagggggcgtgcgtggggcagccagaggcgccgccgcggggcagcgcgactacgacctgctggtcgtgggtggtgggagcggaggacttgcgtgcgccaaggaggctgcacaactcgggaggaaggtggctgtggtcgattacgtggaaccttctccacagggcacccgctggggactgggaggtacgtgcgtcaacgtgggatgcatccccaagaaactgatgcaccaggcagcattacttgggggcttgatccaggatgcaccaaattatggctgggaggttgcccaacccgtgccccacgactggagaaaaatggcagaggccgtacagaatcatgtcaaatctctaaactgggggcaccgcgtgcaacttcaagaccgcaaggtcaaatacttcaacatcaaggcctcgtttgttgacgagcacacggtctgtggcgtcgcgaagggaggaaaagagatactgctctccgctgatcacatcatcattgcgacaggcgggagaccccggtatcccacccacatcgaaggagctcttgagtacggaatcacctcagatgatatcttttggctgaaggagagtcccggaaagacattgcccgtgagcgtcagctatgttgccctggagtgtgccggattcctgaccgggatcggactggataccaccatcatgatgcggtctataccattgaggggctttgaccaacaaatgtccagtatggtcattgaacacatggcaagccatggtacgagatttctgagggggtgcgctcctagcagggtgcgtcgcctccctgatgggcagttgcaggtgacttgggaggactccacgaccggcaaggaggatacagggacctttgataccgtcctttgggctattgggcgggtcccagatactaggtcgttaaacttggagaaggctggtgtggacactagccctgatactcagaagatactggtcgacagtagagaggccacttctgtacctcacatctacgcaattggtgacgtcgtggaggggagacccgagctcacccccatcgccatcatggcagggcgactgcttgtgcagcggctgtttggagggtctagcgacctgatggattatgataacgtgcctacgaccgtgttcacccctctggagtatggatgtgtgggacttagcgaggaggaagcagtggcaaggcatggacaggagcacgtggaagtgtatcatgcccattacaaaccactggaattcacggtcgccgggcgggacgccagccagtgctatgttaaaatggtttgcctgcgggaacctccacagctggtactgggtctgcactttctggggcccaacgcaggtgaagtgacgcaagggttcgctctcggtatcaagtgcggcgccagctatgctcaggtgatgcgcacagtgggcatacaccccacgtgctcagaggaggtggtcaagctgagaatctcaaagaggagcggacttgacccaacagtgacaggctgctag

SEQ ID NO: 165182 - DNA, 1281 bp, Artificial Sequence
  derived and/or modified sequence
atgcaccaggccgccctgctgggcggcctgatccaggacgcccccaactatggctgggaggtggctcagcccgtgcctcacgactggcgcaaaatggctgaggcagtccagaaccacgttaagagtctgaactgggggcacagagtacagttgcaggaccgcaaagtgaagtactttaacatcaaggcaagcttcgtcgacgagcatactgtgtgcggtgtggccaagggaggcaaagagatcctgctgagtgctgatcacattattatcgctaccggcgggcgcccacgctatccaacccacattgagggagcattggagtacggcatcacttccgatgatattttctggttaaaggagtcacccggcaagacatgtgttgtagctcacgcttatgtggctttagagtgcgcagggttcctgaccggcatcgggcttgatacaactattatgatgaggtccatcccactccgcggctttgatcagcaaatgtcgtccatggtcatcgaacacatggccagtcatggtacccgatttttgaggggctgtgctcctagcagagttcgccgtcttcccgacggtcagctgcaggtgacttgggaggattcaacgacgggcaaagaggatactggaaccttcgatactgttttgtgggcaatcggccgcgtaccagatacacggagtctaaacctcgagaaggctggcgtcgatacttctcctgacacgcagaagatcctcgtggactcccgcgaagcgacaagcgttccccacatatatgcaatcggtgatgtggtggaaggaaggccagagctcacacctattgccatcatggccggcagactgctcgtgcagagactattcggggggtcttcagatctgatggattacgacaacgtgccaaccactgtcttcacgcctctcgaatacggttgtgtaggactgtctgaagaggaggccgtggctaggcacggacaggaacacgtagaggtgtatcatgcccactacaaacccctcgagtttacagttgctggtcgagatgcaagccagtgctacgtcaaaatggtgtgtctgcgcgagccgcctcagcttgtcctcggcctccactttctcggcccaaatgccggcgaggtcacacagggtttcgctctggggattaagtgtggtgccagctatgcacaagtaatgaggactgtaggcatccatcctacttgctctgaggaggtggtaaagctgagaatctctaagcggagcggtctggatccgactgttacaggctgttag

SEQ ID NO: 165183 - DNA, 1479 bp, Artificial Sequence
  derived and/or modified sequence
atggaggaccaggccggccagcgggactacgacctgctggtggtgggaggggggtccggtgggctggcgtgcgcaaaagaggcagcccagctgggtaggaaagtggcagttgtcgactacgtggaacctagtcctcaagggactcgctggggcttgggcggcacctgcgtgaacgtgggttgcattccaaagaagctcatgcatcaagcggctttgctgggtgggctaattcaggatgcacctaactatggctgggaagtcgcacagcctgtcccgcacgattggcgtaaaatggctgaagctgtgcagaatcatgtgaagtcattgaactgggggcaccgggtgcagctacaggatcgaaaggttaaatattttaacattaaggcctcctttgtcgatgagcataccgtgtgtggggtggcgaaggggggaaaagagatcctgctgtcggcagaccacattattatcgctacaggcggccgacccagatatccaacgcatatagagggcgccttggagtatggaattacgtccgacgacatattctggctgaaggaatcaccgggaaaaacgctggtcgtgggcgcatcgtatgtggccctggagtgcgccggattcctgacaggaattgggctggacactaccatcatgatgaggagtattcctctgcgagggtttgaccagcagatgtcgagcatggtgatcgaacatatggccagccacggaactaggttcttgcggggctgtgctccgtctagagttagacgcttgccagatgggcagctgcaagtgacctgggaagatagtaccacaggcaaagaggatacgggtacctttgacacagtcttgtgggcaatcggacgggtgccagacactcgatcactgaatcttgaaaaagccggagtggacactagtcccgatactcaaaagattcttgtagactccagagaagcaacatcggttccacacatctatgccataggcgatgtcgtggaaggtcggcccgagctcaccccaattgccattatggcaggaaggctgctcgtacagaggctgttcggaggaagttctgacttaatggactacgacaacgtgcctaccaccgtgttcacacccctcgagtacggatgtgtgggactgagcgaggaagaggcagtagcaagacacggacaggaacatgtagaagtttatcatgcccactacaagccactggaattcacagttgccggaagagatgctagccagtgttatgttaaaatggtgtgcctcagggaacccccacagttagtactgggcctgcattttttagggccgaatgccggcgaagtgacccagggtttcgcacttggcattaaatgcggagcttcgtacgctcaggtgatgagaactgtgggcatccaccccacctgctccgaggaggtggtgaaattacgaataagcaaaagatccgggttggatcccaccgtgaccggctgctag

SEQ ID NO: 165184 - DNA, 1485 bp, Artificial Sequence
  derived and/or modified sequence
atggaggatcaggcgggacaacgcgactacgatctgcttgtggttggtggcggatcaggcggactggcctgcgccaaagaggccgctcagttgggaaggaaggtagcagtcgttgactacgttgaaccatcccctcaggggacgaggtggggactcgggggtacctgcgtcaatgtgggctgtatcccaaaaaaactaatgcaccaggcagctttgctgggcggattaattcaggacgctcccaattatgggtgggaagtggcccagcccgtgccccatgactggagaaaaatggccgaggccgtgcagaaccacgtgaagtcattaaactgggggcatcgtgtacagctgcaggacagaaaagtgaaatatttcaatatcaaagcatctttcgtcgatgagcacaccgtgtgcggggtcgctaagggcggaaaggagattctgctgagtgccgatcacataatcatagcgactggcggaaggccaaggtatcctacgcatatcgagggagccctagagtacggaataacttccgatgacattttctggctgaaggaatccccaggcaagactcttgtcgttggagcgagttacgtcgcactggaatgtgccggattccttaccggtatagggctggatactaccatcatgatgagatctattccactgcgcggattcgatcaacagatgtcgtctatggtgatagagcatatggcctcccacggcactcggtttctgcgtggctgcgccccatcccgggtgcggcgactgccggatggacagctccaagttacttgggaggactctacaacaggcaaggaggataccggcacctttgacacagtgctgtgggccatcggacgcgttccggacacaaggtctctgaacctggaaaaggctggggtggacacctcccctgacacccagaagattctggtggactcaagggaggcgacctctgtaccacacatctacgcaatcggtgatgttgtcgagggcagaccagagctgactcctattgcaatcatggctggtcgtctgctcgtacaaaggctcttcggaggtagctctgacctgatggactacgacaacgtgcccacaaccgtgttcactcctctggaatatgggtgtgtgggcctgtcagaagaggaagccgtggcccgacacggacaggaacatgttgaggtttaccacgcccattacaaacccctggaatttactgtcgcgggacgcgatgcatctcagtgttacgtaaaaatggtttgccttcgagagcctcctcaactggtcttaggcctgcactttttaggcccaaatgccggtgaggtcacccagggcttcgctcttggaattaagtgtggcgcaagttacgcccaggtcatgcgcacggttggtattcaccccacatgctccgaagaggtggtaaagcttagaatcagcaaacgatcaggtctggatcccaccgtgacaggttgttgaggctag

SEQ ID NO: 165185 - DNA, 1575 bp, Artificial Sequence
  derived and/or modified sequence
atggccgctatggccgtggcactacgcggattgggcggtcgtttcagatggcggacacaggccgtggccggtggggtacgaggtgctgctcgcggagctgctgccggacagcgcgattacgatcttctcgttgtgggcggaggctccggcggacttgcctgcgccaaagaagccgctcagctcggcaggaaagtggccgtggtggactacgtggaaccttcccctcagggcaccaggtgggggcttggaggaacctgtgtcaatgtgggttgtatccccaagaaactcatgcaccaggcggctctgcttggcggactgattcaggacgcccctaattacggctgggaagttgctcagcctgtaccccatgattggcgaaaaatggccgaagcagtccagaatcacgtcaagagtctcaactggggacatagggtgcagttacaggaccggaaggtgaaatacttcaatatcaaagcctcctttgtcgacgagcatactgtgtgcggggttgccaaggggggaaaggaaatacttctgagcgctgaccatatcattatcgcaaccggcggacggcctagatatcctacacatattgaaggtgcattggaatatggcatcacgtccgatgatatcttttggttaaaggagagtccaggcaagacattagtcgtcggtgcctcgtacgtggctttggagtgcgccggtttccttacagggatcggccttgatacaaccataatgatgcgatccatcccacttcgcggatttgatcagcaaatgtcatccatggtgattgaacacatggcttcgcacggcacgcgctttttgcgaggctgtgccccatccagggtgaggaggctcccagacggacaacttcaggtcacctgggaagatagcacaacaggcaaggaggatacagggaccttcgacaccgtgctgtgggcaatcggtcgggtgccggatacgcggagtctcaatttggaaaaagcaggtgtggatacatcacccgatacgcaaaagattctggttgactcgagggaagcaacgagcgtgccccacatttatgcaattggagacgttgtcgagggcagacctgaactcacaccaatcgcgattatggctggacgcctactggtgcagcgcctatttggtggcagtagcgatctcatggattacgataacgtgccaaccactgtgtttacgccccttgagtatggatgtgttgggctgagtgaagaagaggccgtagcgaggcatggccaggaacacgtcgaagtctaccacgctcactacaaacccttagagtttaccgtggccggacgggatgcgtcacagtgctatgtgaagatggtgtgcttgcgtgagccccctcagcttgtcttgggacttcactttttggggccaaatgctggagaagtgacacaaggtttcgcactgggtattaaatgtggagccagctacgcccaggtgatgcgtacggttgggatccaccccacatgttctgaggaagtggtgaaactgaggatttccaaacgatccgggttggatcccacggtcacaggatgctgagggtag

SEQ ID NO: 165186 - DNA, 1566 bp, Artificial Sequence
  derived and/or modified sequence
atggcggcaatggcggtcgccttaagagggctcggcggacgcttcaggtggcgcacccaggctgtggctggcggagtgcgcggtgcagcacgcggtgccgctggacagagagactacgatctgctggttgtcggaggtggaagtggaggactggcttgcgcaaaggaagccgcacagttggggcgtaaggtggcagtggtggactacgtcgaaccaagcccgcagggcactcgctggggccttggaggtacgtgcgttaacgtgggctgcattcctaaaaagttgatgcaccaggcagccctcctgggtgggttgattcaagacgcccctaattatggatgggaagtggcccagccagtacctcacgactggagaaaaatggccgaggcagtccagaaccatgttaagtctttgaactgggggcatcgagtacaattgcaggaccgcaaggtcaaatactttaatatcaaggcctccttcgtggatgagcacactgtgtgcggagtggccaagggtggtaaagagatcctgctgagtgccgatcacatcatcattgctaccggcggacgcccacgttatcccactcacatcgaaggagccttagagtatgggattacatccgatgatatcttttggctcaaagagtccccaggcaaaactctggtggtcggcgcatcttatgtggctttggagtgtgcaggctttctgactggaatagggctggacacaaccattatgatgcggagcatcccgctccgcggttttgaccagcagatgtcctcgatggtgatcgagcacatggcttcccacgggactagattcctaaggggttgcgccccatcgcgcgtccgcagactccctgatgggcagctacaggtcacgtgggaggactccacgacagggaaagaggatactggcactttcgatactgtcctctgggcgattggcagagttcctgatacgcggagccttaatctggagaaagctggggttgacacaagccccgacacccagaaaatactggtggactctagagaagctacaagtgtgccccatatttacgcgattggcgacgtggttgaaggccgacccgaactgacgccaattgccataatggccggaagattactcgtgcaacggctgttcggaggttcaagtgacctcatggactatgacaatgtaccgaccacagtgtttactccgttggagtatggttgcgtcggcctaagcgaagaggaggctgttgccaggcacgggcaagaacacgtagaagtgtaccacgctcattataagcctttggagtttaccgtcgctgggcgagacgccagccagtgttatgtcaaaatggtctgtctgcgcgaacccccacaattagttcttggactacacttcctcggcccaaacgcaggggaagtcactcagggcttcgccctcggaatcaaatgtggcgcttcttacgcacaggtgatgcgcacagtagggattcaccctacttgttctgaggaagtagtaaaactgaggatctctaaacggtcggggctagatcctactgttaccggttgttag

SEQ ID NO: 165187 - DNA, 1569 bp, Artificial Sequence
  derived and/or modified sequence
atggcagcaatggccgtggccctgcgcggacttggcggtaggttccgttggaggacgcaggctgttgcaggcggtgtgcgaggggcagccaggggcgctgccgcaggccaaagggactacgatcttttggtcgtaggcggaggcagcggaggcctggcgtgtgcaaaagaggcagcacagcttggacggaaagtggcggtagtggactacgtggagccatccccacagggaactagatggggcctgggtggcacttgcgtgaacgtcggctgtattcccaaaaagctgatgcaccaagcagcactgctgggagggttaatccaggatgcacccaactacgggtgggaggtggcccagcccgtcccccacgactggcggaaaatggcagaggccgtgcagaatcatgttaagagcctcaattggggacatcgcgtacagctgcaagacaggaaggtcaaatattttaacataaaggcatccttcgtcgacgagcacaccgtttgcggcgtagcaaaagggggaaaagaaattctgctcagtgccgatcacatcattatagctaccggaggaaggcccaggtacccaacacatatcgagggtgccctcgagtatggcataaccagcgatgatattttttggttgaaggagtctcctggcaaaacgctccccgtttccgtctcctatgtagctctcgaatgtgcaggattccttaccgggatcggattagatacaactatcatgatgaggagtataccacttcggggattcgatcagcaaatgtcatctatggtcatcgagcacatggcctctcacggcaccagatttctgagaggctgtgctccatccagggttcgcagactaccggacggacagctgcaggtgacttgggaggatagtaccaccgggaaagaagacacaggaaccttcgacaccgtcttatgggccatcgggagagtgcctgacacacgatcattgaacctcgagaaggccggagtcgacactagcccagatacacaaaaaattctagttgactctcgtgaggctacttcagtcccacacatttatgcaatcggagacgtggttgaggggcgtccggagctgacccccattgccatcatggcaggacgcctcctggtccagcggctgtttggtggcagctcagacttaatggactacgataatgtgccaacaactgtgttcacccccctagagtacggatgtgttggactctctgaggaggaggctgtggcaagacatggacaggaacatgtggaagtgtatcacgcccattacaagccactcgagtttaccgttgctggcagagacgccagccagtgctacgtgaaaatggtgtgtttacgtgaacctccacagctggtgctggggctgcatttcctgggccctaacgccggagaagtcacccagggatttgccctgggcataaaatgcggagcctcttacgctcaggtgatgaggacggtgggaatccatccgacttgcagcgaggaggtcgtgaagctcaggatttcaaagcgtagcggactcgatccaacagtaactgggtgctag

SEQ ID NO: 165188 - DNA, 1281 bp, Artificial Sequence
  derived and/or modified sequence
atgcatcaggccgctcttcttgggggactcatacaggatgctccaaattacggatgggaggtggcgcagcctgttccccacgactggaggaaaatggcagaagcagtgcagaatcatgtgaaaagtctcaattggggccatcgtgttcaactgcaagaccggaaggtgaaatacttcaatattaaagcttcatttgtcgatgaacacactgtgtgcggggtggcgaagggtggtaaggaaattctgctcagcgctgatcacatcatcatcgcaactggcggacggcctcggtatccaacgcacatcgagggcgctctcgagtacggtatcacaagtgatgatatcttttggcttaaggagagtcctgggaaaacatgcgtggtcgcacatgcatatgtagccctggagtgcgccggattccttacaggcatcggcctagatacaacgattatgatgaggagcatccctttgcgcggattcgaccagcagatgtcaagtatggttatcgagcacatggcaagtcacggcacgcggtttttaagaggctgtgccccttcgagggtgcgcagactgccagatggacagcttcaagtcacctgggaggacagtacaacggggaaagaggacaccgggaccttcgataccgtactctgggccattggcagagttcctgacacccggtccttgaacttagaaaaagccggtgtagatacgtctcctgatactcagaagattttggtagattcaagggaggcaacctccgtaccccatatttacgccatcggtgacgttgtcgagggacggccagaacttacacctattgcaataatggccggtcgcctgttggttcaacgcctgtttggtggtagcagcgatctgatggattatgataatgtacccacaacagtgtttactccccttgagtatggttgtgtcgggcttagtgaagaggaggccgtggcacggcatggtcaggagcacgtcgaagtgtaccacgcgcactacaaacccctggagttcaccgttgctgggcgagatgccagccagtgctatgtaaaaatggtatgcctgcgtgagccccctcaactcgtgttaggactgcatttcctcggaccaaacgcgggagaggttacacagggatttgcactcgggattaaatgcggggctagctacgcacaggttatgaggaccgtgggcatacatccgacctgttcagaggaggttgtgaagctccggattagcaagcggtctggactcgatcctactgtaaccggctgctag

SEQ ID NO: 165189 - DNA, 1479 bp, Artificial Sequence
  derived and/or modified sequence
atggaagatcaggccggtcaacgcgactatgacctcttggtggtaggtggtggatcaggagggttggcctgcgctaaagaagccgctcagctggggcgtaaagtcgctgtagtggactatgttgaaccttctccacaaggcactcggtgggggctgggcggaacctgtgtcaatgtggggtgcatccccaagaagttgatgcaccaagccgctctcctcggtggcctgatacaggacgcacccaactacggttgggaggtcgctcaacccgtgccgcacgactggcgtaaaatggccgaggccgtgcaaaatcacgtgaaatctctaaactggggacaccgtgtccagctccaggatcggaaggtgaaatacttcaatatcaaggcctcgtttgttgatgaacatactgtgtgcggcgtggccaagggtggtaaggagattctcctgtccgccgaccatatcattattgctactggcggacggcctaggtatcctacccatatcgagggggctctcgagtatgggattacatcggatgacatcttctggcttaaggaaagccccggaaagactttggtggtaggggcttcgtacgtggccctggagtgcgcaggtttcctgactggtattggacttgacactactattatgatgcgatccattcctctaaggggattcgaccaacaaatgtcatccatggtgatcgagcacatggccagccacggaacaagattccttcggggttgcgcaccatcccgcgtgaggcgcctcccggatggccagctgcaggtgacctgggaggacagtacaacaggtaaagaggacaccgggacatttgacactgtgctgtgggccattgggcgagtgcccgatactcggtctttaaatcttgagaaagctggggtggacacttctcccgacacacagaagatactcgtggattcccgtgaagccacgtccgtgccccatatctatgcgataggtgatgtggtggaagggaggcctgagctgacgccaatcgccattatggccggacgcctcctggtgcaacggctattcggaggctcttcagatttgatggactacgacaacgtgcctactactgtatttactcccctggagtacggatgtgtcggactgtccgaggaagaggccgtggcgagacacggtcaagagcacgtcgaggtatatcatgcacactacaaacctctagaattcaccgtggcgggtcgtgacgcctctcagtgctatgtgaaaatggtctgcctgcgagaaccgccacagctggtgttggggctacacttcctgggacctaatgccggagaggtaacccaggggttcgcccttggtatcaagtgcggggcatcttatgctcaggttatgcgcaccgtcggaattcatcccacgtgctcggaggaggtcgtgaagctgagaatcagcaaacggtccggcctggacccaactgttactgggtgctag

SEQ ID NO: 165190 - DNA, 2025 bp, Artificial Sequence
  derived and/or modified sequence
ccggacctcaggcccagttcagtgtacttcccctctctacttcctccctccagtcccttctccatccctcccttttttggctgccccttgcctgccttcctcgccagtagcttgcagagtagacacgatgacaccttttgcaggctaaaaaggctgagagtggcactatgtgcagtgagccaccatggaggaccaagcaggtcagcgggactatgatctcctggtggtcggcgggggatctggtggcctggcttgtgccaaggaggccgcccagctgggaaggaaggtggccgtggtggactacgtggaaccttctccccaaggcacccggtggggcctcggcggcacctgcgtcaacgtgggctgcatccccaagaagctgatgcaccaggcggcactgctgggaggcctgatccaagatgcccccaactatggctgggaggtggcccagcccgtgccgcatgactggaggaagatggcagaagctgttcaaaatcacgtgaaatccttgaactggggccaccgtgtccagcttcaggacagaaaagtcaagtactttaacatcaaagccagctttgttgacgagcacacggtttgcggcgttgccaaaggtgggaaagagattctgctgtcagccgatcacatcatcattgctactggagggcggccgagataccccacgcacatcgaaggtgccttggaatatggaatcacaagtgatgacatcttctggctgaaggaatcccctggaaaaacgttggtggtcggggccagctatgtggccctggagtgtgctggcttcctcaccgggattgggctggacaccaccatcatgatgcgcagcatccccctccgcggcttcgaccagcaaatgtcctccatggtcatagagcacatggcatctcatggcacccggttcctgaggggctgtgccccctcgcgggtcaggaggctccctgatggccagctgcaggtcacctgggaggacagcaccaccggcaaggaggacacgggcacctttgacaccgtcctgtgggccataggtcgagtcccagacaccagaagtctgaatttggagaaggctggggtagatactagccccgacactcagaagatcctggtggactcccgggaagccacctctgtgccccacatctacgccattggtgacgtggtggaggggcggcctgagctgacacccatagcgatcatggccgggaggctcctggtgcagcggctcttcggcgggtcctcagatctgatggactacgacaatgttcccacgaccgtcttcaccccgctggagtatggctgtgtggggctgtccgaggaggaggcagtggctcgccacgggcaggagcatgttgaggtctatcacgcccattataaaccactggagttcacggtggctggacgagatgcatcccagtgttatgtaaagatggtgtgcctgagggagcccccacagctggtgctgggcctgcatttccttggccccaacgcaggcgaagttactcaaggatttgctctggggatcaagtgtggggcttcctatgcgcaggtgatgcggaccgtgggtatccatcccacatgctctgaggaggtagtcaagctgcgcatctccaagcgctcaggcctggaccccacggtgacaggctgctgagggtaagcgccatccctgcaggccagggcacacggtgcgcccgccgccagctcctcggaggccagacccaggatggctgcaggccaggtttggggggcctcaaccctctcctggagcgcctgtgagatggtcagcgtggagcgcaagtgctggacaggtggcccgtgtgccccacagggatggctcaggggactgtccacctcacccctgcacctctcagcctctgccgccgggcacccccccccaggctcctggtgccagatgatgacgacctgggtggaaacctaccctgtgggcacccatgtccgagccccctggcatttctgcaatgcaaataaagagggtactttttctgaagtgtg

SEQ ID NO: 165191 - DNA, 1933 bp, Artificial Sequence
  derived and/or modified sequence
cacgacgatggcggcaatggcggtggcgctgcggggattaggagggcgcttccggtggcggacgcaggccgtggcgggcggggtgcggggcgcggcgcggggcgcagcagcaggtcagcgggactatgatctcctggtggtcggcgggggatctggtggcctggcttgtgccaaggaggccgcccagctgggaaggaaggtggccgtggtggactacgtggaaccttctccccaaggcacccggtggggcctcggcggcacctgcgtcaacgtgggctgcatccccaagaagctgatgcaccaggcggcactgctgggaggcctgatccaagatgcccccaactatggctgggaggtggcccagcccgtgccgcatgactggaggaagatggcagaagctgttcaaaatcacgtgaaatccttgaactggggccaccgtgtccagcttcaggacagaaaagtcaagtactttaacatcaaagccagctttgttgacgagcacacggtttgcggcgttgccaaaggtgggaaagagattctgctgtcagccgatcacatcatcattgctactggagggcggccgagataccccacgcacatcgaaggtgccttggaatatggaatcacaagtgatgacatcttctggctgaaggaatcccctggaaaaacgttggtggtcggggccagctatgtggccctggagtgtgctggcttcctcaccgggattgggctggacaccaccatcatgatgcgcagcatccccctccgcggcttcgaccagcaaatgtcctccatggtcatagagcacatggcatctcatggcacccggttcctgaggggctgtgccccctcgcgggtcaggaggctccctgatggccagctgcaggtcacctgggaggacagcaccaccggcaaggaggacacgggcacctttgacaccgtcctgtgggccataggtcgagtcccagacaccagaagtctgaatttggagaaggctggggtagatactagccccgacactcagaagatcctggtggactcccgggaagccacctctgtgccccacatctacgccattggtgacgtggtggaggggcggcctgagctgacacccatagcgatcatggccgggaggctcctggtgcagcggctcttcggcgggtcctcagatctgatggactacgacaatgttcccacgaccgtcttcaccccgctggagtatggctgtgtggggctgtccgaggaggaggcagtggctcgccacgggcaggagcatgttgaggtctatcacgcccattataaaccactggagttcacggtggctggacgagatgcatcccagtgttatgtaaagatggtgtgcctgagggagcccccacagctggtgctgggcctgcatttccttggccccaacgcaggcgaagttactcaaggatttgctctggggatcaagtgtggggcttcctatgcgcaggtgatgcggaccgtgggtatccatcccacatgctctgaggaggtagtcaagctgcgcatctccaagcgctcaggcctggaccccacggtgacaggctgctgagggtaagcgccatccctgcaggccagggcacacggtgcgcccgccgccagctcctcggaggccagacccaggatggctgcaggccaggtttggggggcctcaaccctctcctggagcgcctgtgagatggtcagcgtggagcgcaagtgctggacaggtggcccgtgtgccccacagggatggctcaggggactgtccacctcacccctgcacctctcagcctctgccgccgggcacccccccccaggctcctggtgccagatgatgacgacctgggtggaaacctaccctgtgggcacccatgtccgagccccctggcatttctgcaatgcaaataaagagggtactttttctgaa

SEQ ID NO: 165192 - DNA, 3130 bp, Artificial Sequence
  derived and/or modified sequence
atggcggcaatggcggtggcgctgcggggattaggagggcgcttccggtggcggacgcaggccgtggcgggcggggtgcggggcgcggcgcggggcgcagcaggtcagcgggactatgatctcctggtggtcggcgggggatctggtggcctggcttgtgccaaggaggccgcccagctgggaaggaaggtggccgtggtggactacgtggaaccttctccccaaggcacccggtggggcctcggcggcacctgcgtcaacgtgggctgcatccccaagaagctgatgcaccaggcggcactgctgggaggcctgatccaagatgcccccaactatggctgggaggtggcccagcccgtgccgcatgactggaggaagatggcagaagctgttcaaaatcacgtgaaatccttgaactggggccaccgtgtccagcttcaggacagaaaagtcaagtactttaacatcaaagccagctttgttgacgagcacacggtttgcggcgttgccaaaggtgggaaagagattctgctgtcagccgatcacatcatcattgctactggagggcggccgagataccccacgcacatcgaaggtgccttggaatatggaatcacaagtgatgacatcttctggctgaaggaatcccctggaaaaacgttggtggtcggggccagctatgtggccctggagtgtgctggcttcctcaccgggattgggctggacaccaccatcatgatgcgcagcatccccctccgcggcttcgaccagcaaatgtcctccatggtcatagagcacatggcatctcatggcacccggttcctgaggggctgtgccccctcgcgggtcaggaggctccctgatggccagctgcaggtcacctgggaggacagcaccaccggcaaggaggacacgggcacctttgacaccgtcctgtgggccataggtcgagtcccagacaccagaagtctgaatttggagaaggctggggtagatactagccccgacactcagaagatcctggtggactcccgggaagccacctctgtgccccacatctacgccattggtgacgtggtggaggggcggcctgagctgacacccatagcgatcatggccgggaggctcctggtgcagcggctcttcggcgggtcctcagatctgatggactacgacaatgttcccacgaccgtcttcaccccgctggagtatggctgtgtggggctgtccgaggaggaggcagtggctcgccacgggcaggagcatgttgaggtctatcacgcccattataaaccactggagttcacggtggctggacgagatgcatcccagtgttatgtaaagatggtgtgcctgagggagcccccacagctggtgctgggcctgcatttccttggccccaacgcaggcgaagttactcaaggatttgctctggggatcaagtgtggggcttcctatgcgcaggtgatgcggaccgtgggtatccatcccacatgctctgaggaggtagtcaagctgcgcatctccaagcgctcaggcctggaccccacggtgacaggctgctgagggtaagcgccatccctgcaggccagggcacacggtgcgcccgccgccagctcctcggaggccagacccaggtatgcaggtggggctggctctgtttgaggacagggcatgtggcaggggtgcaggagccctggccatgggctccctccaggtgtacagcaaggctacacctgccacgccacccagaatgggtgctccatcctgtaaccaggccacagcggtgacaggcagaaggggaagttcccaggggcccaaacctccccgggggaccccagaccccggcctggccacagctgctccccacacacaggaggtatcaagaaacggggctcatccttagcagcctatcccaggtggatgttggcgtggaaggtgtcccgggtgggctaaagtcgggcatctcaagttgctgccccacagggggctgcagtcgggaagctggcctcccaccgaggcctcccaccaaggcctggctcctgcagagttcagcgcccgctcatttccctatctcccagaaggtggagacgctgccctgtgatggccggccctgcccagcctgccctgcacatctggttctgttccagctctgcagagccaggctgaccggggggcatgttgttcatcgtgacctcttctggggaggaagaaactggcaagggctcctggcctctgccccagggatgcctgtgccagagccccctcgcctcgtggtctaatagtgcatcctccggcctgggctgcagggcaggggccggggcagggtgggccctcagcccgtgccatccagcccacctggggcacccccatggctgtcagcccctcccagggttggggtgtttgggctccatctctcccccggggctgaggtggagaccaggcagagcagtgggctccccccaagatgcctgtggacaggctctagggtctgcatggcgccgaggggctctggggaggcctctctgggggtactcagggccccctgcttcaccgtggccgcctccccccggcggggccgcgctcgatagggataaacaaagggcatcctgaggaaactcttatcagaacattacacctcccagagctgttttgttaggagcctgctataaatttttatcatttcaaaatatttttgtagcaccgcgtcgctccctgtgacgcatcgccctggggtggggccattctctgctgggtttatttctcacccatctcccttgggggtccctgggtgtggcagtgggagacatagctaggctgatgtgaggggtgggtggctgacctgtgctgaccttcctgttgttggcaggatggctgcaggccaggtttggggggcctcaaccctctcctggagcgcctgtgagatggtcagcgtggagcgcaagtgctggacaggtggcccgtgtgccccacagggatggctcaggggactgtccacctcacccctgcacctctcagcctctgccgccgggcacccccccccaggctcctggtgccagatgatgacgacctgggtggaaacctaccctgtgggcacccatgtccgagccccctggcatttctgcaatgc

SEQ ID NO: 165193 - DNA, 1964 bp, Artificial Sequence
  derived and/or modified sequence
ggcagccctagctgccccagaagccccacgacgatggcggcaatggcggtggcgctgcggggattaggagggcgcttccggtggcggacgcaggccgtggcgggcggggtgcggggcgcggcgcggggcgcagcagcaggtcagcgggactatgatctcctggtggtcggcgggggatctggtggcctggcttgtgccaaggaggccgcccagctgggaaggaaggtggccgtggtggactacgtggaaccttctccccaaggcacccggtggggcctcggcggcacctgcgtcaacgtgggctgcatccccaagaagctgatgcaccaggcggcactgctgggaggcctgatccaagatgcccccaactatggctgggaggtggcccagcccgtgccgcatgactggaggaagatggcagaagctgttcaaaatcacgtgaaatccttgaactggggccaccgtgtccagcttcaggacagaaaagtcaagtactttaacatcaaagccagctttgttgacgagcacacggtttgcggcgttgccaaaggtgggaaagagattctgctgtcagccgatcacatcatcattgctactggagggcggccgagataccccacgcacatcgaaggtgccttggaatatggaatcacaagtgatgacatcttctggctgaaggaatcccctggaaaaacgctgcctgtcagtgtgtcatatgtggccctggagtgtgctggcttcctcaccgggattgggctggacaccaccatcatgatgcgcagcatccccctccgcggcttcgaccagcaaatgtcctccatggtcatagagcacatggcatctcatggcacccggttcctgaggggctgtgccccctcgcgggtcaggaggctccctgatggccagctgcaggtcacctgggaggacagcaccaccggcaaggaggacacgggcacctttgacaccgtcctgtgggccataggtcgagtcccagacaccagaagtctgaatttggagaaggctggggtagatactagccccgacactcagaagatcctggtggactcccgggaagccacctctgtgccccacatctacgccattggtgacgtggtggaggggcggcctgagctgacacccatagcgatcatggccgggaggctcctggtgcagcggctcttcggcgggtcctcagatctgatggactacgacaatgttcccacgaccgtcttcaccccgctggagtatggctgtgtggggctgtccgaggaggaggcagtggctcgccacgggcaggagcatgttgaggtctatcacgcccattataaaccactggagttcacggtggctggacgagatgcatcccagtgttatgtaaagatggtgtgcctgagggagcccccacagctggtgctgggcctgcatttccttggccccaacgcaggcgaagttactcaaggatttgctctggggatcaagtgtggggcttcctatgcgcaggtgatgcggaccgtgggtatccatcccacatgctctgaggaggtagtcaagctgcgcatctccaagcgctcaggcctggaccccacggtgacaggctgctgagggtaagcgccatccctgcaggccagggcacacggtgcgcccgccgccagctcctcggaggccagacccaggatggctgcaggccaggtttggggggcctcaaccctctcctggagcgcctgtgagatggtcagcgtggagcgcaagtgctggacaggtggcccgtgtgccccacagggatggctcaggggactgtccacctcacccctgcacctctcagcctctgccgccgggcacccccccccaggctcctggtgccagatgatgacgacctgggtggaaacctaccctgtgggcacccatgtccgagccccctggcatttctgcaatgcaaataaagagggtactttttctgaagtgtg

SEQ ID NO: 165194 - DNA, 1929 bp, Artificial Sequence
  derived and/or modified sequence
cgacgatggcggcaatggcggtggcgctgcggggattaggagggcgcttccggtggcggacgcaggccgtggcgggcggggtgcggggcgcggcgcggggcgcagcagcaggtcagcgggactatgatctcctggtggtcggcgggggatctggtggcctggcttgtgccaaggaggccgcccagctgggaaggaaggtggccgtggtggactacgtggaaccttctccccaaggcacccggtggggcctcggcggcacctgcgtcaacgtgggctgcatccccaagaagctgatgcaccaggcggcactgctgggaggcctgatccaagatgcccccaactatggctgggaggtggcccagcccgtgccgcatgactggaggaagatggcagaagctgttcaaaatcacgtgaaatccttgaactggggccaccgtgtccagcttcaggacagaaaagtcaagtactttaacatcaaagccagctttgttgacgagcacacggtttgcggcgttgccaaaggtgggaaagagattctgctgtcagccgatcacatcatcattgctactggagggcggccgagataccccacgcacatcgaaggtgccttggaatatggaatcacaagtgatgacatcttctggctgaaggaatcccctggaaaaacgtgtgtggtggctcatgcttatgtggccctggagtgtgctggcttcctcaccgggattgggctggacaccaccatcatgatgcgcagcatccccctccgcggcttcgaccagcaaatgtcctccatggtcatagagcacatggcatctcatggcacccggttcctgaggggctgtgccccctcgcgggtcaggaggctccctgatggccagctgcaggtcacctgggaggacagcaccaccggcaaggaggacacgggcacctttgacaccgtcctgtgggccataggtcgagtcccagacaccagaagtctgaatttggagaaggctggggtagatactagccccgacactcagaagatcctggtggactcccgggaagccacctctgtgccccacatctacgccattggtgacgtggtggaggggcggcctgagctgacacccatagcgatcatggccgggaggctcctggtgcagcggctcttcggcgggtcctcagatctgatggactacgacaatgttcccacgaccgtcttcaccccgctggagtatggctgtgtggggctgtccgaggaggaggcagtggctcgccacgggcaggagcatgttgaggtctatcacgcccattataaaccactggagttcacggtggctggacgagatgcatcccagtgttatgtaaagatggtgtgcctgagggagcccccacagctggtgctgggcctgcatttccttggccccaacgcaggcgaagttactcaaggatttgctctggggatcaagtgtggggcttcctatgcgcaggtgatgcggaccgtgggtatccatcccacatgctctgaggaggtagtcaagctgcgcatctccaagcgctcaggcctggaccccacggtgacaggctgctgagggtaagcgccatccctgcaggccagggcacacggtgcgcccgccgccagctcctcggaggccagacccaggatggctgcaggccaggtttggggggcctcaaccctctcctggagcgcctgtgagatggtcagcgtggagcgcaagtgctggacaggtggcccgtgtgccccacagggatggctcaggggactgtccacctcacccctgcacctctcagcctctgccgccgggcacccccccccaggctcctggtgccagatgatgacgacctgggtggaaacctaccctgtgggcacccatgtccgagccccctggcatttctgcaatgcaaataaagagggtactttttctg

SEQ ID NO: 165195 - DNA, 1814 bp, Artificial Sequence
  derived and/or modified sequence
cgatgacaccttttgcaggctaaaaaggctgagagtggcactatgtgcagtgagccaccatggaggaccaagcaggtcagcgggactatgatctcctggtggtcggcgggggatctggtggcctggcttgtgccaaggaggccgcccagctgggaaggaaggtggccgtggtggactacgtggaaccttctccccaaggcacccggtggggcctcggcggcacctgcgtcaacgtgggctgcatccccaagaagctgatgcaccaggcggcactgctgggaggcctgatccaagatgcccccaactatggctgggaggtggcccagcccgtgccgcatgactggaggaagatggcagaagctgttcaaaatcacgtgaaatccttgaactggggccaccgtgtccagcttcaggacagaaaagtcaagtactttaacatcaaagccagctttgttgacgagcacacggtttgcggcgttgccaaaggtgggaaagagattctgctgtcagccgatcacatcatcattgctactggagggcggccgagataccccacgcacatcgaaggtgccttggaatatggaatcacaagtgatgacatcttctggctgaaggaatcccctggaaaaacgttggtggtcggggccagctatgtggccctggagtgtgctggcttcctcaccgggattgggctggacaccaccatcatgatgcgcagcatccccctccgcggcttcgaccagcaaatgtcctccatggtcatagagcacatggcatctcatggcacccggttcctgaggggctgtgccccctcgcgggtcaggaggctccctgatggccagctgcaggtcacctgggaggacagcaccaccggcaaggaggacacgggcacctttgacaccgtcctgtgggccataggtcgagtcccagacaccagaagtctgaatttggagaaggctggggtagatactagccccgacactcagaagatcctggtggactcccgggaagccacctctgtgccccacatctacgccattggtgacgtggtggaggggcggcctgagctgacacccatagcgatcatggccgggaggctcctggtgcagcggctcttcggcgggtcctcagatctgatggactacgacaatgttcccacgaccgtcttcaccccgctggagtatggctgtgtggggctgtccgaggaggaggcagtggctcgccacgggcaggagcatgttgaggtctatcacgcccattataaaccactggagttcacggtggctggacgagatgcatcccagtgttatgtaaagatggtgtgcctgagggagcccccacagctggtgctgggcctgcatttccttggccccaacgcaggcgaagttactcaaggatttgctctggggatcaagtgtggggcttcctatgcgcaggtgatgcggaccgtgggtatccatcccacatgctctgaggaggtagtcaagctgcgcatctccaagcgctcaggcctggaccccacggtgacaggctgctgagggtaagcgccatccctgcaggccagggcacacggtgcgcccgccgccagctcctcggaggccagacccaggatggctgcaggccaggtttggggggcctcaaccctctcctggagcgcctgtgagatggtcagcgtggagcgcaagtgctggacaggtggcccgtgtgccccacagggatggctcaggggactgtccacctcacccctgcacctctcagcctctgccgccgggcacccccccccaggctcctggtgccagatgatgacgacctgg

SEQ ID NO: 165196 - protein, 203 aa, Artificial Sequence
  derived and/or modified sequence
MAAAAVSSAKRSLRGELKQRLRAMSAEERLRQSRVLSQKVIAHSEYQKSKRISIFLSMQDEIETEEIIKDIFQRGKICFIPRYRFQSNHMDMVRIESPEEISLLPKTSWNIPQPGEGDVREEALSTGGLDLIFMPGLGFDKHGNRLGRGKGYYDAYLKRCLQHQEVKPYTLALAFKEQICLQVPVNENDMKVDEVLYEDSSTA

SEQ ID NO: 165197 - DNA, 612 bp, Artificial Sequence
  derived and/or modified sequence
atggccgccgccgccgtgagcagcgccaagagaagcctgagaggcgagctgaagcagagactgagagccatgagcgccgaggagagactgagacagagcagagtgctgagccagaaggtgatcgcccacagcgagtaccagaagagcaagagaatcagcatcttcctgagcatgcaggacgagatcgagaccgaggagatcatcaaggacatcttccagagaggcaagatctgcttcatccccagatacagattccagagcaaccacatggacatggtgagaatcgagagccccgaggagatcagcctgctgcccaagaccagctggaacatcccccagcccggcgagggcgacgtgagagaggaggccctgagcaccggcggcctggacctgatcttcatgcccggcctgggcttcgacaagcacggcaacagactgggcagaggcaagggctactacgacgcctacctgaagagatgcctgcagcaccaggaggtgaagccctacaccctggccctggccttcaaggagcagatctgcctgcaggtgcccgtgaacgagaacgacatgaaggtggacgaggtgctgtacgaggacagcagcaccgcctag

SEQ ID NO: 165198 - DNA, 907 bp, Artificial Sequence
  derived and/or modified sequence
agaccgaacccgagggcgcccagggcgccgagggcgggactggactcggcttgggcgtgagatggcggcggcagcggtgagcagcgccaagcggagcctgcggggagagctgaagcagcgtctgcgggcgatgagtgccgaggagcggctacgccagtcccgcgtactgagccagaaggtgattgcccacagtgagtatcaaaagtccaaaagaatttccatctttctgagcatgcaagatgaaattgagacagaagagatcatcaaggacattttccaacgaggcaaaatctgcttcatccctcggtaccggttccagagcaatcacatggatatggtgagaatagaatcaccagaggaaatttctttacttcccaaaacatcctggaatatccctcagcctggtgagggtgatgttcgggaggaggccttgtccacagggggacttgatctcatcttcatgccaggccttgggtttgacaaacatggcaaccgactggggaggggcaagggctactatgatgcctatctgaagcgctgtttgcagcatcaggaagtgaagccctacaccctggcgttggctttcaaagaacagatttgcctccaggtcccagtgaatgaaaacgacatgaaggtagatgaagtcctttacgaagactcgtcaacagcttaaatctggattactacagccaaataatcagtgttttatatgagagtaaagcaaagtatgtgtatttttcccttgtcaaaaattagttgaaattgttcattaatgtgaatacagactgcattttaaaattgtaattatgaaataccttatataaaaccatctttaaaaaccaatagaagtgtgaatagtagaatattaattaaaatggaggctatcagcctgtgattttcagcttaa

SEQ ID NO: 165199 - DNA, 612 bp, Artificial Sequence
  derived and/or modified sequence
atggccgccgcagccgtgtcttccgcaaaacgatccctgcgtggggagctcaagcagaggttgagggctatgagcgccgaagagcgtctgagacagtcccgagtcctatctcagaaggtcattgctcattcagagtaccagaaatcgaaaaggatcagcatatttctgtcaatgcaggatgagattgaaaccgaggaaattatcaaggacatcttccagcgggggaagatctgtttcattccacgataccgcttccagagtaatcacatggatatggtgagaattgagtctcccgaagaaatcagtctcctgcccaaaacgtcctggaacattccacagccgggggagggagatgtgagagaggaggccttgagtactggtggcctcgacttgattttcatgccagggctaggcttcgacaaacacggcaataggttgggccgtggaaaaggatattacgatgcctatttgaagcgatgcctgcagcatcaagaagtgaaaccatacaccctcgccttggctttcaaagagcagatctgcttgcaggtgccggtgaacgagaatgacatgaaagtggacgaagtcctatatgaagactcatcaacggcatag

SEQ ID NO: 165200 - DNA, 612 bp, Artificial Sequence
  derived and/or modified sequence
atggctgctgctgctgtgagcagcgccaagaggagcctgcggggggagctgaagcagaggctgcgggccatgtctgctgaggagcggctgcggcagagccgggtgctgagccagaaggtgattgcccacagcgagtaccagaagagcaagaggatcagcatcttcctgtccatgcaggatgaaattgaaacagaggagatcatcaaggacatcttccagaggggcaagatctgcttcatcccccgctaccgcttccagagcaaccacatggacatggtgagaattgagagccctgaggagatcagcctgctgcccaagacctcctggaacatcccccagcccggggagggagatgtgcgggaggaggccctgagcactggaggcctggacctgatcttcatgcctggcctgggctttgacaagcacggcaaccggctgggccggggcaagggctactatgatgcctacctgaagcgctgcctgcagcaccaggaggtgaagccctacaccctggccctggccttcaaggagcagatctgcctgcaggtgcctgtgaatgaaaatgacatgaaggtggatgaggtgctgtatgaggacagcagcacagcctag

SEQ ID NO: 165201 - DNA, 612 bp, Artificial Sequence
  derived and/or modified sequence
atggccgccgccgccgtgagcagcgccaagcggagcctgcggggcgagctgaaacaacgccttagagctatgtccgctgaggagcgcctgcgccaaagccgtgtgctttcgcagaaggtgatagcccatagcgaataccaaaagtctaagcgcatctctatttttctgtctatgcaggatgagatcgagacggaggagatcattaaagacatcttccagcgtggaaagatttgtttcatccctagatatcgctttcagagtaaccatatggacatggtgcgtatcgaaagcccagaggagatcagtcttctccccaaaactagctggaacattccacaacctggcgaaggagatgtacgggaagaagcactgtccacaggagggctggatctaatctttatgccaggccttggcttcgataaacacggaaacagactgggtcgggggaaaggctattacgacgcatatctgaagagatgcctccagcaccaagaggtcaagccttatacactggccctggcattcaaagaacagatttgtttgcaggtcccggttaacgagaatgatatgaaagtggacgaagtcctgtatgaggattctagtaccgcgtag

SEQ ID NO: 165202 - DNA, 612 bp, Artificial Sequence
  derived and/or modified sequence
atggctgccgctgccgtgtcctcggccaagaggtcactgcgtggcgagcttaagcaaaggctgagagccatgtccgccgaggagcgcctgcgtcagtctagggttctgagtcagaaggtgatcgcccactcggagtaccaaaagtccaaacggattagtattttcctgagtatgcaggatgaaatcgagaccgaggagatcatcaaagatatatttcagcggggaaaaatatgtttcatccctaggtaccgatttcaatctaaccatatggatatggtcaggatcgaatcccccgaagaaatttccctgttgcctaagacaagctggaacatccctcaaccaggagagggcgacgtgcgagaggaggccctgtctaccgggggtctggatcttatcttcatgccagggcttggattcgacaaacatggtaacagactggggcgtgggaaaggttattacgatgcctatctgaagaggtgtcttcagcaccaggaagtgaaaccttacactctggccctggcctttaaggagcagatctgtcttcaggtccctgtgaatgaaaacgatatgaaggtggatgaagtgctttacgaagattcttccactgcatag

SEQ ID NO: 165203 - protein, 205 aa, Artificial Sequence
  derived and/or modified sequence
MPSKKKKYNARFPPARIKKIMQTDEEIGKVAAAVPVIISRALELFLESLLKKACQVTQSRNAKTMTTSHLKQCIELEQQFDFLKDLVASVPDMQGDGEDNHMDGDKGARRGRKPGSGGRKNGGMGTKSKDKKLSGTDSEQEDESEDTDTDGEEETSQPPPQASHPSAHFQSPPTPFLPFASTLPLPPAPPGPSAPDEEDEEDYDS

SEQ ID NO: 165204 - DNA, 1022 bp, Artificial Sequence
  derived and/or modified sequence
gggcgggagcggcggtccagactggggagggacgcgcaccggccaggaggcttcaagaggagggcactagggccctgcgagcggcgtcttaaccggcggcgctaggactccgcgggaaacggcgggggcggagcgggcggcaccaggacccaggggaaccgcgacgggcgggcggcgagcaggcccgggagccgggaggctgcgggcggcggcgctggacccgacgcggcgagagaggccccgagatgccgagcaagaagaagaagtacaacgcgcggttcccgccggcgcggatcaagaagatcatgcagacggacgaagagattgggaaggtggcggcggcggtgcctgtcatcatctcccgggcgctcgagctcttcctagagtcgctgttgaagaaggcctgccaggtgacccagtcgcggaacgcgaagaccatgaccacatcccacctgaagcagtgcatcgagctggagcagcagtttgacttcttgaaggacctggtggcatctgttcccgacatgcagggggacggggaagacaaccacatggatggggacaagggcgcccgcaggggccggaagccaggcagcggcggccggaagaacggtgggatgggaacgaaaagcaaggacaagaagctgtccgggacagactcggagcaggaggatgaatctgaggacacagatactgatggggaagaggagacatcacaacccccaccccaggccagccacccctctgcccactttcagagccccccgacacccttcctgcccttcgcctctactctgcctttgcccccagcgcccccgggcccctcagcacctgatgaagaggacgaagaagattacgactcctagcgccttctgccccccagaccatagccccttttagttggttttagttgctctggggggaggagagaaggtagagctgttcttaaatttattaaaaaaaaaaataaaagggaatctcagtgtctgttccaggctctgcgcaggaaaaaaaaaaaaaaaaaa

SEQ ID NO: 165205 - DNA, 618 bp, Artificial Sequence
  derived and/or modified sequence
atgcccagtaagaagaaaaagtacaacgcgcggttccccccagcccgtatcaagaagatcatgcagacggatgaggaaattggcaaggtagccgcagcagttccggttattatctctagagccctcgagctgttcttggagagcctcctgaaaaaggcttgtcaggtaactcagagcaggaatgccaaaaccatgactacttcacatcttaagcaatgcatcgagttggagcaacagttcgactttctcaaggatctggtagccagcgttccagacatgcagggtgatggcgaagacaaccacatggatggcgacaagggtgccaggcgtggccgtaagcccggctctggcggacgcaagaacggcggaatgggcaccaaatctaaggacaaaaagttatccggaacagattctgagcaggaggacgagtctgaggatactgacactgacggcgaagaagagacatctcagcctcccccacaagcaagtcaccccagcgctcactttcaatcgcccccaactccattcttgccatttgcgtcaactctgcctctcccacccgcaccccccgggccatctgccccagacgaagaagacgaggaagattatgacagctag

SEQ ID NO: 165206 - DNA, 618 bp, Artificial Sequence
  derived and/or modified sequence
atgcccagcaagaagaagaagtacaatgcccgcttccccccagcccgcatcaagaagatcatgcagacagatgaggagatcggcaaggtggccgctgctgtgcctgtgatcatcagccgggccctggagctgttcctggagagcctgctgaagaaggcctgccaggtgacccagagcagaaatgccaagaccatgaccaccagccacctgaagcagtgcatcgagctggagcagcagtttgacttcctgaaggacctggtggcctctgtgcctgacatgcagggagatggagaggacaaccacatggatggagacaagggggcccggcggggcaggaagccaggcagcggcggcaggaagaatggaggcatgggcaccaagagcaaggacaagaagctgagcggcacagacagcgagcaggaggatgaaagtgaggacacagacacagatggagaggaggagaccagccagcccccaccccaggccagccaccccagcgcccacttccagagcccccccacccccttcctgccctttgccagcaccctgcccctgcccccagcccctcctggccccagcgccccagatgaggaggatgaagaagattatgacagctag

SEQ ID NO: 165207 - DNA, 618 bp, Artificial Sequence
  derived and/or modified sequence
atgcccagcaagaagaagaagtacaacgcccggttcccccccgcccgcattaagaaaatcatgcaaactgatgaagagatcgggaaggtagcggcagccgtgcccgtaatcatctcccgggccctcgagctattcctggagtccctgcttaaaaaggcgtgccaggtgacccaatccaggaatgcgaaaacgatgacgacctcacacttgaaacagtgcatcgaactggaacaacagtttgacttcctaaaggacctcgttgcctccgtccccgatatgcagggcgacggggaggataatcacatggacggcgataaaggcgcccggcgcggtcggaagcccggatcgggggggagaaaaaacggagggatggggactaagagtaaggataagaagctcagcgggacggactccgagcaggaggacgagtccgaagacaccgacaccgatggcgaggaggagacaagtcagccacccccacaggcgtctcatccgtcagcacacttccagagtcctccaactccttttctgccattcgcttccacactccctctccccccagcccccccaggccccagcgcacccgacgaggaggacgaagaagactatgactcatag

SEQ ID NO: 165208 - DNA, 618 bp, Artificial Sequence
  derived and/or modified sequence
atgccgtcaaagaaaaagaaatataatgccagattccctccggctcgcattaagaaaattatgcagacggacgaagagattggtaaggtcgcagccgcagtgccagtgatcattagccgtgccctggagctgttcctggagtcgctcttgaagaaggcatgtcaggtgacccagtcgcggaatgccaaaacaatgactacaagtcaccttaaacagtgcatcgagctggagcagcagtttgactttctcaaggatctagtggcatccgtgcccgacatgcagggcgatggcgaggacaatcacatggatggggacaagggtgctaggcggggacgaaaaccgggatcgggcggaagaaagaacggcggaatgggcactaaaagcaaggataagaagctgtccggtacagactcggaacaggaagatgagtccgaagataccgacaccgacggagaggaggagacatcacaaccgcctccgcaagctagtcatcctagcgcacacttccaatcaccaccaaccccattcttaccattcgcttccacgctgcctctccccccagcgccacccggaccctccgcccctgacgaagaagatgaagaggactatgattcttag

SEQ ID NO: 165209 - DNA, 989 bp, Artificial Sequence
  derived and/or modified sequence
gggcgggagcggcggtccagactggggagggacgcgcaccggccaggaggcttcaagaggagggcactagggccctgcgagcggcgtcttaaccggcggcgctaggactccgcgggaaacggcgggggcggagcgggcggcaccaggacccaggggaaccgcgacgggcgggcggcgagcaggcccgggagccgggaggctgcgggcggcggcgctggacccgacgcggcgagagaggccccgagatgccgagcaagaagaagaagtacaacgcgcggttcccgccggcgcggatcaagaagatcatgcagacggacgaagagattgggaaggtggcggcggcggtgcctgtcatcatctcccgggcgctcgagctcttcctagagtcgctgttgaagaaggcctgccaggtgacccagtcgcggaacgcgaagaccatgaccacatcccacctgaagcagtgcatcgagctggagcagcagtttgacttcttgaaggacctggtggcatctgttcccgacatgcagggggacggggaagacaaccacatggatggggacaagggcgcccgcaggggccggaagccaggcagcggcggccggaagaacggtgggatgggaacgaaaagcaaggacaagaagctgtccgggacagactcggagcaggaggatgaatctgaggacacagatactgatggggaagaggagacatcacaacccccaccccaggccagccacccctctgcccactttcagagccccccgacacccttcctgcccttcgcctctactctgcctttgcccccagcgcccccgggcccctcagcacctgatgaagaggacgaagaagattacgactcctagcgccttctgccccccagaccatagccccttttagttggttttagttgctctggggggaggagagaaggtagagctgttcttaaatttattaaaaaaaaaaataaaagggaatctcagtgtctgttc

SEQ ID NO: 165210 - DNA, 618 bp, Artificial Sequence
  derived and/or modified sequence
atgcccagcaagaagaagaagtacaacgccagattcccccccgccagaatcaagaagatcatgcagaccgacgaggagatcggcaaggtggccgccgccgtgcccgtgatcatcagcagagccctggagctgttcctggagagcctgctgaagaaggcctgccaggtgacccagagcagaaacgccaagaccatgaccaccagccacctgaagcagtgcatcgagctggagcagcagttcgacttcctgaaggacctggtggccagcgtgcccgacatgcagggcgacggcgaggacaaccacatggacggcgacaagggcgccagaagaggcagaaagcccggcagcggcggcagaaagaacggcggcatgggcaccaagagcaaggacaagaagctgagcggcaccgacagcgagcaggaggacgagagcgaggacaccgacaccgacggcgaggaggagaccagccagccccccccccaggccagccaccccagcgcccacttccagagcccccccacccccttcctgcccttcgccagcaccctgcccctgccccccgccccccccggccccagcgcccccgacgaggaggacgaggaggactacgacagctag

SEQ ID NO: 165211 - protein, 2335 aa, Artificial Sequence
  derived and/or modified sequence
MAGVFPYRGPGNPVPGPLAPLPDYMSEEKLQEKARKWQQLQAKRYAEKRKFGFVDAQKEDMPPEHVRKIIRDHGDMTNRKFRHDKRVYLGALKYMPHAVLKLLENMPMPWEQIRDVPVLYHITGAISFVNEIPWVIEPVYISQWGSMWIMMRREKRDRRHFKRMRFPPFDDEEPPLDYADNILDVEPLEAIQLELDPEEDAPVLDWFYDHQPLRDSRKYVNGSTYQRWQFTLPMMSTLYRLANQLLTDLVDDNYFYLFDLKAFFTSKALNMAIPGGPKFEPLVRDINLQDEDWNEFNDINKIIIRQPIRTEYKIAFPYLYNNLPHHVHLTWYHTPNVVFIKTEDPDLPAFYFDPLINPISHRHSVKSQEPLPDDDEEFELPEFVEPFLKDTPLYTDNTANGIALLWAPRPFNLRSGRTRRALDIPLVKNWYREHCPAGQPVKVRVSYQKLLKYYVLNALKHRPPKAQKKRYLFRSFKATKFFQSTKLDWVEVGLQVCRQGYNMLNLLIHRKNLNYLHLDYNFNLKPVKTLTTKERKKSRFGNAFHLCREVLRLTKLVVDSHVQYRLGNVDAFQLADGLQYIFAHVGQLTGMYRYKYKLMRQIRMCKDLKHLIYYRFNTGPVGKGPGCGFWAAGWRVWLFFMRGITPLLERWLGNLLARQFEGRHSKGVAKTVTKQRVESHFDLELRAAVMHDILDMMPEGIKQNKARTILQHLSEAWRCWKANIPWKVPGLPTPIENMILRYVKAKADWWTNTAHYNRERIRRGATVDKTVCKKNLGRLTRLYLKAEQERQHNYLKDGPYITAEEAVAVYTTTVHWLESRRFSPIPFPPLSYKHDTKLLILALERLKEAYSVKSRLNQSQREELGLIEQAYDNPHEALSRIKRHLLTQRAFKEVGIEFMDLYSHLVPVYDVEPLEKITDAYLDQYLWYEADKRRLFPPWIKPADTEPPPLLVYKWCQGINNLQDVWETSEGECNVMLESRFEKMYEKIDLTLLNRLLRLIVDHNIADYMTAKNNVVINYKDMNHTNSYGIIRGLQFASFIVQYYGLVMDLLVLGLHRASEMAGPPQMPNDFLSFQDIATEAAHPIRLFCRYIDRIHIFFRFTADEARDLIQRYLTEHPDPNNENIVGYNNKKCWPRDARMRLMKHDVNLGRAVFWDIKNRLPRSVTTVQWENSFVSVYSKDNPNLLFNMCGFECRILPKCRTSYEEFTHKDGVWNLQNEVTKERTAQCFLRVDDESMQRFHNRVRQILMASGSTTFTKIVNKWNTALIGLMTYFREAVVNTQELLDLLVKCENKIQTRIKIGLNSKMPSRFPPVVFYTPKELGGLGMLSMGHVLIPQSDLRWSKQTDVGITHFRSGMSHEEDQLIPNLYRYIQPWESEFIDSQRVWAEYALKRQEAIAQNRRLTLEDLEDSWDRGIPRINTLFQKDRHTLAYDKGWRVRTDFKQYQVLKQNPFWWTHQRHDGKLWNLNNYRTDMIQALGGVEGILEHTLFKGTYFPTWEGLFWEKASGFEESMKWKKLTNAQRSGLNQIPNRRFTLWWSPTINRANVYVGFQVQLDLTGIFMHGKIPTLKISLIQIFRAHLWQKIHESIVMDLCQVFDQELDALEIETVQKETIHPRKSYKMNSSCADILLFASYKWNVSRPSLLADSKDVMDSTTTQKYWIDIQLRWGDYDSHDIERYARAKFLDYTTDNMSIYPSPTGVLIAIDLAYNLHSAYGNWFPGSKPLIQQAMAKIMKANPALYVLRERIRKGLQLYSSEPTEPYLSSQNYGELFSNQIIWFVDDTNVYRVTIHKTFEGNLTTKPINGAIFIFNPRTGQLFLKIIHTSVWAGQKRLGQLAKWKTAEEVAALIRSLPVEEQPKQIIVTRKGMLDPLEVHLLDFPNIVIKGSELQLPFQACLKVEKFGDLILKATEPQMVLFNLYDDWLKTISSYTAFSRLILILRALHVNNDRAKVILKPDKTTITEPHHIWPTLTDEEWIKVEVQLKDLILADYGKKNNVNVASLTQSEIRDIILGMEISAPSQQRQQIAEIEKQTKEQSQLTATQTRTVNKHGDEIITSTTSNYETQTFSSKTEWRVRAISAANLHLRTNHIYVSSDDIKETGYTYILPKNVLKKFICISDLRAQIAGYLYGVSPPDNPQVKEIRCIVMVPQWGTHQTVHLPGQLPQHEYLKEMEPLGWIHTQPNESPQLSPQDVTTHAKIMADNPSWDGEKTIIITCSFTPGSCTLTAYKLTPSGYEWGRQNTDKGNNPKGYLPSHYERVQMLLSDRFLGFFMVPAQSSWNYNFMGVRHDPNMKYELQLANPKEFYHEVHRPSHFLNFALLQEGEVYSADREDLYA

SEQ ID NO: 165212 - protein, 463 aa, Artificial Sequence
  derived and/or modified sequence
MIQALGGVEGILEHTLFKGTYFPTWEGLFWEKASGFEESMKWKKLTNAQRSGLNQIPNRRFTLWWSPTINRANVYVGFQVQLDLTGIFMHGKIPTLKISLIQIFRAHLWQKIHESIVMDLCQVFDQELDALEIETVQKETIHPRKSYKMNSSCADILLFASYKWNVSRPSLLADSKDVMDSTTTQKYWIDIQLRWGDYDSHDIERYARAKFLDYTTDNMSIYPSPTGVLIAIDLAYNLHSYSEVGSLQQASHTTGAKIMKANPALYVLRERIRKGLQLYSSEPTEPYLSSQNYGELFSNQIIWFVDDTNVYRVTIHKTFEGNLTTKPINGAIFIFNPRTGQLFLKIIHTSVWAGQKRLGQLAKWKTAEEVAALIRSLPVEEQPKQIIVTRKGMLDPLEVHLLDFPNIVIKGSELQLPFQACLKVEKFGDLILKATEPQMVLFNLYDDWLKTISSYTAFSRLIL

SEQ ID NO: 165213 - DNA, 7008 bp, Artificial Sequence
  derived and/or modified sequence
atggctggggtgttcccctatcgcggaccggggaacccggtgcctgggcccttagcccccctcccagactacatgagcgaagagaagctgcaagaaaaggcgcgcaagtggcaacagttacaggcaaagcggtacgctgaaaaaagaaagtttggcttcgtggacgcgcaaaaagaggatatgcctcctgagcacgttaggaaaattataagggaccatggcgacatgacaaacagaaagtttcggcatgataaacgcgtgtacctcggcgcccttaaatacatgccacacgcagtcttaaagctgctggagaacatgccgatgccatgggaacagatcagagacgtgccggtcctgtaccacattactggtgctataagtttcgtcaacgaaatcccgtgggtgatcgaaccagtatatattagccagtggggctccatgtggattatgatgcggagagagaaacgcgatcgccgtcacttcaaaaggatgcggtttccaccattcgacgacgaggagcctcctctcgattacgcggacaacatccttgacgttgagccattggaggctattcagctggaactcgatcccgaagaagatgcccctgttctcgattggttctatgatcaccagcctctgagggattcaagaaaatacgtgaatggctccacgtaccagcgatggcaattcaccctgcctatgatgtcgaccctgtacaggctagccaaccagctcctaactgatctcgtcgacgacaactatttttacttattcgacttgaaagcattctttacatcgaaggccctgaacatggccatacccggaggacccaaattcgagcccctcgtccgggatatcaacttacaggacgaagattggaatgaattcaatgacataaataaaatcatcatcagacaaccgattagaaccgaatacaagattgcctttccatatctgtacaataacctaccccaccacgtgcacctaacatggtaccacacccccaatgtggttttcattaaaaccgaggatcccgatctacctgccttttacttcgaccctctcatcaatcccattagccatcgccatagcgtaaagagtcaggagcccctgccagacgacgatgaggaatttgaacttcctgaattcgtggaacccttcctcaaagacacgcctctatataccgataacacggcaaatgggatcgctctactctgggctccaagaccttttaacctccgctccggtcgcacccggagagccctcgatatcccattggtgaaaaattggtaccgggagcactgtcctgctgggcaacctgttaaagtgcgcgtcagctaccaaaagctccttaagtattacgtgctcaacgcactcaagcaccgaccgccaaaagcccaaaaaaagaggtacctctttcggtcgtttaaagccacgaagttttttcaaagtacaaagctggactgggtggaggtgggcctgcaggtgtgcaggcagggctataacatgcttaatctactgatccacaggaagaatctcaactatctacatctcgactataatttcaaccttaagcctgtgaagaccctgaccaccaaagagaggaaaaaatctagattcggcaacgcattccatctgtgccgtgaagtcctccgtttgacaaaactggtggtggactcgcatgtgcagtatcggctgggcaacgttgacgcctttcaattagccgatgggctgcaatacatatttgcccacgtcggacagctaactgggatgtacaggtacaagtacaaactcatgcggcaaatcagaatgtgtaaagacctcaagcacttgatctactaccggtttaacacaggtcctgtcggtaagggcccaggatgcggattctgggcagctggctggcgggtatggctcttcttcatgaggggtatcactcctcttcttgagcgctggttaggcaacctgctggctcgacagttcgagggccgccacagcaaaggggtggcaaagacggtcacaaaacagcgcgtggaaagccatttcgatctggaacttcgcgccgccgtaatgcatgatattctcgatatgatgccagagggcattaagcagaacaaagcaaggaccatcctccagcatcttagcgaggcttggcggtgttggaaggcgaatattccttggaaagtccccggattgcccacccccattgagaatatgatcttgaggtacgtcaaggcaaaggccgattggtggaccaatacggcccattataaccgcgaacgcatccggaggggagctaccgtcgataaaaccgtttgcaaaaaaaacttaggccgcctgactcgcctgtacctgaaggccgagcaggagcgacaacacaattacctgaaagacgggccatacatcaccgccgaggaggctgtggccgtgtatacaacgacagtgcactggctggagtcccgcaggttctcccccatacctttcccgcctcttagctataagcatgacactaaactgctcatcctggccttggaacgactcaaagaggcctactccgtgaagtcaaggttgaaccaaagccaacgtgaggagttgggtttgatcgaacaagcgtacgacaaccctcatgaagccttgtcgcggattaagcggcacctgctcacacagcgcgcattcaaagaggttggcattgagttcatggatctctactcacatctggttcctgtctacgatgttgaacccctagaaaaaattaccgatgcgtatctggaccaatatctttggtatgaggctgacaaaaggagactattccccccatggatcaaaccagccgatactgagcccccaccactgcttgtttataaatggtgtcagggcatcaataatcttcaggatgtgtgggaaacaagtgagggagagtgtaatgtcatgctggaaagcagatttgagaaaatgtacgaaaagattgacctgactttactgaacagattgctccggctcatcgttgaccacaacattgccgattatatgaccgcaaagaacaacgtggtcataaactacaaggacatgaaccatacgaattcctatggcatcattcgaggcctgcaatttgcctcgttcatcgtccaatattatggacttgtgatggatttactggtccttggattgcaccgcgcctccgaaatggcaggcccgccccagatgcctaacgatttcttgtcgttccaggacatcgctactgaagcagcccacccaatcagactgttttgccggtatatcgatagaatccacatcttttttcgcttcacagctgatgaggcacgagatttaatccagcgatatctgactgagcatccagatcccaacaatgagaatatcgtgggctataacaacaagaagtgttggcctcgcgacgcgaggatgcgcttgatgaaacacgatgtcaacctgggtcgggcagtcttttgggatattaagaataggttacccaggtccgtgacaacagttcagtgggaaaattcctttgtctccgtatatagcaaggacaatcctaacctcctcttcaatatgtgcggctttgagtgtagaattctgccaaaatgccgcacctcttacgaagaattcactcacaaagacggcgtttggaatttgcagaacgaagtgacgaaagagcggaccgcccaatgttttctgcgcgtggatgacgagtccatgcagcggtttcataatagggttcggcagatactgatggcctccggctccactacattcactaaaatagtgaacaagtggaataccgccctgataggactcatgacatattttagagaagctgtggtcaatacacaggaattactcgatctgctggtcaaatgcgagaacaaaatacagacccgtataaagattggtttaaatagcaagatgccaagtcggttccctcccgttgtgttctataccccaaaggagctgggcggactggggatgctctcaatgggacacgtcctaatcccacagtccgatctcaggtggtccaaacagaccgatgtgggcatcactcactttcgcagcggcatgtcccacgaggaagaccagctgatccctaacctatataggtatatccagccctgggaaagcgagtttatcgactctcagagagtctgggctgagtatgctcttaagagacaggaggccatagcccaaaaccggaggcttacgctcgaagatttggaagactcttgggacaggggcatcccccgcataaacaccctcttccaaaaggataggcacactctggcatacgacaaggggtggagggtgcggacggatttcaaacagtaccaggtcctgaagcagaatccattttggtggacacatcagcgccacgacgggaagctctggaaccttaataattacaggactgacatgatccaggctctggggggggttgaaggcatactcgagcacactctcttcaaaggcacttattttcccacctgggagggcctcttttgggagaaagcttcaggcttcgaggaatccatgaagtggaagaagctcacaaatgcccagcgcagtgggctcaaccaaattcccaaccgacgatttacactttggtggagtcccaccatcaatcgcgccaacgtttatgtcggttttcaagtgcagctagatttaacagggatctttatgcacggcaagataccaacattgaaaattagccttattcaaatcttccgggcacacttgtggcaaaaaatacatgaatccatcgtcatggatctctgtcaggtgttcgaccaggagctggatgcattagaaatagaaactgttcagaaggagacaatacatcctcggaaaagctataaaatgaatagtagttgcgctgacatattgttgttcgcatcttacaaatggaacgttagccgcccctccttgcttgccgacagcaaggacgtgatggactcaactaccacccagaaatattggatagacatccagctaaggtggggggattacgatagccacgatatcgagagatatgccagggctaagttcctcgactacacgaccgataacatgtctatctacccatctccaacaggtgttctgatcgcaattgatctggcctacaacctgcacagcgcatacggcaattggttcccaggcagcaagcccctgatacagcaagccatggccaaaataatgaaggccaacccagctctgtatgtattgagagaaagaatccggaagggtttacagctatatagcagcgaaccgacagaaccatacttgtctagccagaattatggagaactcttctccaatcaaatcatttggtttgtcgacgacacaaacgtgtaccgggtgaccatccataaaactttcgaaggaaacctgactactaaacctattaacggcgcaatattcatcttcaatccaagaacaggccagttgtttctgaagattatacatacatcagtatgggcaggacagaaaagactgggacagctcgccaagtggaagaccgctgaggaggttgccgcactgatccgaagcctcccagtggaggagcaaccaaaacaaatcatcgtcacccgtaaaggaatgctggacccattggaagtgcatttgctggacttcccgaatattgtgataaagggatccgagctgcaactccccttccaggcttgcctgaaggtagaaaagttcggagacttgatcctgaaggccactgagccccagatggtactgttcaacctgtatgatgactggctgaaaacaattagctcatatacagctttcagccgattgattttaatcttacgtgcattgcatgtcaacaatgatcgcgcaaaagttattctcaagcccgacaaaactactatcacggagccccaccatatttggcccaccctgaccgacgaagagtggatcaaagtggaagtccaattaaaggacctgatactcgctgactacgggaaaaagaacaatgtgaacgttgcttcgctcacccagtcagagatcagagacatcatcctcggtatggaaatctccgctccttcccagcagaggcagcagatcgccgaaatcgaaaagcaaacaaaagagcagtctcagcttaccgctacccagactcgcaccgtgaataagcatggggatgagatcattacatcgaccacaagtaactacgagactcagacgttcagttccaagaccgaatggagggtgcgggcgatcagcgctgctaaccttcacctgagaacaaaccatatctacgtgtcctccgatgatatcaaggaaaccggctatacatacattttacctaaaaacgtcctcaagaagtttatatgtatcagcgacctgcgcgctcaaatagcaggttacttatatggggtctcgccacccgacaaccctcaagttaaagaaattcgatgcatagtcatggttccccagtggggaacccaccagacagtgcatctgccggggcagttgccacaacacgagtatttgaaggagatggagccgcttggttggattcacacccagccaaacgagtctccacagctctctccccaggacgtgaccacacatgctaaaattatggcagataatccatcttgggacggggagaaaactatcatcataacatgttcttttaccccagggagttgcacattgaccgcctacaaactcaccccatcaggttatgaatgggggaggcagaacactgataagggtaataatccaaaaggatacctaccttcacattacgaacgagtccagatgcttctgagcgatcggtttttgggattctttatggttcctgcccagtccagctggaactacaactttatgggagttcgccacgatccaaacatgaaatatgaactccaacttgctaatcctaaggagttttaccacgaggtgcatcggccatcccacttcttgaacttcgcactacttcaggagggcgaagtatacagcgcggatagggaggacctctacgcatag

SEQ ID NO: 165214 - DNA, 1392 bp, Artificial Sequence
  derived and/or modified sequence
atgattcaggcactaggcggtgtagaagggatcctggagcacacccttttcaagggaacctacttccctacttgggagggcctgttctgggaaaaagcatcagggtttgaggagtcaatgaaatggaaaaagctcactaacgcccagagaagcggcctaaaccagattcctaataggcgctttaccctgtggtggagcccaaccatcaatagggccaacgtttacgtcggctttcaggtgcagctcgatctgaccggaatcttcatgcacggaaaaattccaacactgaagatttcgctgatccagatctttcgggcgcacttatggcagaagatccacgaatcaattgttatggacctatgccaggttttcgaccaagagttagatgcactagaaatcgagaccgtccaaaaagagactatccaccccagaaagagttacaaaatgaattcttcttgcgcagatattctgctgttcgccagttacaagtggaacgtctcaagaccctctctcctggccgacagcaaagatgtcatggactccaccactactcaaaagtactggattgatatacagctgagatggggcgactacgattcgcacgatatcgaacgatacgctagagcgaaattcctggactacacaaccgataatatgtctatctacccttccccaaccggtgtgctgattgctatcgatctcgcatacaatctgcatagttactctgaggtaggctcgctgcagcaggcgagccatactacaggagcaaaaattatgaaagccaatccagccctgtatgtgctcagagaaaggatacgcaaaggcctgcaactatattcctcagagcccacagagccctatctgtcatcccagaactacggggaattattctctaaccagatcatttggtttgttgacgacacaaacgtataccgggtgaccattcataaaaccttcgagggaaatctgaccaccaaacctatcaacggcgccatcttcatttttaaccccagaaccgggcagctgttcctgaaaattattcacacatctgtctgggccggccagaaaagactcggacaactagcgaagtggaaaaccgctgaggaggtggctgccttgattcggagtctgcccgtggaggagcaaccaaagcagatcatagtgactagaaaaggcatgttggaccctcttgaagtgcaccttctggattttccaaatatcgtcatcaaggggtcagagttgcagctcccttttcaggcttgtctgaaagtcgagaagttcggcgacttgatactgaaggccacagaacctcagatggtgctgtttaatctgtatgacgactggctgaaaaccatctcctcatatactgccttttcgaggctaattctttag

SEQ ID NO: 165215 - DNA, 7008 bp, Artificial Sequence
  derived and/or modified sequence
atggccggggtcttcccctaccggggccctggcaaccctgtgcccggccccctggcccccctgcctgactacatgtctgaggagaagctgcaggagaaggccaggaagtggcagcagctgcaggccaagagatatgcagagaagaggaagtttggatttgtggatgcccagaaggaggacatgcctcctgagcacgtgaggaagatcatccgggaccatggagacatgaccaacaggaagttcagacatgacaagagggtgtacctgggcgccctgaagtacatgcctcatgctgtgctgaagctgctggagaacatgcccatgccctgggagcagatcagagatgtgcctgtgctgtaccacatcactggagccatcagctttgtgaatgagatcccctgggtgattgagcctgtgtacatcagccagtggggctccatgtggatcatgatgaggcgggagaagagggaccggcggcacttcaagaggatgagatttcctccatttgatgatgaggagccccccctggactatgctgacaacatcctggatgtggagcccctggaggccatccagctggagctggaccctgaagaagatgcccctgtgctggactggttctatgaccaccagcccctgcgggacagcaggaaatatgtgaatggcagcacctaccagcgctggcagttcaccctgcccatgatgagcaccctgtaccgcctggccaaccagctgctgacagacctggtggatgacaactacttctacctgtttgacctgaaggccttcttcaccagcaaggccctgaacatggccatccctgggggccccaagtttgagcccctggtgcgggacatcaacctgcaggatgaggactggaatgagttcaatgacatcaacaagatcatcatccggcagcccatcagaacagagtacaagatcgccttcccctacctgtacaacaacctgccccaccacgtgcacctgacctggtaccacacccccaacgtggtgttcatcaagacagaagatcctgacctgcctgccttctactttgaccccctcatcaaccccatcagccaccgccacagcgtgaagagccaggagcccctgcctgatgatgatgaggagtttgagctgcctgagtttgtggagcccttcctgaaggacacccccctgtacacagacaacacagccaacggcatcgccctgctgtgggccccccggcccttcaacctgcggagcggccgcacccggcgggccctggacatccccctggtgaagaactggtaccgggagcactgcccagctggccagcctgtgaaggtgcgggtgtcctaccagaagctgctgaagtactacgtgctgaatgccctgaagcacaggcctcccaaggcccagaagaagcgctacctgttccgctccttcaaggccaccaagttcttccagagcaccaagctggactgggtggaggtgggcctgcaggtgtgccggcagggctacaacatgctgaacctgctgatccacaggaagaacctgaactacctgcacctggactacaacttcaacctgaagcctgtgaagaccctgaccaccaaggagaggaagaagagcagatttggaaatgccttccacctgtgccgggaggtgctgcggctgaccaagctggtggtggacagccacgtgcagtaccgcctgggcaatgtggatgccttccagctggctgatggcctgcagtacatctttgcccacgtgggccagctgaccggcatgtaccgctacaagtacaagctgatgaggcagatccgcatgtgcaaggacctgaagcacctgatctactaccgcttcaacacaggccctgtgggcaaaggacctggctgcggcttctgggccgccggctggagggtgtggctgttcttcatgaggggcatcacccccctgctggagcgctggctgggcaacctgctggcccggcagtttgagggccgccacagcaagggcgtggccaagacagtgaccaagcagagggtggagagccactttgacctggagctgcgggctgctgtgatgcatgacatcctggacatgatgcctgagggcatcaagcagaacaaggcccggaccatcctgcagcacctgtctgaggcctggcgctgctggaaggccaacatcccctggaaggtgcccggcctgcccacccccatcgagaacatgatcctgcgctacgtgaaggccaaggctgactggtggaccaacacagcccactacaaccgggagcgcatccggcggggggccaccgtggacaagacagtgtgcaagaagaacctgggccgcctgacccggctgtacctgaaggccgagcaggagcggcagcacaactacctgaaggatggcccctacatcacagctgaggaggccgtggccgtgtacaccaccaccgtgcactggctggagagccgccgcttcagccccatccccttcccccccctgagctacaagcatgacaccaagctgctgatcctggccctggagcggctgaaggaggcctacagcgtgaagagccggctgaaccagagccagcgggaggagctgggcctgattgagcaggcctatgacaacccccatgaggccctgagccgcatcaagaggcacctgctgacccagagggccttcaaggaggtgggcatcgagttcatggacctgtacagccacctggtgcctgtgtatgatgtggagcccctggagaagatcacagatgcctacctggaccagtacctgtggtatgaggccgacaagagaagactcttccccccctggatcaagccagctgacacagagcccccacccctgctggtgtacaagtggtgccagggcatcaacaacctgcaggatgtgtgggagaccagcgagggggagtgcaatgtgatgctggagagcagatttgagaagatgtatgagaagattgacctgaccctgctgaaccggctgctgcggctcatcgtggaccacaacattgctgactacatgacagccaagaacaacgtggtgatcaactacaaggacatgaaccacaccaacagctatggcatcatccggggcctgcagtttgccagcttcatcgtgcagtactacggcctggtgatggacctgctggtgctgggcctgcaccgggccagcgagatggccggccccccccagatgcccaatgacttcctgtccttccaggacatcgccacagaagctgcccaccccatccgcctcttctgccgctacatcgaccgcatccacatcttcttccgcttcaccgcagatgaggcccgggacctgatccagcgctacctgacagagcacccagaccccaacaatgaaaatattgtgggctacaacaacaagaagtgctggcccagagatgccaggatgaggctgatgaagcatgatgtgaacctgggccgggctgtgttctgggacatcaagaaccggctgcccaggtctgtgaccaccgtgcagtgggagaacagctttgtgtctgtgtacagcaaggacaaccccaacctgctcttcaacatgtgtggctttgaatgtcgcatcctgcccaagtgcaggaccagctatgaggagttcacccacaaggatggagtgtggaacctgcagaatgaggtgaccaaggagaggacagcccagtgcttcctgcgggtggatgatgagagcatgcagcgcttccacaacagagtgcggcagatcctgatggccagcggcagcaccaccttcaccaagatcgtgaacaagtggaacacagccctgattggcctgatgacctacttccgggaggccgtggtgaacacccaggagctgctggacctgctggtgaagtgtgagaacaagatccagacccgcatcaagattggcctgaacagcaagatgcccagccgcttcccccctgtggtgttctacacccccaaggagctgggcggcctgggcatgctgtccatgggccacgtgctgatcccccagagcgacctgcgctggagcaagcagacagatgtgggcatcacccacttccgcagcggcatgagccatgaggaggaccagctgatccccaacctgtaccgctacatccagccctgggagagcgagttcatcgacagccagagggtgtgggccgagtatgccctgaagaggcaggaggccatcgcccagaacagaaggctgaccctggaggacctggaggacagctgggaccggggcatcccccgcatcaacaccctcttccagaaggacagacacaccctggcctatgacaagggctggagggtgaggacagacttcaagcagtaccaggtgctgaagcagaaccccttctggtggacccaccagagacatgatggcaagctgtggaacctgaacaactacagaacagacatgatccaggccctgggcggcgtggagggcatcctggagcacaccctcttcaagggcacctacttccccacctgggagggcctcttctgggagaaggccagcggctttgaggagagcatgaagtggaagaagctgaccaatgcccagaggagcggcctgaaccagatccccaacagacgcttcaccctgtggtggagccccaccatcaacagagccaacgtgtatgtgggcttccaggtgcagctggacctgaccggcatcttcatgcacggcaagatccccaccctgaagatcagcctcatccagatcttccgggcccacctgtggcagaagatccacgagagcatcgtgatggacctgtgccaggtgtttgaccaggagctggatgccctggagattgagaccgtgcagaaggagaccatccaccccaggaagagctacaagatgaacagcagctgtgccgacatcctgctgtttgccagctacaagtggaatgtgtcccggcccagcctgctggccgacagcaaggatgtgatggacagcaccaccacccagaagtactggattgacatccagctgcgctggggagactatgacagccatgacatcgagagatatgcccgggccaagttcctggactacaccacagacaacatgagcatctaccccagccccactggagtgctgattgccatcgacctggcctacaacctgcacagcgcctacggcaactggttccctggcagcaagcccctcatccagcaggccatggccaagatcatgaaggccaacccagccctgtatgtgctgcgggagcgcatcaggaagggcctgcagctgtacagcagcgagcccacagagccctacctgagcagccagaactacggggagctgttcagcaaccagatcatctggtttgtggatgacaccaacgtgtacagagtgaccatccacaagacctttgagggcaacctgaccaccaagcccatcaacggggccatcttcatcttcaaccccaggacaggccagctgttcctgaagatcatccacacctctgtgtgggccggccagaagaggctgggccagctggccaagtggaagacagctgaggaggtggccgccctgatccgcagcctgcctgtggaggagcagcccaagcagatcatcgtgaccaggaagggcatgctggaccccctggaggtgcacctgctggacttccccaacatcgtcatcaagggcagcgagctgcagctgcccttccaggcctgcctgaaggtggagaagtttggagacctgatcctgaaggccacagagccccagatggtgctcttcaacctgtatgatgactggctgaagaccatcagcagctacacagccttcagccgcctcatcctgatcctgcgggccctgcacgtgaacaatgaccgggccaaggtgatcctgaagccagacaagaccaccatcacagagccccaccacatctggcccaccctgacagatgaggagtggatcaaggtggaggtgcagctgaaggacctgatcctggccgactatggcaagaagaacaacgtgaatgtggccagcctgacccagagcgagatccgggacatcatcctgggcatggagatcagcgcccccagccagcagaggcagcagattgctgagattgagaagcagaccaaggagcagagccagctgacagccacccagaccaggacagtgaacaagcatggagatgagatcatcaccagcaccaccagcaactatgagacccagaccttcagcagcaagacagagtggagggtgcgggccatctctgctgccaacctgcacctgcggaccaaccacatctacgtgtccagtgatgacatcaaggagaccggctacacctacatcctgcccaagaatgtgctgaagaagttcatctgcatcagtgacctgcgggcccagattgctggctacctgtatggagtgtccccaccagacaacccccaggtgaaggagatccgctgcatcgtgatggtgccccagtggggcacccaccagacagtgcacctgcccggccagctgccccagcacgagtacctgaaggagatggagcccctgggctggatccacacccagcccaatgaaagcccccagctgagcccccaggatgtgaccacccacgccaagatcatggctgacaaccccagctgggatggagagaagaccatcatcatcacctgcagcttcaccccaggcagctgcaccctgacagcctacaagctgaccccatctggctatgagtggggccggcagaacacagacaagggcaacaaccccaagggctacctgcccagccactatgaaagagtgcagatgctgctgagtgaccgcttcctgggcttcttcatggtgcctgcccagagctcctggaactacaacttcatgggcgtgagacatgaccccaacatgaagtatgagctgcagctggccaaccccaaggagttctaccacgaggtgcaccggcccagccacttcctgaactttgccctgctgcaggagggggaggtgtacagcgctgaccgggaggacctgtatgcctag

SEQ ID NO: 165216 - DNA, 1392 bp, Artificial Sequence
  derived and/or modified sequence
atgatccaggccctgggcggcgtggagggcatcctggagcacaccctcttcaagggcacctacttccccacctgggagggcctcttctgggagaaggccagcggctttgaggagagcatgaagtggaagaagctgaccaatgcccagaggagcggcctgaaccagatccccaacagacgcttcaccctgtggtggagccccaccatcaacagagccaacgtgtatgtgggcttccaggtgcagctggacctgaccggcatcttcatgcacggcaagatccccaccctgaagatcagcctcatccagatcttccgggcccacctgtggcagaagatccacgagagcatcgtgatggacctgtgccaggtgtttgaccaggagctggatgccctggagattgaaacagtgcagaaggagaccatccaccccaggaagagctacaagatgaacagcagctgtgccgacatcctgctgtttgccagctacaagtggaatgtgtcccggcccagcctgctggccgacagcaaggatgtgatggacagcaccaccacccagaagtactggattgacatccagctgcgctggggagactatgacagccatgacatcgagagatatgcccgggccaagttcctggactacaccacagacaacatgagcatctaccccagccccaccggggtgctgattgccatcgacctggcctacaacctgcacagctacagcgaggtgggcagcctgcagcaggccagccacaccaccggggccaagatcatgaaggccaacccagccctgtatgtgctgcgggagcgcatcaggaagggcctgcagctgtacagcagcgagcccacagagccctacctgagcagccagaactatggagagctgttcagcaaccagatcatctggtttgtggatgacaccaacgtgtacagagtgaccatccacaagacctttgagggcaacctgaccaccaagcccatcaatggagccatcttcatcttcaaccccaggacaggccagctgttcctgaagatcatccacacctctgtgtgggccggccagaagaggctgggccagctggccaagtggaagacagctgaggaggtggccgccctgatccgcagcctgcctgtggaggagcagcccaagcagatcatcgtgaccaggaagggcatgctggaccccctggaggtgcacctgctggacttccccaacatcgtcatcaagggcagcgagctgcagctgcccttccaggcctgcctgaaggtggagaagtttggagacctgatcctgaaggccacagagccccagatggtgctcttcaacctgtatgatgactggctgaagaccatcagcagctacacagccttcagccgcctcatcctgtag

SEQ ID NO: 165217 - DNA, 7008 bp, Artificial Sequence
  derived and/or modified sequence
atggccggcgtgttcccctaccggggccccggcaaccccgtgcccggtccccttgctccattaccagattacatgtccgaagaaaagctgcaagagaaagccaggaagtggcagcaactccaagctaagaggtacgccgagaaaagaaaatttggcttcgtggatgcacagaaggaagacatgcctccggagcacgtgagaaagattatccgggaccacggcgatatgactaatcggaagttcaggcatgataagcgggtgtatttgggtgccctcaaatatatgcctcatgcggtgctcaaactgctcgagaatatgcctatgccctgggaacaaatcagagatgtccccgttctttaccacattaccggggccatcagttttgtgaatgaaatcccatgggtcatcgaacccgtatacatctcgcagtggggctcaatgtggatcatgatgaggcgtgagaagcgcgataggagacattttaaacggatgcgttttccccctttcgatgacgaagaacctccgctggattatgctgacaacatcttagacgtcgagccccttgaggcaatacagctggaattggatcctgaggaggacgctcctgtgctggactggttttacgatcatcagcccttgagggactctcggaaatacgtgaacggatccacttaccagcgctggcagttcacgttaccgatgatgagcacgctttataggctggccaatcagttgttaaccgacctagtggacgacaattacttctatctgttcgacctcaaagccttttttacctcgaaggcccttaatatggctattccaggcggaccgaagttcgaacccctggttcgggacatcaacttgcaggatgaagattggaacgaatttaatgatataaacaagattattataaggcaacccattagaaccgaatataagatcgcgttcccatacttgtataataacttacctcaccacgtgcatctaacttggtatcatactcctaacgtagtgttcatcaagaccgaggatccagacttgcccgccttttacttcgaccctctgataaatcctattagccaccgccatagtgtgaagagtcaggagcccctaccagacgacgacgaggagtttgaactgcctgagtttgttgagccgtttctcaaggacactccgctgtacaccgacaacactgcgaacggcatagcactcttatgggctccccgacctttcaacttgagatcaggaagaacccgccgcgctctggatatccctctggtcaaaaattggtatcgggagcactgccctgcaggtcagcccgtgaaggttcgggtgtcgtaccaaaaactgctcaagtattatgtccttaacgcattgaagcaccgacctcctaaagctcaaaaaaagcggtacctgtttagatcattcaaagcaacgaaattctttcagagcacgaaactggattgggtcgaggtcggactgcaggtgtgtagacaagggtacaacatgctaaacctgctgatccaccggaaaaacttgaactatcttcacctggactacaatttcaacctgaaacccgtgaagaccctgactacaaaagagcggaaaaagagtcgatttggaaatgcctttcatctatgtcgcgaagtgctcagacttacgaagctcgtggtggacagccacgttcagtatcgacttggaaacgtggatgcctttcagctggcggacggattgcagtatatcttcgcccatgtaggacaactgaccggcatgtaccgttataaatacaaactgatgcgtcagatcagaatgtgtaaagacttgaagcatctcatctactaccggttcaacaccggccctgtgggaaaaggacccgggtgtggtttctgggccgcggggtggcgagtctggttattctttatgcggggcatcactcctttgctggaacgttggttgggaaacctgctggcaaggcagttcgagggcaggcactccaaaggcgtcgccaagacagttactaagcagcgggtcgaatcacattttgatcttgagctcagagccgccgttatgcatgatatcttggacatgatgcctgaagggataaagcagaataaggcacgcaccatcctccaacacctgtccgaagcctggagatgctggaaggccaacattccttggaaggtacctgggctcccgacacctatagaaaacatgatccttaggtatgtgaaagctaaggctgactggtggacaaacacggcacattacaatcgggagagaatccgccggggtgccaccgtggacaaaactgtgtgtaaaaagaatctcggcagactcactaggctgtacttaaaggcggagcaggagaggcagcacaattacctcaaggatgggccgtatatcacggctgaggaagccgttgccgtgtacacgaccactgtccattggctagagtccagacgtttctctcccattccatttcctccgctcagttataagcacgatactaaactgctgatcttggccttagaaaggctaaaggaggcttactccgtaaaatccagactaaatcaatcccagcgtgaagaactgggtctgattgaacaggcctacgacaaccctcacgaggccctcagcaggataaagagacatctgttgacccagagggcattcaaggaggtggggattgaatttatggatctatattcacacctagtgcccgtgtatgatgtggagcctttagagaaaatcaccgatgcttacctagatcaatacttgtggtacgaagcagacaagcgcagattgttcccaccatggattaagcctgctgatacagagcctcctcccctcctggtatacaagtggtgtcaagggataaataatctgcaggacgtgtgggagacgtctgagggcgagtgcaatgtgatgcttgagtcccggtttgagaaaatgtacgaaaagattgacctaacgctgctgaatcggctgctgcgcttaatcgtcgatcacaatattgcagactacatgaccgcaaaaaacaacgtggtgattaactacaaggacatgaaccatactaactcttacgggattattcggggtttgcaatttgctagtttcattgtgcaatattatggcctcgttatggatctgctggtgctgggactgcatcgtgcctcagagatggccggtccccctcagatgcccaacgacttcctatcattccaggacatcgcgacggaagccgcgcacccaattaggctcttttgccggtacattgatcgcattcacatattctttcgctttacagcagatgaagcgagggatctgatccagcgatatctgacagagcacccagacccaaataatgaaaacatcgtcggatataacaacaaaaaatgctggccccgggacgcccggatgagactgatgaaacatgacgtgaatcttggccgggctgtgttttgggacatcaaaaatcggctgccacgttcggttactactgttcagtgggaaaacagcttcgtctctgtctacagcaaagacaacccaaacctgctttttaatatgtgcggatttgaatgccgcattttaccaaagtgtcggaccagctatgaggagtttacccacaaggatggcgtgtggaatttgcagaatgaagtgactaaggaacgcaccgctcagtgtttcctgcgggtggacgacgagtccatgcagcgtttccacaatagggtgcgtcagattctgatggcgtcagggtccaccaccttcaccaaaattgtgaacaaatggaataccgcactaatcggtttgatgacgtattttcgggaagcagtcgttaacactcaagagctcctggatctcttagtgaagtgcgaaaataagatacagactaggataaagatcggtctcaattcgaaaatgccatcacgttttccccctgttgtcttttacacgcccaaggagctagggggcttggggatgttgtcaatgggtcacgtgctgatcccacagtcagatcttagatggtctaagcagaccgatgtcggaattacccatttcagatcagggatgagccacgaagaggatcagcttattcctaatctttacaggtatattcagccgtgggagtccgagtttattgactctcagcgcgtgtgggcagagtacgctcttaagaggcaggaagccattgcccaaaacagaaggctgaccctggaggacctggaggactcttgggaccgaggaattccgagaataaacacgcttttccagaaagacaggcacaccctggcctatgacaaagggtggagggtgcggactgactttaagcagtatcaagtactgaaacaaaatcctttttggtggactcaccagaggcacgacggcaagctatggaacctcaacaactataggaccgacatgatccaggcattggggggcgtagaaggtatcctcgaacacacgctgtttaaaggaacctattttcctacctgggagggactgttctgggaaaaggcttctggtttcgaggagtctatgaagtggaagaaactgactaatgcccaaaggagtggattgaatcaaattcccaataggcgcttcactctctggtggtcaccaaccattaacagagccaacgtgtacgtcggttttcaggtgcagctggatctgactggcatctttatgcacggtaagattcctaccttgaaaattagtctcatccagatctttcgtgcccacctttggcagaagatccatgaaagcattgtgatggacttgtgccaggtgtttgaccaggaactcgatgcccttgaaatagagacagtccaaaaggagacaattcacccccgcaagagttacaagatgaattctagctgcgccgacatccttctctttgcatcctacaagtggaacgtctctagacccagcctgctggcggactccaaggacgtcatggattcgacaactacacagaagtattggatagatatccaactgaggtggggtgattatgattcacacgatatagagcgttacgcacgtgctaagtttcttgactatactaccgataatatgtcaatttacccttcgccaactggcgtcctcatcgctatcgatctggcctacaatttacacagtgcttacggcaactggtttcctggttccaagcctcttatccagcaggctatggcgaaaattatgaaggctaatcccgccttgtacgttttgagagagcgaattcggaaaggactccagctgtatagcagcgagcctacggagccttacttgagctcacaaaactacggcgaactcttcagcaaccaaattatctggttcgtcgatgacaccaatgtgtacagggtgacaatacataaaacctttgaaggcaaccttaccacaaaacctatcaacggagctatctttattttcaatcccagaacagggcagttgttcctcaagattatacatacctcagtatgggccggtcagaaacgtctcggacaattggcaaagtggaaaacagcagaagaggtggccgccctaatcagatcactgccagtagaggaacaaccaaagcaaattatcgtaacacggaaaggaatgctcgatcctcttgaggtgcatctcctcgacttcccaaacattgttattaagggatcagaattgcagctgcctttccaggcctgcctcaaagtcgaaaagtttggcgatctgatcttaaaggctaccgaaccccagatggtgctctttaacctctacgatgactggctcaagactatttcaagctataccgccttttccaggctgattctgatcttacgtgctttgcacgttaataatgacagggcaaaggtcatcctgaagcccgataaaactaccattacggagcctcatcacatttggcctacgctgacggatgaggaatggattaaggtggaggtgcagcttaaggatctcattctggccgactatgggaaaaagaacaacgtgaacgttgcatctctcacccagtcagagattagagacatcatcctggggatggagatatctgccccgtcacaacaacgccaacagattgcagagattgagaagcaaactaaggaacagagccagctgaccgcaacacagacacgaacggttaacaaacatggtgatgaaatcattacctccactacctcaaattatgaaacccaaaccttcagctctaagacagaatggcgggtccgagccatctcggctgctaacttacacctgcgaacgaatcacatctacgtttccagtgatgatatcaaggagaccggctacacctatatcctgccaaagaatgtcctaaagaagttcatctgtatctcagacctgcgcgcacagatcgcagggtacctgtatggcgtatcccccccagataatcctcaggttaaggagattaggtgcattgtgatggtgccacagtggggcacacaccagacagtgcacctgcctggacagttgccccagcacgaatatctgaaagaaatggagcctcttggctggatacatacgcaaccaaatgagtccccacagctatctccgcaggatgtcaccacccacgccaagataatggccgacaatccgagttgggatggagagaaaactatcatcattacttgcagttttaccccaggaagttgcaccttgactgcatacaagctaactcccagcgggtatgaatggggacggcagaacaccgacaagggtaataatcctaagggatacctgccctcccactatgagcgagtgcagatgcttctgtccgaccgatttctgggtttcttcatggtgcccgcgcaatcctcgtggaattacaattttatgggtgtgagacacgaccccaacatgaaatatgagctccagctcgcaaaccctaaagaattttatcacgaggtccaccggccatcgcactttttgaacttcgctctgctgcaggagggcgaagtctactccgctgatcgcgaagacttatatgcttag

SEQ ID NO: 165218 - DNA, 1392 bp, Artificial Sequence
  derived and/or modified sequence
atgatccaggccctgggcggcgtggagggcatcctggagcacaccttgttcaagggcacgtattttcccacctgggaggggctgttttgggagaaagcgtcaggcttcgaggagagcatgaaatggaaaaagttgaccaacgcccagcgcagcgggcttaaccagatccctaatcggcgattcactctatggtggtccccgaccatcaacagggctaatgtctatgtaggattccaagtgcaactggacctgaccggcattttcatgcacggcaagattccaactcttaaaattagtcttattcagattttccgggcccacttatggcagaagatccacgaaagtatcgtcatggacctgtgtcaggtcttcgatcaggaattagatgcactcgaaatagagactgtacaaaaagagacaattcacccccggaagtcttataagatgaatagctcctgtgcagacatcctcctttttgcgtcttacaagtggaatgtgagtcggccgagcctcctggccgactcaaaggacgtaatggattctactaccacccagaaatactggatcgacattcagctgaggtggggagattacgactcccacgacatcgagagatatgctcgggcaaagttcttagactacactactgacaacatgtccatctatccctccccaactggggtgctaatcgctatcgacctcgcctacaatctgcacagctactccgaggtcggtagtctgcaacaagcctcccatacaactggcgctaagataatgaaggccaaccctgccctatatgtgctgagagaacggattaggaaaggcctccagctgtactcctccgagcccaccgagccgtacctgagttcacagaattatggggaactcttcagtaaccaaattatctggtttgtggacgacaccaacgtgtaccgggtaaccattcacaagacgtttgaaggaaatctgactacaaagcccattaacggggctattttcattttcaacccacggacggggcaattgttcctgaaaataatccatacatcagtctgggccggacagaaaagactggggcagctggctaaatggaagaccgccgaagaggtagctgcactgatcaggtcactgccggtggaggagcagcccaaacaaatcatcgttacaagaaagggaatgttggacccccttgaggtgcacttgctggactttcccaacatagtcataaaggggtctgaactccaactccctttccaggcgtgcctgaaagtagaaaaatttggggacctgatcttaaaagctaccgagccgcaaatggtcctcttcaatctgtatgatgattggttaaagaccatatcctcatacaccgccttctcgagacttattttgtag

SEQ ID NO: 165219 - DNA, 7007 bp, Artificial Sequence
  derived and/or modified sequence
atggcaggggtgttcccctatagaggcccagggaaccctgtgcctggccctctggcccctctgcccgactacatgagtgaagaaaagctgcaagagaaggctcgcaaatggcagcaattgcaggctaaaagatatgccgaaaagcgtaaattcggctttgtcgacgcgcagaaggaagacatgcccccagagcacgtacgcaaaatcattagagatcacggggatatgactaaccggaaatttcgccatgataagcgagtttacctcggggcactgaaatacatgcctcacgccgtgcttaagctgctggaaaatatgccaatgccctgggagcagattcgtgacgtgcctgtcttataccatattacaggcgctattagttttgtgaatgaaataccctgggtcatcgaacccgtgtatattagccagtggggatccatgtggattatgatgaggcgggagaaaagggatagaaggcacttcaagcggatgcgatttcctcctttcgacgatgaggagccccctctggattatgcagataatatcttagacgtcgaacctctcgaagctatccagttggagctggatcctgaggaggacgcccctgtccttgattggttttacgatcatcaaccccttagggatagtcgcaaatatgttaatggatcgacttaccagcgctggcaatttaccctccccatgatgtcaaccttgtacaggttggccaaccagctgctgaccgacctggtagacgacaactatttctacctgtttgatctgaaagctttctttacttccaaagcactgaatatggctatccccggtggtccgaaatttgagccattggtgagagatataaatttgcaggacgaggattggaacgagtttaacgacatcaataagatcatcattcggcaaccaattagaaccgagtataagatagcgttcccttatttatacaataatctgcctcaccacgtgcatttgacctggtaccacacacccaatgtcgtgtttattaagaccgaggacccagatctgcctgcattttatttcgatccactcattaaccccattagtcaccgtcattccgtgaagtctcaagaaccgttgcctgacgatgatgaggaattcgagctgcccgagtttgtggagccgttcttgaaagatactccgctctatactgacaacaccgccaatggcatcgccctcctgtgggcacctcgacccttcaacctaagaagcgggagaacccgacgtgctctggacattcctttagtgaagaattggtatcgtgagcactgcccggcaggacaaccagttaaggtgcgggtttcttaccagaagctgttgaaatattacgtgctgaacgcccttaaacatcggccacctaaggcccaaaaaaagagatatcttttccgctccttcaaagccacaaaatttttccaatcgaccaaactggactgggtggaggtaggactccaagtgtgtcgacagggatataatatgctcaacctgctgatccaccggaaaaacctaaactatcttcacctggactataactttaatctcaagcccgtgaagacgctcactaccaaagagaggaagaagagccgttttggcaacgcttttcatttatgccgcgaggttttaagactaactaaactcgttgtggactcacacgtacagtatagacttgggaacgtggatgccttccagttggcagatggactgcaatatatatttgcacacgtagggcagctcacaggcatgtataggtataagtacaagctgatgaggcagataagaatgtgcaaagacctcaaacacctcatatattaccgtttcaacactggccctgtggggaagggcccaggatgcggattctgggcagcaggttggagggtgtggctattcttcatgcgaggcattacaccgctgcttgagcggtggttaggaaaccttctggctcggcagtttgagggcagacactccaaaggggtcgccaaaacagtgaccaagcagagggtcgagtcccatttcgacctggagttacgggctgctgtgatgcatgatattctggatatgatgcccgaggggatcaaacagaataaggcccgtacaattctacagcatctgtcagaggcttggcggtgctggaaagccaacatcccatggaaagtgccgggtttacctacaccaatagagaacatgattcttcgatatgttaaagcgaaggctgattggtggactaacactgcccactacaacagagagcgcatccgcaggggcgctaccgttgacaaaactgtgtgcaagaaaaaccttggaaggctgacccggttatacctcaaagccgagcaagagcgccagcacaattacctgaaagacgggccatacattactgctgaggaggcggtggcggtgtatacaaccactgtgcactggctcgaatcacggcgtttcagtccaattccgttccctccactgtcctacaaacatgataccaagcttctcatcctggccctggaacgtctgaaggaagcttacagtgtgaagagtaggctgaatcagagccagagagaggagttgggcttgatcgaacaggcatatgacaacccccacgaagccctgtctcgaattaagcgacacctactgactcagagagcttttaaagaagtgggaatcgaattcatggatctgtactcgcatctggtacccgtctatgacgtggagccgctggagaaaatcactgatgcctacctcgatcagtacctgtggtacgaggcagacaagcgcaggctgtttccgccttggattaagcccgctgacaccgaacctcccccactgctcgtgtataagtggtgccaggggattaataacctgcaggacgtatgggaaacatctgagggcgagtgtaacgtgatgcttgagtcacgatttgagaaaatgtacgagaagatcgacttgacactgctgaaccggctgttgcgtctcatagtggaccacaacattgccgactatatgacagcaaagaacaacgtcgtgatcaattacaaggacatgaaccatacaaactcctacgggatcatcagaggccttcagttcgcatcattcatagtgcagtattacggactggtgatggatctgttggtcctaggcctacatcgcgcatcagaaatggccggacctccacaaatgccgaatgactttctgtccttccaggatattgctacagaggctgctcatccgattcgactgttttgtcggtatatcgaccggatacacattttttttaggttcaccgccgacgaggcgagggacctgattcagaggtacttgaccgaacaccccgatccaaacaatgagaatatcgtgggctataacaacaagaaatgctggcccagggatgcaagaatgcggctgatgaagcacgacgtgaatctcggcagggccgtgttctgggacattaagaaccgcctgcctaggtcggtgaccactgtgcaatgggagaatagcttcgtcagcgtttattcgaaagataatcctaacctcctttttaatatgtgtggatttgagtgcagaatcctccccaagtgcagaacaagctatgaggaattcacgcacaaggatggcgtgtggaacttacagaacgaggtcaccaaggagcgtacggcccagtgttttttgcgagtcgacgacgaaagcatgcagcgctttcataatcgcgtcaggcagatacttatggctagcggaagtactacgttcaccaaaatcgtcaacaaatggaatactgccctgatcgggctcatgacctactttcgtgaagccgtcgtcaacacccaagaacttctcgacctgcttgtgaagtgtgagaataagatccagacccggattaagatcggactgaattctaaaatgcccagccggtttccccctgtagtcttttacacccccaaggagctgggtgggcttggtatgcttagtatggggcacgtgctgattccacagtcagacctcaggtggagcaaacaaaccgacgttggaataactcatttccgtagcggtatgtcacacgaggaggatcagctaatccccaatctgtacaggtacattcagccatgggaatccgagtttattgattctcagagagtgtgggctgagtatgcgctgaaaagacaggaagctatcgctcagaaccgcagattgaccctggaagacctggaagactcttgggacaggggtatccccaggattaacaccctgttccagaaagacaggcacaccttggcctacgacaaggggtggcgggtgcgcacagatttcaaacagtaccaggtcctgaagcagaaccctttttggtggactcatcagcgtcacgacggaaagctctggaatctcaataactataggactgacatgatccaggccctgggtggggttgagggcatcctggagcatactctcttcaagggcacatattttcccacctgggagggcctattctgggaaaaggctagtggctttgaggaaagcatgaaatggaaaaagttgactaacgcacagcgctccggactcaaccaaatccctaataggcgtttcacactttggtggtcccccactataaacagggcaaatgtttatgtcggttttcaggttcagctcgatctgacaggaatctttatgcatggcaagatcccaactctgaagataagtcttattcagattttcagggcacatctttggcagaagatccacgaaagcattgttatggatctatgccaggtcttcgatcaagaactcgatgcacttgagatagaaaccgtccagaaagagaccatacatcccagaaagtcctacaaaatgaactcttcttgtgccgatattctgctgtttgcctcatataagtggaacgtctcaaggccctcactccttgcagattctaaagacgtaatggattctactaccacgcagaaatactggatcgatatccagctgcggtggggggactatgattcacacgacatcgagcgctatgctagggccaagttcctggactacacaaccgacaacatgtcgatctaccctagccccactggggttctgattgccattgatttggcttataacctccattcggcctacggtaattggtttcctggctccaagcccctaatacagcaggcaatggctaaaattatgaaggcaaatccagctctatacgtgttgcgtgagaggatcagaaaagggcttcagctgtactcatctgaacctactgagccatacctgagtagccaaaactatggagagctcttttcaaaccaaattatttggttcgtggatgacacgaacgtatatagggttacgatacataaaacctttgaaggcaatttgaccactaagcctatcaatggagctatttttatcttcaatccacgcacaggccagctgtttctgaagattatccatactagcgtttgggccggtcagaagcgtctgggtcagttagctaagtggaaaactgcggaagaggtagcagccctcattagatccctgcccgtcgaagaacagcccaaacagattattgtaacccggaagggaatgctagacccacttgaggtgcaccttctagactttcccaacatcgtgataaaaggcagcgaactgcagttgccctttcaggcgtgtctgaaagtggagaaatttggagacctgattttgaaggcgactgagcctcaaatggttttgtttaacctctacgatgattggctcaagacgatctctagttatacagccttctccagactcatcctcatcctgagagcccttcatgtgaacaacgaccgcgctaaggtaattctaaagccggacaaaactacaatcacagagccacatcatatctggccaacgttgaccgacgaggagtggatcaaagtcgaagtgcagctgaaggacctaatattggcggactacggaaagaaaaacaacgtgaacgtagctagtctcactcagtctgagatccgtgacatcatcctgggtatggagatctctgccccatctcaacaacgccaacagatcgccgaaatcgaaaaacagaccaaagaacaaagtcagctgactgccacccagacccgtaccgtgaacaaacatggcgacgagatcatcaccagtaccacttccaactatgaaacacaaaccttctcttccaagacagagtggcgcgtgagagcaattagcgcagctaatttgcacctgaggaccaatcacatctatgtgagtagcgatgacataaaggagacaggctatacttatatcctgcccaagaatgtgttgaagaagtttatttgcattagcgacctgcgagcacagattgcaggctacctgtacggagtctctccaccggacaacccacaggttaaagagatccggtgtatcgtgatggtcccacagtggggaactcaccagacagtacacctgccaggacaactgcctcagcatgaatacctaaaggaaatggagcctctgggttggattcatacccagcctaacgaaagccctcagctgtccccccaagacgtgactactcacgctaaaatcatggctgataatccctcttgggatggagaaaaaaccattataatcacctgctcattcacccccggatcgtgcaccctgaccgcctacaagctgacaccttcagggtacgaatggggacgccagaataccgacaaaggcaacaatcctaaggggtatctcccatcacattacgaaagggtacagatgctgctaagcgaccgattcctgggcttcttcatggtgccggctcagtcaagttggaactacaattttatgggcgtacgacacgaccctaatatgaagtatgaactccagctcgccaacccaaaggaattttaccacgaagtgcacaggcccagccactttttaaatttcgccctcttgcaggagggcgaggtgtacagtgctgacagggaggatctgtatgcgta

SEQ ID NO: 165220 - DNA, 1392 bp, Artificial Sequence
  derived and/or modified sequence
atgatccaagcgctggggggagtagagggaatcttggaacacacactgtttaaaggcacatatttccccacctgggagggcctcttctgggaaaaagccagtggcttcgaggaatcaatgaaatggaaaaagctcacaaatgcacagaggtcaggcctgaatcagattcctaatcggagatttacgctctggtggtccccaactattaaccgtgccaatgtctatgttgggttccaggtgcagctcgacctcacaggaattttcatgcatggaaagattccaacccttaaaatctcacttatacaaatcttcagagctcacttgtggcagaagattcacgagagcatcgtgatggacctctgtcaagtgtttgaccaggagctggatgctctcgagatagaaactgtccagaaggaaacaatccatccgagaaagagttataagatgaattccagctgtgcagatattctgctctttgcaagctacaagtggaacgtaagccgccctagccttttagccgacagcaaggatgtaatggactccacgactacgcaaaagtactggatagatatccagctgaggtggggcgactatgacagccatgatatcgagaggtacgccagagccaaattcctcgattatactactgacaacatgtccatctacccaagccctaccggggtgctgatagcaatcgacttggcgtataatctgcattcatacagcgaggtgggtagcctccaacaagcttctcataccaccggtgccaagatcatgaaggcgaatccggcactatacgttctcagggaacgtattagaaaaggcttgcagctgtattcgtctgaacccaccgagccatatctgtcgagccagaactacggagaactgtttagcaaccagattatatggtttgtagatgatactaacgtctatcgtgtgaccatccacaagacgtttgagggcaacctgaccaccaagcctattaatggtgcaatctttatttttaatccaagaaccggacagttatttcttaagatcatacacacgtcagtctgggccggacaaaagcgattaggacagctcgccaagtggaaaaccgcagaggaggtcgccgcactcatcaggtcactgcccgtagaggaacaaccaaaacaaattattgtgactcggaagggtatgctggatcctctcgaggttcatctgctggacttcccaaacatagtgatcaaagggagcgagttgcaactgccatttcaggcctgccttaaagtggagaagtttggggatctgattttaaaagctacggaacctcaaatggtcctgttcaacctgtacgacgactggcttaagactatttcaagttatactgccttctcacgcctcattctgtag

SEQ ID NO: 165221 - DNA, 7273 bp, Artificial Sequence
  derived and/or modified sequence
ggcgctgggaacgcggagcggacgcagtctggccgccattgcgctgcggggaaagcggcctcttgtgtgagggcctgtgggattctccggatatggccggagtgtttccttatcgagggccgggtaacccggtgcctggccctctagccccgctaccggactacatgtcggaggagaagctgcaggagaaagctcgaaaatggcagcaattgcaggccaagcgctatgcagaaaagcggaagtttgggtttgtggatgcccagaaggaagacatgcccccagaacatgtcaggaagatcattcgagaccatggagacatgaccaacaggaagttccgccatgacaaaagggtttacttgggtgccctaaagtacatgccccacgcagtcctcaaactcctggagaacatgcctatgccttgggagcagattcgggatgtgcctgtgctgtaccacatcactggagccatttccttcgtcaatgagattccctgggtcattgaacctgtctacatctcccagtgggggtcaatgtggattatgatgcgccgagaaaaaagagataggaggcatttcaagaggatgcgttttcccccttttgatgatgaggagccgcccttggactatgctgacaacatcctagatgttgagccactggaggccattcagctagagctggaccctgaggaggacgcccctgtgttggactggttctatgaccaccagccgttgagggacagcaggaagtatgtaaatggctccacttaccagcgctggcagttcacactacctatgatgtcgactctctaccgcctggctaatcagctcctgacagacttggtggatgacaactacttctacctgtttgatttgaaggccttctttacgtccaaggcactcaatatggccattcctggaggccccaaatttgaacctcttgttcgagacatcaacctacaggatgaagactggaatgaattcaatgatattaacaagattatcatccggcagcctatccgcactgagtacaagattgcttttccttacttgtacaacaatcttccacaccatgtccacctcacctggtaccatactcccaatgttgtattcatcaaaactgaggatcctgacttgccagctttctactttgaccctttgatcaacccaatctcccataggcactcagtcaagagccaggaaccattgccggatgatgatgaggaatttgagctcccggagtttgtggagcccttcctgaaggacacacccctctatacagacaatacagccaatggcattgccctgctctgggccccgcggcccttcaacctacgctctggtcgcacccgtcgggccctggacataccccttgtcaagaactggtatcgggagcattgtcctgccgggcagcctgtgaaagtgagggtctcctaccagaagctgcttaagtactatgtgctgaatgccctgaagcatcggccccctaaggctcaaaagaagaggtatttgttccgctccttcaaagccaccaaattctttcagtccacaaagctggactgggtggaggttgggctccaggtttgccgccagggctacaacatgctcaaccttctcattcaccgcaaaaacctcaactacctgcacctggactacaacttcaacctcaagcctgtgaaaacgctcaccaccaaggaaagaaagaaatctcgttttgggaatgctttccacctgtgtcgggaagttctgcgtttgactaagctggtggtggatagtcacgtgcagtatcggctgggcaatgtggatgccttccagctggcagatggattgcagtatatatttgcccatgttgggcagttgacgggcatgtatcgatacaaatacaagctgatgcgacagattcgcatgtgcaaggacctgaagcatctcatctattatcgtttcaacacgggccctgtagggaagggtcctggctgtggcttctgggctgccggttggcgagtctggctctttttcatgcgtggcattacccctttattagagcgatggcttggcaacctcctggcccggcagtttgaaggtcgacactcaaagggggtggcaaagacagtaacaaagcagcgagtggagtcacattttgaccttgagctgcgggcagctgtgatgcatgatattctggacatgatgcctgaggggatcaagcagaacaaggcccggacaatcctgcagcacctcagtgaagcctggcgctgctggaaagccaacattccctggaaggtccctgggctgccgacgcccatagagaatatgatccttcgatacgtgaaggccaaggctgactggtggaccaacactgcccactacaaccgagaacggatccgccgaggggccactgtggacaagactgtttgtaaaaagaatctgggccgcctcacccggctctatctgaaggcagaacaggagcggcagcacaactacctgaaggacgggccttacatcacagcggaggaagcagtggcagtatataccaccacagtgcattggttggaaagccgcaggttttcacccatcccattccccccactctcctataagcatgacaccaagttgctcatcttggcattggagcggctcaaggaagcttatagtgtgaagtctcggttgaaccagtctcagagggaggagctaggtctgatcgagcaggcctacgataacccccacgaggcgctgtcccgcatcaagcgtcacctcctcacacagagagccttcaaagaggtgggcattgagttcatggatctgtatagccacctcgttccagtatatgatgttgagcccctggagaagataactgatgcttacctggaccagtacctgtggtatgaagccgacaagcgccgcctgttcccaccctggattaagcctgcagacacagaaccacctccgctgcttgtttacaagtggtgtcaaggcatcaataacctgcaggacgtgtgggagacgagtgaaggcgagtgcaatgtcatgctggaatcccgctttgagaagatgtatgagaagatcgacttgactctgctcaacaggctgctgcgcctcatcgtggaccacaacatagccgactacatgacagccaagaacaacgtcgtcatcaactataaggacatgaaccatacgaattcatatgggatcatcagaggcctgcagtttgcctcattcatcgtgcagtattatggcctggtgatggatttgcttgtattgggattgcaccgggccagtgagatggctgggccccctcagatgccaaatgactttctcagtttccaggacatagccactgaggctgcccaccccatccgtctcttctgcagatacattgatcgcatccatatttttttcaggttcacagcagatgaggctcgggacctgattcaacgttacctgacagagcaccctgaccccaataatgaaaacatcgttggctataataacaagaagtgctggccccgagatgcccgcatgcgcctcatgaaacatgatgttaacttaggccgggcggtattctgggacatcaagaaccgcttgccacggtcagtgactacagttcagtgggagaacagcttcgtgtctgtgtacagtaaggacaaccccaacctgctgttcaacatgtgtggcttcgagtgccgcatcctgcctaagtgccgcaccagctatgaggagttcacccacaaggacggggtctggaacctgcagaatgaggttactaaggagcgcacagctcagtgtttcctgcgtgtggacgatgagtcaatgcagcgcttccacaaccgcgtgcgtcagattctcatggcctctgggtccaccaccttcaccaagattgtgaataagtggaatacagctctcattggccttatgacatactttcgggaggctgtggtgaacacccaagagctcttggacttactggtgaagtgtgagaacaaaatccagacacgtatcaagattggactcaactccaagatgccaagtcggttccccccggttgtgttctacacccctaaggagttgggtggactcggcatgctctcaatgggccatgtgctcatcccccaatccgacctcaggtggtccaaacagacagatgtaggtatcacacactttcgttcaggaatgagccatgaagaagaccagctcattcccaacttgtaccgctacatacagccatgggagagcgagttcattgattctcagcgggtctgggctgagtacgcactcaagaggcaagaggccattgctcagaacagacgcctgactttagaagacctagaagattcatgggatcgtggcattcctcgaatcaataccctcttccagaaggaccggcacacactggcttatgataagggctggcgtgtcagaactgactttaagcagtatcaggttttgaagcagaatccgttctggtggacacaccagcggcatgatgggaagctctggaacctgaacaactaccgtacagacatgatccaggccctgggcggtgtggaaggcattctggaacacacactctttaagggcacttacttccctacctgggaggggcttttctgggagaaggccagtggctttgaggaatctatgaagtggaagaagctaactaatgctcagcgatcaggactgaaccagattcccaatcgtagattcaccctctggtggtccccgaccattaatcgagccaatgtatatgtaggctttcaggtgcagctagacctgacgggtatcttcatgcacggcaagatccccacgctgaagatctctctcatccagatcttccgagctcacttgtggcagaagatccatgagagcattgttatggacttatgtcaggtgtttgaccaggaacttgatgcactggaaattgagacagtacaaaaggagacaatccatccccgaaagtcatataagatgaactcttcctgtgcagatatcctgctctttgcctcctataagtggaatgtctcccggccctcattgctggctgactccaaggatgtgatggacagcaccaccacccagaaatactggattgacatccagttgcgctggggggactatgattcccacgacattgagcgctacgcccgggccaagttcctggactacaccaccgacaacatgagtatctacccttcgcccacaggtgtactcatcgccattgacctggcctataacttgcacagtgcctatggaaactggttcccaggcagcaagcctctcatacaacaggccatggccaagatcatgaaggcaaaccctgccctgtatgtgttacgtgaacggatccgcaaggggctacagctctattcatctgaacccactgagccttatttgtcttctcagaactatggtgagctcttctccaaccagattatctggtttgtggatgacaccaacgtctacagagtgactattcacaagacctttgaagggaacttgacaaccaagcccatcaacggagccatcttcatcttcaacccacgcacagggcagctgttcctcaagataatccacacgtccgtgtgggcgggacagaagcgtttggggcagttggctaagtggaagacagctgaggaggtggccgccctgatccgatctctgcctgtggaggagcagcccaagcagatcattgtcaccaggaagggcatgctggacccactggaggtgcacttactggacttccccaatattgtcatcaaaggatcggagctccaactccctttccaggcgtgtctcaaggtggaaaaattcggggatctcatccttaaagccactgagccccagatggttctcttcaacctctatgacgactggctcaagactatttcatcttacacggccttctcccgtctcatcctgattctgcgtgccctacatgtgaacaacgatcgggcaaaagtgatcctgaagccagacaagactactattacagaaccacaccacatctggcccactctgactgacgaagaatggatcaaggtcgaggtgcagctcaaggatctgatcttggctgactacggcaagaaaaacaatgtgaacgtggcatcactgacacaatcagaaattcgagacatcatcctgggtatggagatctcggcaccgtcacagcagcggcagcagatcgctgagatcgagaagcagaccaaggaacaatcgcagctgacggcaacacagactcgcactgtcaacaagcatggcgatgagatcatcacctccaccaccagcaactatgagacccagactttctcatccaagactgagtggagggtcagggccatctctgctgccaacctgcacctaaggaccaatcacatctatgtttcatctgacgacatcaaggagactggctacacctacatccttcccaagaatgtgcttaagaagttcatctgcatatctgaccttcgggcccaaattgcaggatacctatatggggtgagcccaccagataacccccaggtgaaggagatccgctgcattgtgatggtgccgcagtggggcactcaccagaccgtgcacctgcctggccagctgccccagcatgagtacctcaaggagatggaacccttaggttggatccacactcagcccaatgagtccccgcagttatcaccccaggatgtcaccacccatgccaagatcatggctgacaacccatcttgggatggcgagaagaccattatcatcacatgcagcttcacgccaggctcctgtacactgacggcctacaagctgacccccagtggctacgaatggggccgccagaacacagacaagggcaacaaccccaagggctacctgccttcacactatgagagggtgcagatgctgctgtcggaccgtttccttggcttcttcatggtccctgcccagtcctcgtggaactacaacttcatgggtgttcggcatgaccccaacatgaaatatgagctacagctggcgaaccccaaagagttctaccacgaggtgcacaggccctctcacttcctcaactttgctctcctgcaggagggggaggtttactctgcggatcgggaggacctgtatgcctgaccgtttccctgcctcctgcttcagcctcccgaggccgaagcctcagcccctccagacaggccgctgacattcagcagtttggcctctttccctctgtctgtgcttgtgttgttgacctcctgatggcttgtcatcctgaataaaatataataataaattttgtataaatagga

SEQ ID NO: 165222 - DNA, 7253 bp, Artificial Sequence
  derived and/or modified sequence
cggagcggacgcagtctggccgccattgcgctgcggggaaagcggcctcttgtgtgagggcctgtgggattctccggatatggccggagtgtttccttatcgagggccgggtaacccggtgcctggccctctagccccgctaccggactacatgtcggaggagaagctgcaggagaaagctcgaaaatggcagcaattgcaggccaagcgctatgcagaaaagcggaagtttgggtttgtggatgcccagaaggaagacatgcccccagaacatgtcaggaagatcattcgagaccatggagacatgaccaacaggaagttccgccatgacaaaagggtttacttgggtgccctaaagtacatgccccacgcagtcctcaaactcctggagaacatgcctatgccttgggagcagattcgggatgtgcctgtgctgtaccacatcactggagccatttccttcgtcaatgagattccctgggtcattgaacctgtctacatctcccagtgggggtcaatgtggattatgatgcgccgagaaaaaagagataggaggcatttcaagaggatgcgttttcccccttttgatgatgaggagccgcccttggactatgctgacaacatcctagatgttgagccactggaggccattcagctagagctggaccctgaggaggacgcccctgtgttggactggttctatgaccaccagccgttgagggacagcaggaagtatgtaaatggctccacttaccagcgctggcagttcacactacctatgatgtcgactctctaccgcctggctaatcagctcctgacagacttggtggatgacaactacttctacctgtttgatttgaaggccttctttacgtccaaggcactcaatatggccattcctggaggccccaaatttgaacctcttgttcgagacatcaacctacaggatgaagactggaatgaattcaatgatattaacaagattatcatccggcagcctatccgcactgagtacaagattgcttttccttacttgtacaacaatcttccacaccatgtccacctcacctggtaccatactcccaatgttgtattcatcaaaactgaggatcctgacttgccagctttctactttgaccctttgatcaacccaatctcccataggcactcagtcaagagccaggaaccattgccggatgatgatgaggaatttgagctcccggagtttgtggagcccttcctgaaggacacacccctctatacagacaatacagccaatggcattgccctgctctgggccccgcggcccttcaacctacgctctggtcgcacccgtcgggccctggacataccccttgtcaagaactggtatcgggagcattgtcctgccgggcagcctgtgaaagtgagggtctcctaccagaagctgcttaagtactatgtgctgaatgccctgaagcatcggccccctaaggctcaaaagaagaggtatttgttccgctccttcaaagccaccaaattctttcagtccacaaagctggactgggtggaggttgggctccaggtttgccgccagggctacaacatgctcaaccttctcattcaccgcaaaaacctcaactacctgcacctggactacaacttcaacctcaagcctgtgaaaacgctcaccaccaaggaaagaaagaaatctcgttttgggaatgctttccacctgtgtcgggaagttctgcgtttgactaagctggtggtggatagtcacgtgcagtatcggctgggcaatgtggatgccttccagctggcagatggattgcagtatatatttgcccatgttgggcagttgacgggcatgtatcgatacaaatacaagctgatgcgacagattcgcatgtgcaaggacctgaagcatctcatctattatcgtttcaacacgggccctgtagggaagggtcctggctgtggcttctgggctgccggttggcgagtctggctctttttcatgcgtggcattacccctttattagagcgatggcttggcaacctcctggcccggcagtttgaaggtcgacactcaaagggggtggcaaagacagtaacaaagcagcgagtggagtcacattttgaccttgagctgcgggcagctgtgatgcatgatattctggacatgatgcctgaggggatcaagcagaacaaggcccggacaatcctgcagcacctcagtgaagcctggcgctgctggaaagccaacattccctggaaggtccctgggctgccgacgcccatagagaatatgatccttcgatacgtgaaggccaaggctgactggtggaccaacactgcccactacaaccgagaacggatccgccgaggggccactgtggacaagactgtttgtaaaaagaatctgggccgcctcacccggctctatctgaaggcagaacaggagcggcagcacaactacctgaaggacgggccttacatcacagcggaggaagcagtggcagtatataccaccacagtgcattggttggaaagccgcaggttttcacccatcccattccccccactctcctataagcatgacaccaagttgctcatcttggcattggagcggctcaaggaagcttatagtgtgaagtctcggttgaaccagtctcagagggaggagctaggtctgatcgagcaggcctacgataacccccacgaggcgctgtcccgcatcaagcgtcacctcctcacacagagagccttcaaagaggtgggcattgagttcatggatctgtatagccacctcgttccagtatatgatgttgagcccctggagaagataactgatgcttacctggaccagtacctgtggtatgaagccgacaagcgccgcctgttcccaccctggattaagcctgcagacacagaaccacctccgctgcttgtttacaagtggtgtcaaggcatcaataacctgcaggacgtgtgggagacgagtgaaggcgagtgcaatgtcatgctggaatcccgctttgagaagatgtatgagaagatcgacttgactctgctcaacaggctgctgcgcctcatcgtggaccacaacatagccgactacatgacagccaagaacaacgtcgtcatcaactataaggacatgaaccatacgaattcatatgggatcatcagaggcctgcagtttgcctcattcatcgtgcagtattatggcctggtgatggatttgcttgtattgggattgcaccgggccagtgagatggctgggccccctcagatgccaaatgactttctcagtttccaggacatagccactgaggctgcccaccccatccgtctcttctgcagatacattgatcgcatccatatttttttcaggttcacagcagatgaggctcgggacctgattcaacgttacctgacagagcaccctgaccccaataatgaaaacatcgttggctataataacaagaagtgctggccccgagatgcccgcatgcgcctcatgaaacatgatgttaacttaggccgggcggtattctgggacatcaagaaccgcttgccacggtcagtgactacagttcagtgggagaacagcttcgtgtctgtgtacagtaaggacaaccccaacctgctgttcaacatgtgtggcttcgagtgccgcatcctgcctaagtgccgcaccagctatgaggagttcacccacaaggacggggtctggaacctgcagaatgaggttactaaggagcgcacagctcagtgtttcctgcgtgtggacgatgagtcaatgcagcgcttccacaaccgcgtgcgtcagattctcatggcctctgggtccaccaccttcaccaagattgtgaataagtggaatacagctctcattggccttatgacatactttcgggaggctgtggtgaacacccaagagctcttggacttactggtgaagtgtgagaacaaaatccagacacgtatcaagattggactcaactccaagatgccaagtcggttccccccggttgtgttctacacccctaaggagttgggtggactcggcatgctctcaatgggccatgtgctcatcccccaatccgacctcaggtggtccaaacagacagatgtaggtatcacacactttcgttcaggaatgagccatgaagaagaccagctcattcccaacttgtaccgctacatacagccatgggagagcgagttcattgattctcagcgggtctgggctgagtacgcactcaagaggcaagaggccattgctcagaacagacgcctgactttagaagacctagaagattcatgggatcgtggcattcctcgaatcaataccctcttccagaaggaccggcacacactggcttatgataagggctggcgtgtcagaactgactttaagcagtatcaggttttgaagcagaatccgttctggtggacacaccagcggcatgatgggaagctctggaacctgaacaactaccgtacagacatgatccaggccctgggcggtgtggaaggcattctggaacacacactctttaagggcacttacttccctacctgggaggggcttttctgggagaaggccagtggctttgaggaatctatgaagtggaagaagctaactaatgctcagcgatcaggactgaaccagattcccaatcgtagattcaccctctggtggtccccgaccattaatcgagccaatgtatatgtaggctttcaggtgcagctagacctgacgggtatcttcatgcacggcaagatccccacgctgaagatctctctcatccagatcttccgagctcacttgtggcagaagatccatgagagcattgttatggacttatgtcaggtgtttgaccaggaacttgatgcactggaaattgagacagtacaaaaggagacaatccatccccgaaagtcatataagatgaactcttcctgtgcagatatcctgctctttgcctcctataagtggaatgtctcccggccctcattgctggctgactccaaggatgtgatggacagcaccaccacccagaaatactggattgacatccagttgcgctggggggactatgattcccacgacattgagcgctacgcccgggccaagttcctggactacaccaccgacaacatgagtatctacccttcgcccacaggtgtactcatcgccattgacctggcctataacttgcacagctactcagaagttggcagcttgcagcaagcctctcatacaacaggcgccaagatcatgaaggcaaaccctgccctgtatgtgttacgtgaacggatccgcaaggggctacagctctattcatctgaacccactgagccttatttgtcttctcagaactatggtgagctcttctccaaccagattatctggtttgtggatgacaccaacgtctacagagtgactattcacaagacctttgaagggaacttgacaaccaagcccatcaacggagccatcttcatcttcaacccacgcacagggcagctgttcctcaagataatccacacgtccgtgtgggcgggacagaagcgtttggggcagttggctaagtggaagacagctgaggaggtggccgccctgatccgatctctgcctgtggaggagcagcccaagcagatcattgtcaccaggaagggcatgctggacccactggaggtgcacttactggacttccccaatattgtcatcaaaggatcggagctccaactccctttccaggcgtgtctcaaggtggaaaaattcggggatctcatccttaaagccactgagccccagatggttctcttcaacctctatgacgactggctcaagactatttcatcttacacggccttctcccgtctcatcctgattctgcgtgccctacatgtgaacaacgatcgggcaaaagtgatcctgaagccagacaagactactattacagaaccacaccacatctggcccactctgactgacgaagaatggatcaaggtcgaggtgcagctcaaggatctgatcttggctgactacggcaagaaaaacaatgtgaacgtggcatcactgacacaatcagaaattcgagacatcatcctgggtatggagatctcggcaccgtcacagcagcggcagcagatcgctgagatcgagaagcagaccaaggaacaatcgcagctgacggcaacacagactcgcactgtcaacaagcatggcgatgagatcatcacctccaccaccagcaactatgagacccagactttctcatccaagactgagtggagggtcagggccatctctgctgccaacctgcacctaaggaccaatcacatctatgtttcatctgacgacatcaaggagactggctacacctacatccttcccaagaatgtgcttaagaagttcatctgcatatctgaccttcgggcccaaattgcaggatacctatatggggtgagcccaccagataacccccaggtgaaggagatccgctgcattgtgatggtgccgcagtggggcactcaccagaccgtgcacctgcctggccagctgccccagcatgagtacctcaaggagatggaacccttaggttggatccacactcagcccaatgagtccccgcagttatcaccccaggatgtcaccacccatgccaagatcatggctgacaacccatcttgggatggcgagaagaccattatcatcacatgcagcttcacgccaggctcctgtacactgacggcctacaagctgacccccagtggctacgaatggggccgccagaacacagacaagggcaacaaccccaagggctacctgccttcacactatgagagggtgcagatgctgctgtcggaccgtttccttggcttcttcatggtccctgcccagtcctcgtggaactacaacttcatgggtgttcggcatgaccccaacatgaaatatgagctacagctggcgaaccccaaagagttctaccacgaggtgcacaggccctctcacttcctcaactttgctctcctgcaggagggggaggtttactctgcggatcgggaggacctgtatgcctgaccgtttccctgcctcctgcttcagcctcccgaggccgaagcctcagcccctccagacaggccgctgacattcagcagtttggcctctttccctctgtctgtgcttgtgttgttgacctcctgatggcttgtcatcctgaataaaatataataataaattttgtataaatagg

SEQ ID NO: 165223 - DNA, 7008 bp, Artificial Sequence
  derived and/or modified sequence
atggccggcgtgttcccctacagaggccccggcaaccccgtgcccggccccctggcccccctgcccgactacatgagcgaggagaagctgcaggagaaggccagaaagtggcagcagctgcaggccaagagatacgccgagaagagaaagttcggcttcgtggacgcccagaaggaggacatgccccccgagcacgtgagaaagatcatcagagaccacggcgacatgaccaacagaaagttcagacacgacaagagagtgtacctgggcgccctgaagtacatgccccacgccgtgctgaagctgctggagaacatgcccatgccctgggagcagatcagagacgtgcccgtgctgtaccacatcaccggcgccatcagcttcgtgaacgagatcccctgggtgatcgagcccgtgtacatcagccagtggggcagcatgtggatcatgatgagaagagagaagagagacagaagacacttcaagagaatgagattcccccccttcgacgacgaggagccccccctggactacgccgacaacatcctggacgtggagcccctggaggccatccagctggagctggaccccgaggaggacgcccccgtgctggactggttctacgaccaccagcccctgagagacagcagaaagtacgtgaacggcagcacctaccagagatggcagttcaccctgcccatgatgagcaccctgtacagactggccaaccagctgctgaccgacctggtggacgacaactacttctacctgttcgacctgaaggccttcttcaccagcaaggccctgaacatggccatccccggcggccccaagttcgagcccctggtgagagacatcaacctgcaggacgaggactggaacgagttcaacgacatcaacaagatcatcatcagacagcccatcagaaccgagtacaagatcgccttcccctacctgtacaacaacctgccccaccacgtgcacctgacctggtaccacacccccaacgtggtgttcatcaagaccgaggaccccgacctgcccgccttctacttcgaccccctgatcaaccccatcagccacagacacagcgtgaagagccaggagcccctgcccgacgacgacgaggagttcgagctgcccgagttcgtggagcccttcctgaaggacacccccctgtacaccgacaacaccgccaacggcatcgccctgctgtgggcccccagacccttcaacctgagaagcggcagaaccagaagagccctggacatccccctggtgaagaactggtacagagagcactgccccgccggccagcccgtgaaggtgagagtgagctaccagaagctgctgaagtactacgtgctgaacgccctgaagcacagaccccccaaggcccagaagaagagatacctgttcagaagcttcaaggccaccaagttcttccagagcaccaagctggactgggtggaggtgggcctgcaggtgtgcagacagggctacaacatgctgaacctgctgatccacagaaagaacctgaactacctgcacctggactacaacttcaacctgaagcccgtgaagaccctgaccaccaaggagagaaagaagagcagattcggcaacgccttccacctgtgcagagaggtgctgagactgaccaagctggtggtggacagccacgtgcagtacagactgggcaacgtggacgccttccagctggccgacggcctgcagtacatcttcgcccacgtgggccagctgaccggcatgtacagatacaagtacaagctgatgagacagatcagaatgtgcaaggacctgaagcacctgatctactacagattcaacaccggccccgtgggcaagggccccggctgcggcttctgggccgccggctggagagtgtggctgttcttcatgagaggcatcacccccctgctggagagatggctgggcaacctgctggccagacagttcgagggcagacacagcaagggcgtggccaagaccgtgaccaagcagagagtggagagccacttcgacctggagctgagagccgccgtgatgcacgacatcctggacatgatgcccgagggcatcaagcagaacaaggccagaaccatcctgcagcacctgagcgaggcctggagatgctggaaggccaacatcccctggaaggtgcccggcctgcccacccccatcgagaacatgatcctgagatacgtgaaggccaaggccgactggtggaccaacaccgcccactacaacagagagagaatcagaagaggcgccaccgtggacaagaccgtgtgcaagaagaacctgggcagactgaccagactgtacctgaaggccgagcaggagagacagcacaactacctgaaggacggcccctacatcaccgccgaggaggccgtggccgtgtacaccaccaccgtgcactggctggagagcagaagattcagccccatccccttcccccccctgagctacaagcacgacaccaagctgctgatcctggccctggagagactgaaggaggcctacagcgtgaagagcagactgaaccagagccagagagaggagctgggcctgatcgagcaggcctacgacaacccccacgaggccctgagcagaatcaagagacacctgctgacccagagagccttcaaggaggtgggcatcgagttcatggacctgtacagccacctggtgcccgtgtacgacgtggagcccctggagaagatcaccgacgcctacctggaccagtacctgtggtacgaggccgacaagagaagactgttccccccctggatcaagcccgccgacaccgagcccccccccctgctggtgtacaagtggtgccagggcatcaacaacctgcaggacgtgtgggagaccagcgagggcgagtgcaacgtgatgctggagagcagattcgagaagatgtacgagaagatcgacctgaccctgctgaacagactgctgagactgatcgtggaccacaacatcgccgactacatgaccgccaagaacaacgtggtgatcaactacaaggacatgaaccacaccaacagctacggcatcatcagaggcctgcagttcgccagcttcatcgtgcagtactacggcctggtgatggacctgctggtgctgggcctgcacagagccagcgagatggccggccccccccagatgcccaacgacttcctgagcttccaggacatcgccaccgaggccgcccaccccatcagactgttctgcagatacatcgacagaatccacatcttcttcagattcaccgccgacgaggccagagacctgatccagagatacctgaccgagcaccccgaccccaacaacgagaacatcgtgggctacaacaacaagaagtgctggcccagagacgccagaatgagactgatgaagcacgacgtgaacctgggcagagccgtgttctgggacatcaagaacagactgcccagaagcgtgaccaccgtgcagtgggagaacagcttcgtgagcgtgtacagcaaggacaaccccaacctgctgttcaacatgtgcggcttcgagtgcagaatcctgcccaagtgcagaaccagctacgaggagttcacccacaaggacggcgtgtggaacctgcagaacgaggtgaccaaggagagaaccgcccagtgcttcctgagagtggacgacgagagcatgcagagattccacaacagagtgagacagatcctgatggccagcggcagcaccaccttcaccaagatcgtgaacaagtggaacaccgccctgatcggcctgatgacctacttcagagaggccgtggtgaacacccaggagctgctggacctgctggtgaagtgcgagaacaagatccagaccagaatcaagatcggcctgaacagcaagatgcccagcagattcccccccgtggtgttctacacccccaaggagctgggcggcctgggcatgctgagcatgggccacgtgctgatcccccagagcgacctgagatggagcaagcagaccgacgtgggcatcacccacttcagaagcggcatgagccacgaggaggaccagctgatccccaacctgtacagatacatccagccctgggagagcgagttcatcgacagccagagagtgtgggccgagtacgccctgaagagacaggaggccatcgcccagaacagaagactgaccctggaggacctggaggacagctgggacagaggcatccccagaatcaacaccctgttccagaaggacagacacaccctggcctacgacaagggctggagagtgagaaccgacttcaagcagtaccaggtgctgaagcagaaccccttctggtggacccaccagagacacgacggcaagctgtggaacctgaacaactacagaaccgacatgatccaggccctgggcggcgtggagggcatcctggagcacaccctgttcaagggcacctacttccccacctgggagggcctgttctgggagaaggccagcggcttcgaggagagcatgaagtggaagaagctgaccaacgcccagagaagcggcctgaaccagatccccaacagaagattcaccctgtggtggagccccaccatcaacagagccaacgtgtacgtgggcttccaggtgcagctggacctgaccggcatcttcatgcacggcaagatccccaccctgaagatcagcctgatccagatcttcagagcccacctgtggcagaagatccacgagagcatcgtgatggacctgtgccaggtgttcgaccaggagctggacgccctggagatcgagaccgtgcagaaggagaccatccaccccagaaagagctacaagatgaacagcagctgcgccgacatcctgctgttcgccagctacaagtggaacgtgagcagacccagcctgctggccgacagcaaggacgtgatggacagcaccaccacccagaagtactggatcgacatccagctgagatggggcgactacgacagccacgacatcgagagatacgccagagccaagttcctggactacaccaccgacaacatgagcatctaccccagccccaccggcgtgctgatcgccatcgacctggcctacaacctgcacagcgcctacggcaactggttccccggcagcaagcccctgatccagcaggccatggccaagatcatgaaggccaaccccgccctgtacgtgctgagagagagaatcagaaagggcctgcagctgtacagcagcgagcccaccgagccctacctgagcagccagaactacggcgagctgttcagcaaccagatcatctggttcgtggacgacaccaacgtgtacagagtgaccatccacaagaccttcgagggcaacctgaccaccaagcccatcaacggcgccatcttcatcttcaaccccagaaccggccagctgttcctgaagatcatccacaccagcgtgtgggccggccagaagagactgggccagctggccaagtggaagaccgccgaggaggtggccgccctgatcagaagcctgcccgtggaggagcagcccaagcagatcatcgtgaccagaaagggcatgctggaccccctggaggtgcacctgctggacttccccaacatcgtgatcaagggcagcgagctgcagctgcccttccaggcctgcctgaaggtggagaagttcggcgacctgatcctgaaggccaccgagccccagatggtgctgttcaacctgtacgacgactggctgaagaccatcagcagctacaccgccttcagcagactgatcctgatcctgagagccctgcacgtgaacaacgacagagccaaggtgatcctgaagcccgacaagaccaccatcaccgagccccaccacatctggcccaccctgaccgacgaggagtggatcaaggtggaggtgcagctgaaggacctgatcctggccgactacggcaagaagaacaacgtgaacgtggccagcctgacccagagcgagatcagagacatcatcctgggcatggagatcagcgcccccagccagcagagacagcagatcgccgagatcgagaagcagaccaaggagcagagccagctgaccgccacccagaccagaaccgtgaacaagcacggcgacgagatcatcaccagcaccaccagcaactacgagacccagaccttcagcagcaagaccgagtggagagtgagagccatcagcgccgccaacctgcacctgagaaccaaccacatctacgtgagcagcgacgacatcaaggagaccggctacacctacatcctgcccaagaacgtgctgaagaagttcatctgcatcagcgacctgagagcccagatcgccggctacctgtacggcgtgagcccccccgacaacccccaggtgaaggagatcagatgcatcgtgatggtgccccagtggggcacccaccagaccgtgcacctgcccggccagctgccccagcacgagtacctgaaggagatggagcccctgggctggatccacacccagcccaacgagagcccccagctgagcccccaggacgtgaccacccacgccaagatcatggccgacaaccccagctgggacggcgagaagaccatcatcatcacctgcagcttcacccccggcagctgcaccctgaccgcctacaagctgacccccagcggctacgagtggggcagacagaacaccgacaagggcaacaaccccaagggctacctgcccagccactacgagagagtgcagatgctgctgagcgacagattcctgggcttcttcatggtgcccgcccagagcagctggaactacaacttcatgggcgtgagacacgaccccaacatgaagtacgagctgcagctggccaaccccaaggagttctaccacgaggtgcacagacccagccacttcctgaacttcgccctgctgcaggagggcgaggtgtacagcgccgacagagaggacctgtacgcctag

SEQ ID NO: 165224 - DNA, 1392 bp, Artificial Sequence
  derived and/or modified sequence
atgatccaggccctgggcggcgtggagggcatcctggagcacaccctgttcaagggcacctacttccccacctgggagggcctgttctgggagaaggccagcggcttcgaggagagcatgaagtggaagaagctgaccaacgcccagagaagcggcctgaaccagatccccaacagaagattcaccctgtggtggagccccaccatcaacagagccaacgtgtacgtgggcttccaggtgcagctggacctgaccggcatcttcatgcacggcaagatccccaccctgaagatcagcctgatccagatcttcagagcccacctgtggcagaagatccacgagagcatcgtgatggacctgtgccaggtgttcgaccaggagctggacgccctggagatcgagaccgtgcagaaggagaccatccaccccagaaagagctacaagatgaacagcagctgcgccgacatcctgctgttcgccagctacaagtggaacgtgagcagacccagcctgctggccgacagcaaggacgtgatggacagcaccaccacccagaagtactggatcgacatccagctgagatggggcgactacgacagccacgacatcgagagatacgccagagccaagttcctggactacaccaccgacaacatgagcatctaccccagccccaccggcgtgctgatcgccatcgacctggcctacaacctgcacagctacagcgaggtgggcagcctgcagcaggccagccacaccaccggcgccaagatcatgaaggccaaccccgccctgtacgtgctgagagagagaatcagaaagggcctgcagctgtacagcagcgagcccaccgagccctacctgagcagccagaactacggcgagctgttcagcaaccagatcatctggttcgtggacgacaccaacgtgtacagagtgaccatccacaagaccttcgagggcaacctgaccaccaagcccatcaacggcgccatcttcatcttcaaccccagaaccggccagctgttcctgaagatcatccacaccagcgtgtgggccggccagaagagactgggccagctggccaagtggaagaccgccgaggaggtggccgccctgatcagaagcctgcccgtggaggagcagcccaagcagatcatcgtgaccagaaagggcatgctggaccccctggaggtgcacctgctggacttccccaacatcgtgatcaagggcagcgagctgcagctgcccttccaggcctgcctgaaggtggagaagttcggcgacctgatcctgaaggccaccgagccccagatggtgctgttcaacctgtacgacgactggctgaagaccatcagcagctacaccgccttcagcagactgatcctgtag

SEQ ID NO: 165225 - protein, 691 aa, Artificial Sequence
  derived and/or modified sequence
MDQNQHLNKTAEAQPSENKKTRYCNGLKMFLAALSLSFIAKTLGAIIMKSSIIHIERRFEISSSLVGFIDGSFEIGNLLVIVFVSYFGSKLHRPKLIGIGCFIMGIGGVLTALPHFFMGYYRYSKETNINSSENSTSTLSTCLINQILSLNRASPEIVGKGCLKESGSYMWIYVFMGNMLRGIGETPIVPLGLSYIDDFAKEGHSSLYLGILNAIAMIGPIIGFTLGSLFSKMYVDIGYVDLSTIRITPTDSRWVGAWWLNFLVSGLFSIISSIPFFFLPQTPNKPQKERKASLSLHVLETNDEKDQTANLTNQGKNITKNVTGFFQSFKSILTNPLYVMFVLLTLLQVSSYIGAFTYVFKYVEQQYGQPSSKANILLGVITIPIFASGMFLGGYIIKKFKLNTVGIAKFSCFTAVMSLSFYLLYFFILCENKSVAGLTMTYDGNNPVTSHRDVPLSYCNSDCNCDESQWEPVCGNNGITYISPCLAGCKSSSGNKKPIVFYNCSCLEVTGLQNRNYSAHLGECPRDDACTRKFYFFVAIQVLNLFFSALGGTSHVMLIVKIVQPELKSLALGFHSMVIRALGGILAPIYFGALIDTTCIKWSTNNCGTRGSCRTYNSTSFSRVYLGLSSMLRVSSLVLYIILIYAMKKKYQEKDINASENGSVMDEANLESLNKNKHFVPSAGADSETHC

SEQ ID NO: 165226 - DNA, 2076 bp, Artificial Sequence
  derived and/or modified sequence
atggaccagaaccagcacctgaacaagaccgccgaggcccagcccagcgagaacaagaagaccagatactgcaacggcctgaagatgttcctggccgccctgagcctgagcttcatcgccaagaccctgggcgccatcatcatgaagagcagcatcatccacatcgagagaagattcgagatcagcagcagcctggtgggcttcatcgacggcagcttcgagatcggcaacctgctggtgatcgtgttcgtgagctacttcggcagcaagctgcacagacccaagctgatcggcatcggctgcttcatcatgggcatcggcggcgtgctgaccgccctgccccacttcttcatgggctactacagatacagcaaggagaccaacatcaacagcagcgagaacagcaccagcaccctgagcacctgcctgatcaaccagatcctgagcctgaacagagccagccccgagatcgtgggcaagggctgcctgaaggagagcggcagctacatgtggatctacgtgttcatgggcaacatgctgagaggcatcggcgagacccccatcgtgcccctgggcctgagctacatcgacgacttcgccaaggagggccacagcagcctgtacctgggcatcctgaacgccatcgccatgatcggccccatcatcggcttcaccctgggcagcctgttcagcaagatgtacgtggacatcggctacgtggacctgagcaccatcagaatcacccccaccgacagcagatgggtgggcgcctggtggctgaacttcctggtgagcggcctgttcagcatcatcagcagcatccccttcttcttcctgccccagacccccaacaagccccagaaggagagaaaggccagcctgagcctgcacgtgctggagaccaacgacgagaaggaccagaccgccaacctgaccaaccagggcaagaacatcaccaagaacgtgaccggcttcttccagagcttcaagagcatcctgaccaaccccctgtacgtgatgttcgtgctgctgaccctgctgcaggtgagcagctacatcggcgccttcacctacgtgttcaagtacgtggagcagcagtacggccagcccagcagcaaggccaacatcctgctgggcgtgatcaccatccccatcttcgccagcggcatgttcctgggcggctacatcatcaagaagttcaagctgaacaccgtgggcatcgccaagttcagctgcttcaccgccgtgatgagcctgagcttctacctgctgtacttcttcatcctgtgcgagaacaagagcgtggccggcctgaccatgacctacgacggcaacaaccccgtgaccagccacagagacgtgcccctgagctactgcaacagcgactgcaactgcgacgagagccagtgggagcccgtgtgcggcaacaacggcatcacctacatcagcccctgcctggccggctgcaagagcagcagcggcaacaagaagcccatcgtgttctacaactgcagctgcctggaggtgaccggcctgcagaacagaaactacagcgcccacctgggcgagtgccccagagacgacgcctgcaccagaaagttctacttcttcgtggccatccaggtgctgaacctgttcttcagcgccctgggcggcaccagccacgtgatgctgatcgtgaagatcgtgcagcccgagctgaagagcctggccctgggcttccacagcatggtgatcagagccctgggcggcatcctggcccccatctacttcggcgccctgatcgacaccacctgcatcaagtggagcaccaacaactgcggcaccagaggcagctgcagaacctacaacagcaccagcttcagcagagtgtacctgggcctgagcagcatgctgagagtgagcagcctggtgctgtacatcatcctgatctacgccatgaagaagaagtaccaggagaaggacatcaacgccagcgagaacggcagcgtgatggacgaggccaacctggagagcctgaacaagaacaagcacttcgtgcccagcgccggcgccgacagcgagacccactgctag

SEQ ID NO: 165227 - DNA, 2076 bp, Artificial Sequence
  derived and/or modified sequence
atggatcagaaccaacatctgaacaagacagccgaagcccagccttctgagaataagaaaacacggtattgcaacggattgaaaatgttcctcgctgcgttgtctctgagctttatagccaagacattaggagccatcatcatgaaaagtagcattatccatatcgaacggcggtttgaaattagtagtagcctggtggggttcatcgacggatcgtttgaaataggtaatctccttgtgatagtgtttgtgtcctactttgggtcaaagctgcatcggcctaagctgataggcattggctgcttcatcatgggaattgggggcgtcctcaccgctttgcctcatttctttatgggctactataggtactctaaagaaacaaacattaactccagcgagaactccaccagtaccctgagcacctgcctgattaatcagatactgagtctgaatcgggctagccctgagattgtgggaaagggatgtctgaaggagtctggaagctatatgtggatctacgtatttatgggcaatatgctgcgagggattggagaaactcctatcgtcccacttggcttgtcatacattgacgattttgccaaggaggggcactccagtctctacctcggcattctgaatgcaattgctatgattgggcctatcattgggttcaccctcggttctcttttttctaagatgtatgtggatatcgggtatgtagatctctccacgatccggattactccaacagattccaggtgggtgggagcttggtggcttaatttcctcgtgtctggtcttttctctataatctccagtattcctttttttttcctgccccagacacctaacaagccccagaaggaaaggaaggcatccctgtctttgcatgtcctggaaactaacgatgaaaaagaccagactgccaacctcactaaccaaggcaagaacatcaccaaaaacgttaccggattttttcagagcttcaagtccattctgactaatcctctgtatgtaatgtttgtcttgctgacacttttgcaagtcagctcttatattggcgcgtttacctacgtttttaaatacgtggagcaacaatatggccagccatcgtccaaagccaacatactcctcggggtgatcacaattcccatcttcgccagcggcatgtttctgggtggctatatcataaagaaattcaaacttaacacggtcggtattgctaagttttcatgcttcacagccgtgatgagtttatcgttttacctgttatacttctttattctctgcgagaataaaagcgtggccggtctcacaatgacatacgacgggaacaatcctgtcacctcacatcgcgacgttcctctgagctactgcaatagcgactgcaactgcgacgaatcccagtgggagccagtttgcggcaacaatggcatcacctacattagtccctgcctggcgggttgcaagagctctagcgggaataagaaacctatagtattttataactgtagctgtctggaagtgactggtttgcaaaatcgtaattattcagcacacctcggcgaatgccctcgggacgatgcctgcacacgaaagttctatttcttcgtggccatacaggttttaaacctgtttttctccgccctgggcgggacctcccacgttatgctgatcgtgaagattgtacagcctgagctcaagtcattagcattgggctttcactccatggtgattcgggcactggggggcattctagccccaatatacttcggtgccctaatcgatacaacttgtattaagtggtcaacgaacaactgcggcacaaggggcagctgcagaacatacaattcaaccagtttctcaagagtgtacctgggactatcttccatgctgagggtgtcctctctagtgctctacatcattctgatctacgccatgaagaaaaagtatcaggagaaggatattaacgcctcagagaacggctccgtaatggatgaagccaacttggagagcctgaacaagaataagcactttgtgccctcagccggagcggatagcgaaactcactgttag

SEQ ID NO: 165228 - DNA, 2076 bp, Artificial Sequence
  derived and/or modified sequence
atggaccagaaccagcacctgaacaagacagctgaggcccagcccagcgagaacaagaagacccgctactgcaatggcctgaagatgttcctggccgccctgagcctgtccttcatcgccaagaccctgggcgccatcatcatgaagagcagcatcatccacattgaaagaagatttgagatcagcagcagcctggtgggcttcattgatggcagctttgaaattggcaacctgctggtgattgtgtttgtgtcctacttcggcagcaagctgcaccggcccaagctgattggaattggctgcttcatcatgggcatcggcggcgtgctgacagccctgccccacttcttcatgggctactaccgctacagcaaggagaccaacatcaacagcagcgagaacagcaccagcaccctgagcacctgcctgatcaaccagatcctgagcctgaacagagccagccctgagatcgtgggcaagggctgcctgaaggagagcggcagctacatgtggatctacgtgttcatgggcaacatgctgcggggcattggagagacccccatcgtgcccctgggcctgagctacattgatgactttgccaaggagggccacagcagcctgtacctgggcatcctgaatgccatcgccatgattggccccatcatcggcttcaccctgggcagcctcttcagcaagatgtatgtggacatcggctacgtggacctgagcaccatccgcatcacccccacagacagccgctgggtgggcgcctggtggctgaacttcctggtgtctggcctcttcagcatcatcagcagcatccccttcttcttcctgccccagacccccaacaagccccagaaggagaggaaggccagcctgagcctgcacgtgctggagaccaatgatgagaaggaccagacagccaacctgaccaaccagggcaagaacatcaccaagaatgtgacaggcttcttccagagcttcaagagcatcctgaccaaccccctgtatgtgatgtttgtgctgctgaccctgctgcaggtgtcctcctacatcggggccttcacctacgtgttcaagtatgtggagcagcagtatggccagcccagcagcaaggccaacatcctgctgggcgtcatcaccatccccatctttgccagcggcatgttcctgggcggctacatcatcaagaagttcaagctgaacacagtgggcatcgccaagttcagctgcttcaccgctgtgatgagcctgtccttctacctgctgtacttcttcatcctgtgtgagaacaagtctgtggccggcctgaccatgacctatgatggcaacaaccctgtgaccagccacagagatgtgcccctgagctactgcaacagcgactgcaactgtgatgagagccagtgggagcctgtgtgtggcaacaacggcatcacctacatcagcccctgcctggccggctgcaagagcagcagcggcaacaagaagcccatcgtgttctacaactgcagctgcctggaggtgacaggcctgcagaacagaaactacagcgcccacctgggagaatgtcccagagatgatgcctgcaccaggaagttctacttctttgtggccatccaggtgctgaacctcttcttcagcgccctgggcggcaccagccacgtgatgctgattgtgaagatcgtgcagcctgagctgaagagcctggccctgggcttccacagcatggtgatccgggccctgggcggcatcctggcccccatctactttggagccctgattgacaccacctgcatcaagtggagcaccaacaactgtggcacccggggcagctgcaggacctacaacagcaccagcttcagccgggtgtacctgggcctgagctccatgctgcgggtgagcagcctggtgctgtacatcatcctgatctatgccatgaagaagaagtaccaggagaaggacatcaatgcctctgaaaatggatctgtgatggatgaggccaacctggagagcctgaacaagaacaagcactttgtgcccagcgctggagctgacagcgagacccactgctag

SEQ ID NO: 165229 - DNA, 2076 bp, Artificial Sequence
  derived and/or modified sequence
atggaccagaaccagcacctgaacaagaccgccgaggcccagcccagtgagaataagaaaactcgctactgcaatggcctgaaaatgttcctcgcagctctgagcttgtcattcatcgctaagaccctgggcgcaattataatgaagtcctctattatacacattgaacggcgttttgagatcagctcctccctcgttggcttcattgatggcagcttcgaaatagggaacctcctggttatcgttttcgtgagctacttcggaagcaagctgcacagaccaaagctgattggaatagggtgttttatcatggggatcggaggagtcctaactgctctaccgcactttttcatgggatattatcgctacagtaaggagactaacattaatagctctgagaacagtacctcaacactctccacatgcctgatcaatcaaatactatcactgaaccgggcgagcccggagatagtggggaaggggtgtctcaaggaatctggctcctatatgtggatctacgttttcatgggcaacatgctccggggtataggggagaccccaatagtgcctctggggctcagttatattgatgattttgccaaggagggacacagcagcctctaccttgggattcttaacgcgatcgcaatgattggccctatcattgggtttacgctgggcagtctcttttcgaagatgtacgtggatatagggtatgttgacctgtcaacaattcgtatcaccccaactgattctcggtgggtgggagcatggtggctcaacttcttggtgagcgggctgttcagcatcatcagctcgattcccttcttcttcctcccgcagacccctaataaaccccagaaagagcggaaggcttccctgtccctgcacgtacttgaaacaaatgatgaaaaagatcagacagcgaacctgaccaaccagggtaaaaatatcacaaagaacgtcaccggcttctttcaaagttttaagtctattctgaccaaccccctgtacgtgatgttcgttctgctgacactcctccaggtgtcttcatatatcggcgcgtttacgtacgtctttaagtatgttgagcagcaatatggccagccaagctctaaggccaacattctactgggcgtaataacgatccctatctttgctagtgggatgttcctgggggggtatattataaaaaaattcaagctaaataccgtggggatcgctaagttcagctgcttcaccgctgtaatgagcctctccttctatcttctgtacttctttatcctgtgcgagaataagtccgtggccggtttgacaatgacatacgacggaaataaccctgtgacttcacatcgtgatgtgccactgagttactgcaactctgactgtaactgtgatgaaagccaatgggaacctgtctgtggcaataatgggatcacctacatctcgccctgtttggccggctgtaaatccagctcaggaaataaaaagcccatcgtgttctataactgtagttgccttgaggtgacaggtttacagaaccgcaattacagtgctcaccttggagagtgtcctcgggatgacgcctgcacaaggaaattctattttttcgtagcgatccaggtgctgaatctcttcttttcagccctggggggcacctctcacgtgatgctcatcgtcaagattgtccagccggagcttaaatccctggcacttgggttccactccatggttatcagagctctgggagggatacttgctccaatctatttcggagccttgatcgataccacctgcatcaagtggtccactaacaattgcggcactcggggcagttgcagaacctataactctacctccttctcacgtgtctatttggggctgtcgagcatgctgagagtctccagcctggtgctttacataatcctgatctacgccatgaagaagaagtaccaggagaaggacatcaacgctagtgagaacggttcggtaatggatgaggccaacttggagtccctgaataaaaacaagcactttgtgcccagtgccggtgcagacagtgagacacactgctag

SEQ ID NO: 165230 - DNA, 2076 bp, Artificial Sequence
  derived and/or modified sequence
atggaccaaaatcagcatttgaacaaaacagcggaggctcagcccagcgagaataaaaaaacgagatactgtaacggactcaaaatgtttctggctgcattatctcttagctttatcgcgaagaccttgggggcaatcattatgaaatcttccattattcacatagagcgcaggtttgagatcagctcatcccttgtgggattcatcgatgggagtttcgagattggaaatctgctagtgattgtgttcgtgagctattttggaagtaaattgcatcgccctaagttgatcgggattggttgtttcataatgggaatagggggagtcctgaccgccctcccacatttttttatgggatattaccggtactctaaggagaccaacatcaatagtagcgagaattctactagcaccctgagtacctgcctgattaaccagatcctgtccttgaaccgtgctagccccgagattgtcgggaagggatgcctgaaggagtctggtagctacatgtggatttacgtctttatggggaacatgttacgtgggataggggaaaccccgatcgtgcctctgggactaagctatatcgacgacttcgcgaaggaaggtcattcctctctctatctgggaattctcaatgctatcgccatgatcggcccaataattggattcacactgggatcactgttttccaaaatgtacgtagacatcgggtacgtggacctgtctactatccgtatcacccctaccgatagccggtgggtcggggcatggtggctgaacttcttagtctccgggctgttttcgattatttcatctattccctttttctttctccctcagacgcccaacaagccccagaaggagcgaaaggccagcttgagtctgcacgttttagagaccaatgatgagaaagatcagaccgctaatctgaccaaccagggcaaaaacattactaagaacgtgacaggctttttccagtcttttaaatctatcttaactaacccactgtacgtgatgtttgtgctgctgacactcctacaggtgtcatcttatatcggcgcttttacctatgtatttaaatacgtggagcagcaatacggtcagccaagttcaaaagcgaatatcctgctgggggtgattaccatccctatatttgcgtccgggatgtttctgggcggatacatcatcaagaaatttaagctgaacactgtcggtatcgccaagtttagctgcttcacagccgtgatgagcctttctttctacctcctgtactttttcatcttatgtgagaataaaagcgtggcaggcttaaccatgacctacgatggaaacaaccctgtgactagtcaccgcgatgtccctcttagttattgtaacagtgactgcaactgcgatgaaagtcagtgggagcctgtatgcggcaacaatggtatcacctatatcagtccttgtctcgctgggtgcaagagctccagtggcaataagaagcctatagttttttataattgctcctgtctcgaggtgaccggcctacagaatcgtaactattcagcacatctgggcgaatgccctagggatgatgcctgcactcggaaattctacttctttgtggccatacaggtcctcaacctgttttttagcgcattaggcggaacttcccacgttatgctgattgttaaaattgttcagcctgagttaaaatccctggccttagggtttcactccatggtaatcagagcactcggtggcatcctggctcccatctatttcggcgcacttattgacacaacttgcattaagtggtctaccaacaactgcggcacccgaggatcatgtcgaacttacaattccacttccttctcgcgcgtctacctgggtctctcatccatgctcagggtatcatctctggttctatatattatcctcatatatgccatgaagaagaaataccaagaaaaggacattaacgcctccgagaatggatcggtgatggatgaggcaaacttggagtccctgaataaaaacaaacattttgtcccatcagcgggagcggacagcgaaacacactgctag

SEQ ID NO: 165231 - DNA, 2229 bp, Artificial Sequence
  derived and/or modified sequence
gacttgttgcagttgctgtaggattctaaatccaggtgattgtttcaaactgagcatcaacaacaaaaacatttgtatgatatctatatttcaatcatggaccaaaatcaacatttgaataaaacagcagaggcacaaccttcagagaataagaaaacaagatactgcaatggattgaagatgttcttggcagctctgtcactcagctttattgctaagacactaggtgcaattattatgaaaagttccatcattcatatagaacggagatttgagatatcctcttctcttgttggttttattgacggaagctttgaaattggaaatttgcttgtgattgtatttgtgagttactttggatccaaactacatagaccaaagttaattggaatcggttgtttcattatgggaattggaggtgttttgactgctttgccacatttcttcatgggatattacaggtattctaaagaaactaatatcaattcatcagaaaattcaacatcgaccttatccacttgtttaattaatcaaattttatcactcaatagagcatcacctgagatagtgggaaaaggttgtttaaaggaatctgggtcatacatgtggatatatgtgttcatgggtaatatgcttcgtggaataggggagactcccatagtaccattggggctttcttacattgatgatttcgctaaagaaggacattcttctttgtatttaggtatattgaatgcaatagcaatgattggtccaatcattggctttaccctgggatctctgttttctaaaatgtacgtggatattggatatgtagatctaagcactatcaggataactcctactgattctcgatgggttggagcttggtggcttaatttccttgtgtctggactattctccattatttcttccataccattctttttcttgccccaaactccaaataaaccacaaaaagaaagaaaagcttcactgtctttgcatgtgctggaaacaaatgatgaaaaggatcaaacagctaatttgaccaatcaaggaaaaaatattaccaaaaatgtgactggttttttccagtcttttaaaagcatccttactaatcccctgtatgttatgtttgtgcttttgacgttgttacaagtaagcagctatattggtgcttttacttatgtcttcaaatacgtagagcaacagtatggtcagccttcatctaaggctaacatcttattgggagtcataaccatacctatttttgcaagtggaatgtttttaggaggatatatcattaaaaaattcaaactgaacaccgttggaattgccaaattctcatgttttactgctgtgatgtcattgtccttttacctattatattttttcatactctgtgaaaacaaatcagttgccggactaaccatgacctatgatggaaataatccagtgacatctcatagagatgtaccactttcttattgcaactcagactgcaattgtgatgaaagtcaatgggaaccagtctgtggaaacaatggaataacttacatctcaccctgtctagcaggttgcaaatcttcaagtggcaataaaaagcctatagtgttttacaactgcagttgtttggaagtaactggtctccagaacagaaattactcagcccatttgggtgaatgcccaagagatgatgcttgtacaaggaaattttacttttttgttgcaatacaagtcttgaatttatttttctctgcacttggaggcacctcacatgtcatgctgattgttaaaattgttcaacctgaattgaaatcacttgcactgggtttccactcaatggttatacgagcactaggaggaattctagctccaatatattttggggctctgattgatacaacgtgtataaagtggtccaccaacaactgtggcacacgtgggtcatgtaggacatataattccacatcattttcaagggtctacttgggcttgtcttcaatgttaagagtctcatcacttgttttatatattatattaatttatgccatgaagaaaaaatatcaagagaaagatatcaatgcatcagaaaatggaagtgtcatggatgaagcaaacttagaatccttaaataaaaataaacattttgtcccttctgctggggcagatagtgaaacacattgttaaggggagaaaaaaagccacttctgcttctgtgtttccaaacagcattgcattgattca

SEQ ID NO: 165232 - protein, 254 aa, Artificial Sequence
  derived and/or modified sequence
MPAKTPIYLKAANNKKGKKFKLRDILSPDMISPPLGDFRHTIHIGKEGQHDVFGDISFLQGNYELLPGNQEKAHLGQFPGHNEFFRANSTSDSVFTETPSPVLKNAISLPTIGGSQALMLPLLSPVTFNSKQESFGPAKLPRLSCEPVMEEKAQEKSSLLENGTVHQGDTSWGSSGSASQSSQGRDSHSSSLSEQYPDWPAEDMFDHPTPCELIKGKTKSEESLSDLTGSLLSLQLDLGPSLLDEVLNVMDKNK

SEQ ID NO: 165233 - protein, 14 aa, Artificial Sequence
  derived and/or modified sequence
MPAKTPIYLKAANN

SEQ ID NO: 165234 - protein, 35 aa, Artificial Sequence
  derived and/or modified sequence
MPAKTPIYLKAANNKKGKKFKLRDILSPDMISPPL

SEQ ID NO: 165235 - protein, 216 aa, Artificial Sequence
  derived and/or modified sequence
MPAKTPIYLKAANNKKGKKFKLRDILSPDMISPPLGDFRHTIHIGKEGQHDVFGDISFLQGNYELLPGNQEKAHLGQFPGHNEFFRANSTSDSVFTETPSPVLKNAISLPTIGGSQALMLPLLSPVTFNSKQESFGPAKLPRLSCEPVMEEKAQEKSSLLENGTVHQGDTSWGSSGSASQSSQGRDSHSSSLSEQYPDWPAEDMFDHPTPCELIKG

SEQ ID NO: 165236 - DNA, 765 bp, Artificial Sequence
  derived and/or modified sequence
atgcccgcaaaaacacctatatacttaaaggcagctaacaataaaaaaggtaaaaaatttaagctgcgcgatatcctgtcacccgatatgatcagtcctcccttgggggattttagacatactattcatataggcaaggagggccagcacgacgtgtttggggacatttccttcttacagggcaactacgagctccttccgggcaatcaggagaaagcccacctcggtcagttcccggggcataatgagttctttagggctaattctacgagtgacagtgtgtttactgaaactcctagtcccgtgttgaaaaatgctatatctctgccaactatcggggggagccaggccctaatgctgccactgcttagccccgtcacctttaactcgaagcaagagagctttggacctgctaaactgcctaggcttagttgcgaaccagtgatggaggaaaaggcccaggagaaatcttctctcctagagaacggaacagtgcaccagggagacacctcctggggttcttctgggtcggcttcccaatccagccaagggcgcgattcacatagcagttccctgtccgagcagtacccagattggccagccgaagacatgttcgaccaccccacaccctgtgagctgatcaaaggtaagaccaaatcggaagagagcctcagcgacctgacaggatcccttctgtcacttcaactggacctcgggcccagcctcctggatgaagtgttaaacgttatggacaaaaataagtag

SEQ ID NO: 165237 - DNA, 45 bp, Artificial Sequence
  derived and/or modified sequence
atgccagccaaaacaccgatttacttgaaagcggccaacaattag

SEQ ID NO: 165238 - DNA, 108 bp, Artificial Sequence
  derived and/or modified sequence
atgcccgccaaaacaccaatttacttaaaggccgccaacaataagaaaggcaagaaatttaaactgcgcgatatcctgtcccccgacatgatcagcccgcctctttag

SEQ ID NO: 165239 - DNA, 651 bp, Artificial Sequence
  derived and/or modified sequence
atgccagccaagactcctatttatcttaaggctgcaaacaataaaaaaggcaaaaaattcaagttacgcgatatcctatctcccgacatgatttcccctcctctgggcgattttaggcacactatccacatcgggaaggagggccagcacgacgttttcggcgacatctccttcctccagggaaactacgagctgcttcctggcaaccaggaaaaggcacacctgggacagttcccaggacataatgagtttttccgcgcaaacagtacttctgactcagtattcactgaaacaccaagtcctgttctcaagaacgccattagtctgcctactattggaggttcacaggctcttatgctgccattgctatctcccgtgacattcaacagtaagcaggagtctttcgggcctgccaagttaccgcgtctctcctgcgaacccgtgatggaagagaaggcccaggagaagtcatcccttctggagaatgggactgttcaccagggggacaccagctggggctccagtggctcagcctcccagagctctcaagggagagatagtcattcctcatccctttctgagcagtacccggactggccagcggaggatatgtttgaccaccccactccctgtgagctgataaagggttag

SEQ ID NO: 165240 - DNA, 765 bp, Artificial Sequence
  derived and/or modified sequence
atgcctgccaagacccccatctacctgaaggccgccaacaacaagaagggcaagaagttcaagctgcgggacatcctgagcccagacatgatcagcccccccctgggggacttccgccacaccatccacatcggcaaggagggccagcatgatgtgtttggagacatctccttcctgcagggcaactatgagctgctgcccggcaaccaggagaaggcccacctgggccagtttcctggccacaatgagttcttccgggccaacagcaccagtgacagcgtcttcacagagacccccagccctgtgctgaagaatgccatcagcctgcccaccatcggcggcagccaggccctgatgctgcccctgctgagccctgtgaccttcaacagcaagcaggagagctttggacctgccaagctgccccggctgagctgtgagcctgtgatggaggagaaggcccaggagaagagcagcctgctggagaatggcaccgtgcaccagggcgacacctcctggggcagcagcggcagcgccagccagagcagccagggccgggacagccacagcagcagcctgtctgagcagtacccagactggccagctgaggacatgtttgaccaccccaccccctgtgagctgatcaagggcaagaccaagtctgaggagagcctgagtgacctgaccggcagcctgctgagcctgcagctggacctgggccccagcctgctggatgaggtgctgaatgtgatggacaagaacaagtag

SEQ ID NO: 165241 - DNA, 45 bp, Artificial Sequence
  derived and/or modified sequence
atgcctgccaagacccccatctacctgaaggccgccaacaactag

SEQ ID NO: 165242 - DNA, 108 bp, Artificial Sequence
  derived and/or modified sequence
atgcctgccaagacccccatctacctgaaggccgccaacaacaagaagggcaagaagttcaagctgcgggacatcctgagcccagacatgatcagcccccccctgtag

SEQ ID NO: 165243 - DNA, 651 bp, Artificial Sequence
  derived and/or modified sequence
atgcctgccaagacccccatctacctgaaggccgccaacaacaagaagggcaagaagttcaagctgcgggacatcctgagcccagacatgatcagcccccccctgggggacttccgccacaccatccacatcggcaaggagggccagcatgatgtgtttggagacatctccttcctgcagggcaactatgagctgctgcccggcaaccaggagaaggcccacctgggccagtttcctggccacaatgagttcttccgggccaacagcaccagtgacagcgtcttcacagagacccccagccctgtgctgaagaatgccatcagcctgcccaccatcggcggcagccaggccctgatgctgcccctgctgagccctgtgaccttcaacagcaagcaggagagctttggacctgccaagctgccccggctgagctgtgagcctgtgatggaggagaaggcccaggagaagagcagcctgctggagaatggcaccgtgcaccagggcgacacctcctggggcagcagcggcagcgccagccagagcagccagggccgggacagccacagcagcagcctgtctgagcagtacccagactggccagctgaggacatgtttgaccaccccaccccctgtgagctgatcaagggctag

SEQ ID NO: 165244 - DNA, 765 bp, Artificial Sequence
  derived and/or modified sequence
atgcccgccaagacccccatctacctgaaggccgccaacaacaagaagggtaagaaatttaaattaagggacattctgagtccagatatgatttcacctccattgggtgatttcaggcacacaattcacattggaaaagaaggacagcacgacgtgtttggtgacattagcttcctccaagggaactacgaattactgcctggtaatcaggaaaaagcgcacctggggcagttcccaggacacaacgaattcttccgtgccaactcaacctctgactcagtctttacggagaccccatcaccagtgctgaagaatgctatttcactgcccacaattggaggatcacaggcattgatgctgccactcctgagtccagtcacattcaacagcaagcaggagagtttcggacctgctaaactgcccagactcagctgtgaaccagtaatggaggaaaaggcccaggagaaatcgagcctattggaaaacggcaccgtgcatcagggggacacaagctggggctcgtccggttcagcaagccagtcttcacagggaagggactcacactcctcatcactctctgaacagtacccagactggcctgcagaggatatgttcgatcatcctaccccctgcgaactcatcaaaggtaagacgaagtccgaggagagtctcagcgatctcaccggcagcctcctgtccctgcagttggacctggggccgagcctgctcgatgaggtcttgaacgttatggacaaaaataaatag

SEQ ID NO: 165245 - DNA, 108 bp, Artificial Sequence
  derived and/or modified sequence
atgcccgccaagacccccatctacctgaaggccgccaacaacaagaaaggcaaaaagttcaagctgagagatatactctcaccagacatgatcagccctccgctgtag

SEQ ID NO: 165246 - DNA, 651 bp, Artificial Sequence
  derived and/or modified sequence
atgcccgccaagacccccatctacctgaaggccgccaacaacaagaaagggaagaagttcaaactgcgcgacattctgtcgccagacatgatctcccctccactcggggatttcagacacacaatccatataggaaaagaaggccaacacgacgtctttggcgatattagcttcttgcagggcaattacgagttactccctggcaaccaagagaaagctcacctgggacagttcccaggacataatgaatttttcagagccaacagtactagcgactccgtgtttacagaaaccccctcaccagtgcttaagaacgcaattagcctgccaaccatcggaggttcccaggccttaatgctccccctcctgtccccagtcacattcaactcaaagcaagaatcctttggaccagctaaattacctcgtctgtcatgcgagcctgtaatggaagagaaagcacaggaaaaatcctccctgttggaaaatggcaccgtgcatcaaggagacacatcgtggggttctagcgggtccgctagtcaaagctcccaggggagagattcacactcaagctccctgagcgagcagtatccagattggccggctgaagacatgtttgaccacccaaccccatgtgagctgatcaagggttag

SEQ ID NO: 165247 - DNA, 765 bp, Artificial Sequence
  derived and/or modified sequence
atgcctgccaaaactccgatatatctgaaggccgctaacaataagaagggcaagaagttcaagttacgagatatactgagcccggatatgatctctccccctctgggagattttcggcacacgatccacattgggaaagaaggccagcacgatgttttcggggatatctcattcctccaggggaattatgaactgctccctggcaatcaggagaaggctcacctgggacagtttccaggccataatgaattcttccgggctaactctacgagtgactcagtatttacggaaaccccttcaccagtgctgaagaacgcaatttctctgcccacaatcggcggatcccaggcccttatgctgcccttgctttctccagtgacattcaactccaaacaggaatcttttggtccggctaaactgcctcgcctgtcatgcgaacctgtgatggaagagaaggcgcaggagaaatcttccttacttgagaatgggaccgtccaccagggggatacctcctggggctcttcaggctctgcctcacagagtagccagggcagggacagtcattctagttctctcagcgagcaataccccgattggccggcagaagatatgtttgaccatcctactccttgtgaattgatcaaaggcaaaacaaaaagtgaggagtcactcagtgacctgaccggctctctcctgtctctgcagctggacttgggtccctctctgctggacgaggtcctgaacgtgatggataaaaacaaatag

SEQ ID NO: 165248 - DNA, 45 bp, Artificial Sequence
  derived and/or modified sequence
atgcccgctaagacacccatctatttgaaggctgctaataactag

SEQ ID NO: 165249 - DNA, 108 bp, Artificial Sequence
  derived and/or modified sequence
atgcccgcaaaaaccccaatctatctgaaggctgccaacaacaaaaaagggaagaagttcaagctgagagatatcctgtcaccagatatgattagcccaccactgtag

SEQ ID NO: 165250 - DNA, 651 bp, Artificial Sequence
  derived and/or modified sequence
atgccagccaaaaccccaatttaccttaaggcagcaaacaacaaaaagggcaagaaattcaagctgagggatattctgtctccggacatgatatccccgccactgggagattttaggcacacaattcacatagggaaggaaggtcaacacgacgtgtttggagatatcagctttctgcagggaaattacgagctgctcccaggcaaccaagaaaaagctcacctgggacagttccctggccacaatgagttcttcagagccaactccacgagcgattcagtgttcacagagaccccttccccggtgctgaagaatgccataagtctgcccactatcggcggaagtcaggcccttatgctgcccttgctaagccctgtgacctttaattctaaacaggaatcttttggcccagctaagctacctagactgtcctgcgagcccgtgatggaggaaaaagcccaggagaaatcttccctgcttgagaatggcaccgtgcaccagggtgacacttcatggggctcttctggatctgcatcacagtcctcacaggggcgagattcccattcatcctccttatctgagcaataccctgactggcccgcagaggacatgtttgatcacccgacaccctgcgagctgattaaggggtag

SEQ ID NO: 165251 - DNA, 5700 bp, Artificial Sequence
  derived and/or modified sequence
ccggagcccgggctgagagggacctggggagctgcggcctggccggggcggcgcactcaggtggcctcgcttccctgcgggtcaccgcccgccactcgcacagctaggtcggcctgttgggatcgggagaggtgggcgcacgagttttagtgcgggagtccggggtgcgggcggagtcctattgtccccgtgcacccgggcggcagcacctccgggtccctctttaaaccgagcgtccggcgacctttctttgtgcttagggagtcgaaagcggcatcttctccgagagaagtcgcctactggggggtggcgctggggaggtaacaatgggcgcccattgtcctccgagggtccaacggtgacccccccccgcgcgcgcgcccggccaccggttggccccgggccagggcacaggtaccgcggctgggagggtcggccccgctgcccgcgccctccgccccgccccagtgagtccccgcgccgccggccccgccccgcgccgccccgccctccgcaggttcagtcctcgcgtccggccgccccgcgctcagtcgcgcgcaccttctctcgcggccgggggaccgcagcgcggggctagcccggagacccggccaccggcctggggcgccttcacgccgtctcggagcggataatgcggtgagcaggcaccacgccggcagactcggctggatctgcgcacagcggcagggattgcgtgcgcccgcgggaggcccggggcagcggctgggatcctcagcggcggccggtttgtcctggttgtggtcaagactggatgatgtaactggctctctaggaagcctcacttggccgtaacctcaggaaggttctctttgaccccatctcatttcgaagccacttctgaagccacttgagaaaaatgatgtgacagttcctatcaaaaaggattcagaaacatataccatctgtgaagaaagtggccctttctcccgcttgcaaaatagacattctcaaattccaaaatgccagccaagaccccaatttacctgaaagcagccaataacaagaaaggaaagaaatttaaactgagggacattctgtctcctgatatgatcagtcccccgcttggagactttcgccacaccatccacattggcaaagagggccagcacgatgtctttggagatatttcctttcttcaagggaactacgagcttttacctggaaaccaggagaaagcacacctgggccagttccctgggcataatgagttcttccgggccaacagcacctcggactctgtgttcacagaaacgccctccccggtgctcaaaaatgccatctccctcccgaccattggaggatcccaagctctcatgttgcccttattgtcaccagtgacatttaattccaaacaggagtccttcgggccagcaaagctgcccaggcttagctgcgagcccgtcatggaggaaaaagctcaggagaaaagcagtctgttggagaatgggacagtccaccagggagacacctcgtggggctccagcggttctgcatctcagtccagccaaggcagagacagccactcctccagcctgtccgaacagtaccccgactggccagccgaggacatgtttgaccatcccaccccatgcgagctcatcaagggaaagactaagtcagaggagtccctctctgaccttacaggttccctcctctccctgcagcttgatcttgggccctcacttttggatgaggtgctgaatgtaatggataaaaataagtaacaagatgccaacttttttcctttggggtaaaaggtacaaaaacaaactaaccacagttgaagagaagggcttccggagctgtatttgcagttttgtgttgggttttctaaaataatattcttacaaagtatttttttacctgttatgccctgtttgcaaaaacaatttagaaaaaaacaacaaagcaaaacctatcttggcaaaaaaaggaagtgagtcagagcccattttcaggaggcattggtgatgttcggctcacatattgtttgcagacacacaagaaatctggcttggccaggattggcactagctatgaagggctgagcgagtcacattaaggaacttcacggaactttatagcactccgacattttctgagcaagaggaagtcaaaatttatttaacacctaagcctttttgtagactcttttctatatattgcttaggctcaccatagcgaattctccagtgttaaaacttttctgttttcacatttgaactttatgggttttggggattttcttgtagttcttatatatccctatatattatatctatattgcaaaattttgactgtcagctacatgttggtaagacacaggcaaagtattactgtaactaagttatttttaaagttaaaatatatttttacgtgcctttggctttttattgcagagtctacattttatagattctacatcagatgttgtcacttatttccattgggattccattgtaagctgtgtatgtgcgtgtttggaaaagtgtattcatacttagtttttttttcttcatctgttatcatacttttaacagcaaccaataacggattgtaaagtgtaaaggcacaggttactcatgatgcttctgcagagactgtgggctacaccacatatgttatttggaaatataggtattttagtacagtacatacttgcattacataggtacttcaagcaacacaataaaaagtaaatgataaagtgaacttgcttgtttatagtaataaacaagaccataagagaataagtatagctagagaaattgcttctctgaaatgtacatgagcccttaaggtaagagatgatttccatctactctcattttgattacttccttatggtttgagaggctagaaactgagcctctctacttttggaaaaatgaacatgtgaggtcagatttttttttttttttttaagtcagcactgatgccaccctctcagtggtcatttctgagcatcttcctgacttgaacaccttctacagcaaactcttgcaagtccagtttcatccctgtaaggcaaatgtcttttcacgcagaaagtgccatatagacgagataaaggcagctaaaacgagggcagtagagagcacttacccgaccccaaggtgccagagatgccctgaggatggtggttaaggaaacaggagcaggaaatgtacacacagattcctgtccctttgccaactactccttccccatcaaagaaaaacacttgcacacagtaactaccagctccttctctcaaacttgtatttctcctggaaatgtatctcagaaatgacctcctctcccaaccacttcaacgattctttctttgggtttggggttcttgcagttctatcatctaaaataacctttggactgcaggtaaaatgcaattaggacaactaaccaagtagacgaaacaagttcccctaggcaggggtgtccaatattttagcttccctggaccgcattggaagaattttcttgggccacatgtaaaacacactaacactaaccatagttgatgagcttaaaaaaataaaaatagaaaattgcaaaaaaaaaaaaaaaaaaaaatctcagactgttttaagaaagtttaaaaatttgtgttggacttcatgcgggccacaggttggacaagcttgccctagggcattgtgtgctttccgtaacttctcagttgtatttcgttatccatgactctccagtgttttttctgttggaccacacccgtcacagttcacagttccaaagagaaatttcccagcctattctaaatcttgttaatgacgaagagtccaatgtatctcattatttgtagccaattttagactcttttcaatacctcccccccattttaattagtattgatcatattcagtctttcattttactcttcatctgtagcgtgacctcaaggtaaagatgaaactatttcatgaaaaggggaggagtatggctgtgcattagctctactccctctctggtaagtactggggagagaacagccctgccagtactgggtttgatagattctaaatattaatcacacatcctgcctacagttagccattttagtttctgggagttctttcatgtacattttcttccattaattgaattaggtataattgagatggcaataaatatgcccgtattagaaagaggaaacaaagctacatgcggcttatgattttgttgagtcacttctcccgaggcagcctttccaatgcctggtcccttcccctgagagcaggtggactgctggtggtggctttctttcctgcagagaggcactttagacccatacctgctgtgagctgaattgatgttctcatcctgtgaaccttctcccactttaacctaatttatctttacttgtttaaagataaggaaacccaagatgtactttatttgcaaactcaaagcaaatggcgagccacctgtgacccagtaaccagaaaagaaaccatgccatttgtataagtagagacacttcttgttgaggtaggcaaggctcttgtgagcgatttttttcccctagtgagacctaacaaaagacaagctatatcatttctgcctgaaattatctgcttgaaaagatcaaaatatcaggatacttagctcttcacaaatatgaagtcattatcacatttcactgagccagaaatcactgttaacagcacacacaaaagactacactggttgaacagcaaagagaaacccgggtctccagaatcacagtttagtccttctatattactgcaagtgacctgttttttctgaaggctccccgcaaatgaagtcctggaatggaaaaaatccataagtccataaattaacttgataaatattttagaacagacaaaagaaaatattgagtgatgtagttctaatcctcctaatatggaacctggcaagactgaatcattttactgtgaaatatataaacacaatagaatgagccaacatgatggtttctctccagtaagagtttttcttttggaaatgaggttaacctagccccaaatctagcaattctcataaaatccgattttagaattagcctcccagattaatctgaatgattgacttattttttcttaggcaagtcagtaagccacccactagacagccatatccagcaaaataagagaagtttccagatgccaaatgataagccaccatcaacccagcggggaagccttctggttggtttggctgtatgagattcaggaaggccagaatacccaaaattattcacacgacgttaacttattggtactggctaagcaatacatgtatttcctaaaggaggagatggtcttttggttgatttatggacacacttgtttcatctgactgtaaatatattgcatgctttattctgatggtgcactatttcatccagcaagcttttcatctgagaatgtttaatgttgaccttattcttagagcaagtagatctaaatatttttcagctgagttattagggagtcattattctgtggtacaatgctgcaaaaagcatcatgtggaagaatgggaactatgcttactttatgaagtgatgtataacacaatgaaatctgttttacaactactgtgctgcatttaattatcttccatttttgctgttaaaaaaaaaaaatccgttaa

SEQ ID NO: 165252 - DNA, 542 bp, Artificial Sequence
  derived and/or modified sequence
gcagatcatgggggctcccttcgaattctgcctactgcatggaggatatagccttatcagtaatgtttcagaagtgttcccaagtgaaggcccagcctgtaatagagattcacaatgttttctctttgaagtgaagcagttttgttcatttcctcccatctcagaatgacttcaaatcctgacatcctcgacagcccaatactttgccacaacctgattacaactctagctctcttatttactggctatatgttattgagaaaaggtttgtcctggttgtggtcaagactggatgatgtaactggctctctaggaagcctcacttggccgtaacctcaggaaggttctctttgaccccatctcatttcgaagccacttctgaagccacttgagaaaaatgatgtgacagttcctatcaaaaaggattcagaaacatataccatctgtgaagaaagtggccctttctcccgcttgcaaaatagacattctcaaattccaaaatgccagccaagaccccaatttacctgaaagcagccaataac

SEQ ID NO: 165253 - DNA, 997 bp, Artificial Sequence
  derived and/or modified sequence
cgcgcccaccggagcccgggctgagagggacctggggagctgcggcctggccggggcggcgcactcaggtggcctcgcttccctgcgggtcaccgcccgccactcgcacagctaggtttgtcctggttgtggtcaagactggatgatgtaactggctctctaggaagcctcacttggccgtaacctcaggaaggttctctttgaccccatctcatttcgaagccacttctgaagccacttgagaaaaatgatgtgacagttcctatcaaaaaggattcagaaacatataccatctgtgaagaaagtggccctttctcccgcttgcaaaatagacattctcaaattccaaaatgccagccaagaccccaatttacctgaaagcagccaataacaagaaaggaaagaaatttaaactgagggacattctgtctcctgatatgatcagtcccccgcttggagactttcgccacaccatccacattggcaaagagggccagcacgatgtctttggagatatttcctttcttcaagggaactacgagcttttacctggaaaccaggagaaagcacacctgggccagttccctgggcataatgagttcttccgggccaacagcacctcggactctgtgttcacagaaacgccctccccggtgctcaaaaatgccatctccctcccgaccattggaggatcccaagctctcatgttgcccttattgtcaccagtgacatttaattccaaacaggagtccttcgggccagcaaagctgcccaggcttagctgcgagcccgtcatggaggaaaaagctcaggagaaaagcagtctgttggagaatgggacagtccaccagggagacacctcgtggggctccagcggttctgcatctcagtccagccaaggcagagacagccactcctccagcctgtccgaacagtaccccgactggccagccgaggacatgtttgaccatcccaccccatgcgagctcatcaaggg

SEQ ID NO: 165254 - DNA, 765 bp, Artificial Sequence
  derived and/or modified sequence
atgcccgccaagacccccatctacctgaaggccgccaacaacaagaagggcaagaagttcaagctgagagacatcctgagccccgacatgatcagcccccccctgggcgacttcagacacaccatccacatcggcaaggagggccagcacgacgtgttcggcgacatcagcttcctgcagggcaactacgagctgctgcccggcaaccaggagaaggcccacctgggccagttccccggccacaacgagttcttcagagccaacagcaccagcgacagcgtgttcaccgagacccccagccccgtgctgaagaacgccatcagcctgcccaccatcggcggcagccaggccctgatgctgcccctgctgagccccgtgaccttcaacagcaagcaggagagcttcggccccgccaagctgcccagactgagctgcgagcccgtgatggaggagaaggcccaggagaagagcagcctgctggagaacggcaccgtgcaccagggcgacaccagctggggcagcagcggcagcgccagccagagcagccagggcagagacagccacagcagcagcctgagcgagcagtaccccgactggcccgccgaggacatgttcgaccaccccaccccctgcgagctgatcaagggcaagaccaagagcgaggagagcctgagcgacctgaccggcagcctgctgagcctgcagctggacctgggccccagcctgctggacgaggtgctgaacgtgatggacaagaacaagtag

SEQ ID NO: 165255 - DNA, 45 bp, Artificial Sequence
  derived and/or modified sequence
atgcccgccaagacccccatctacctgaaggccgccaacaactag

SEQ ID NO: 165256 - DNA, 108 bp, Artificial Sequence
  derived and/or modified sequence
atgcccgccaagacccccatctacctgaaggccgccaacaacaagaagggcaagaagttcaagctgagagacatcctgagccccgacatgatcagcccccccctgtag

SEQ ID NO: 165257 - DNA, 651 bp, Artificial Sequence
  derived and/or modified sequence
atgcccgccaagacccccatctacctgaaggccgccaacaacaagaagggcaagaagttcaagctgagagacatcctgagccccgacatgatcagcccccccctgggcgacttcagacacaccatccacatcggcaaggagggccagcacgacgtgttcggcgacatcagcttcctgcagggcaactacgagctgctgcccggcaaccaggagaaggcccacctgggccagttccccggccacaacgagttcttcagagccaacagcaccagcgacagcgtgttcaccgagacccccagccccgtgctgaagaacgccatcagcctgcccaccatcggcggcagccaggccctgatgctgcccctgctgagccccgtgaccttcaacagcaagcaggagagcttcggccccgccaagctgcccagactgagctgcgagcccgtgatggaggagaaggcccaggagaagagcagcctgctggagaacggcaccgtgcaccagggcgacaccagctggggcagcagcggcagcgccagccagagcagccagggcagagacagccacagcagcagcctgagcgagcagtaccccgactggcccgccgaggacatgttcgaccaccccaccccctgcgagctgatcaagggctag

SEQ ID NO: 165258 - protein, 114 aa, Artificial Sequence
  derived and/or modified sequence
GISKLKMVNQCFGLGDGTCLLSIQLEGPKHVAFGWPECPEAPLPTLPPPPLKEPLTVSPRGSHLMSAMPGVSPSRCVGSFPSCLMLTCGHRGCPHIGAFSSSSCPLCHNGMMAW

SEQ ID NO: 165259 - protein, 479 aa, Artificial Sequence
  derived and/or modified sequence
MSDGFDRAPGAGRGRSRGLGRGGGGPEGGGFPNGAGPAERARHQPPQPKAPGFLQPPPLRQPRTTPPPGAQCEVPASPQRPSRPGALPEQTRPLRAPPSSQDKIPQQNSESAMAKPQVVVAPVLMSKLSVNAPEFYPSGYSSSYTESYEDGCEDYPTLSEYVQDFLNHLTEQPGSFETEIEQFAETLNGCVTTDDALQELVELIYQQATSIPNFSYMGARLCNYLSHHLTISPQSGNFRQLLLQRCRTEYEVKDQAAKGDEVTRKRFHAFVLFLGELYLNLEIKGTNGQVTRADILQVGLRELLNALFSNPMDDNLICAVKLLKLTGSVLEDAWKEKGKMDMEEIIQRIENVVLDANCSRDVKQMLLKLVELRSSNWGRVHATSTYREATPENDPNYFMNEPTFYTSDGVPFTAADPDYQEKYQELLEREDFFPDYEENGTDLSGAGDPYLDDIDDEMDPEIEEAYEKFCLESERKRKQ

SEQ ID NO: 165260 - DNA, 1440 bp, Artificial Sequence
  derived and/or modified sequence
atgtctgatggatttgatcgcgctccaggcgccggcaggggaaggagtagaggcctgggtaggggggggggagggcccgaggggggagggttcccgaatggtgctggccccgccgagcgtgctagacaccaacccccacaacccaaggctcccggattcctgcagcccccacctctgagacaaccaaggaccactccaccacctggggctcagtgtgaggttcctgctagccctcagcgacctagcaggcctggcgccctcccagaacagacacgacccctaagagcgcctcctagttctcaggacaaaattcctcagcaaaactcagaaagcgctatggcgaagcctcaggtcgtcgttgctccagtgctgatgtctaagctgagtgttaacgctcctgagttctaccctagtgggtattcctcaagttatactgaaagctacgaggatgggtgtgaggattacccaacgctgagcgaatacgtgcaagacttcttgaatcaccttactgagcagcctggaagttttgaaacagagattgaacagttcgctgagaccttaaacggatgcgttaccaccgacgacgcgctgcaggagctggttgaactcatctaccagcaggcgacctccataccaaattttagttacatgggggctcggctgtgtaattatctcagtcatcatctcacgattagcccgcagagcgggaatttcagacagctcttgcttcaaaggtgcaggaccgagtacgaggttaaagaccaggcagccaaaggcgacgaagtgacaagaaagcggttccacgcattcgtgctcttccttggggaactctatctgaacctggagatcaaaggcacaaatgggcaggttaccagggctgacattcttcaggttggattgagggagctattaaatgccctgttctccaatcccatggatgacaacctcatctgcgcggtgaagcttctgaagttgaccggcagcgtgctggaggatgcttggaaagaaaaaggcaaaatggacatggaagaaatcattcaaagaatcgaaaatgtggtgttagacgccaattgcagccgggacgtcaagcagatgcttcttaagcttgtggaactgagatcgtctaattggggaagggtccatgcgacatctacctaccgggaggcaacaccagagaatgaccccaactatttcatgaacgagcccactttttataccagtgacggagtgcctttcaccgccgcagaccctgattaccaagagaagtatcaagaattgttagagcgggaagacttttttcctgactatgaggaaaacggaacagatctgtccggagccggtgatccttatttagacgacatcgatgatgaaatggaccctgagattgaggaggcttatgagaagttttgcctggagtctgagaggaagagaaaacagtag

SEQ ID NO: 165261 - DNA, 1440 bp, Artificial Sequence
  derived and/or modified sequence
atgtctgatggctttgaccgggcccctggagctggccggggccgcagccggggcctgggccggggcggcggcggccctgagggcggcggcttccccaatggagctggccctgctgagcgggcccggcaccagcccccccagcccaaggcccctggcttcctgcagcccccacccctgcggcagcccaggaccaccccacctcctggggcccagtgtgaggtgcctgccagcccccagaggcccagcaggcctggggccctgcctgagcagacccggcccctgcgggccccacccagcagccaggacaagatcccccagcagaacagcgagagcgccatggccaagccccaggtggtggtggcccctgtgctgatgagcaagctgtctgtgaatgcccctgagttctaccccagcggctacagcagcagctacacagagagctatgaagatggctgtgaggactaccccaccctgtctgaatatgtgcaggacttcctgaaccacctgacagagcagcccggcagctttgaaacagaaattgagcagtttgctgagaccctgaatggctgtgtgaccacagatgatgccctgcaggagctggtggagctgatctaccagcaggccaccagcatccccaacttctcctacatgggcgcccggctgtgcaactacctgagccaccacctgaccatcagcccccagagcggcaacttccggcagctgctgctgcagcgctgcaggacagaatatgaggtgaaggaccaggccgccaagggagatgaggtgaccaggaagcgcttccacgcctttgtgctcttcctgggggagctgtacctgaacctggagatcaagggcaccaacggccaggtgaccagggctgacatcctgcaggtgggcctgcgggagctgctgaatgccctcttcagcaaccccatggatgacaacctgatctgtgctgtgaagctgctgaagctgaccggctctgtgctggaggatgcctggaaggagaagggcaagatggacatggaggagatcatccagagaattgaaaatgtggtgctggatgccaactgcagcagagatgtgaagcagatgctgctgaagctggtggagctgcggagcagcaactggggccgggtgcacgccaccagcacctaccgggaggccaccccagaaaatgaccccaactacttcatgaatgagcccaccttctacaccagtgatggagtgcccttcaccgctgctgaccctgactaccaggagaagtaccaggagctgctggagcgggaggacttcttcccagactatgaggagaatggaacagacctgagcggggccggggacccctacctggatgacattgatgatgagatggaccctgagattgaggaggcctatgagaagttctgcctggagagcgagaggaagaggaagcagtag

SEQ ID NO: 165262 - DNA, 1440 bp, Artificial Sequence
  derived and/or modified sequence
atgagcgacggcttcgaccgggcccccggcgccggccggggccggtctcgcggactgggaaggggtggcggcggccccgagggaggcggcttcccaaatggggccgggccggcggaacgcgccagacaccagccgccgcagccaaaggcgcccggcttcctccagcccccacccctcaggcaaccaaggacaacgccgcctcccggcgcacagtgcgaagtcccagcaagcccccagcggccctctagaccgggcgccctgcccgaacaaacccggcctctgcgggcgccaccttcatcccaggataagatccctcagcaaaacagcgaaagcgccatggcgaaacctcaggttgtggttgccccggtactgatgtccaagctctcagtgaacgctcctgaattttaccccagtggttactcttcctcctacacagaaagctacgaggacggatgcgaggactatccgacactgtctgagtacgtgcaagatttcctgaatcacctgacagagcagcccggtagttttgaaaccgagatcgagcagttcgcggaaacgctgaatgggtgtgtaacaactgatgacgccctccaagagttggtagaacttatttaccagcaagctacatccatcccaaacttctcatatatgggtgcgagactgtgtaactatctctcacatcaccttacaatttcaccccagagtggaaatttccggcagcttctcttgcaacgttgccggaccgagtatgaagttaaagaccaagccgccaaaggtgatgaggttacccggaagcggttccacgcttttgttctctttctaggcgaattgtacctgaacttagagataaagggtaccaacgggcaggtcactagggcagacatactccaggtgggtctacgcgagctgcttaatgcattatttagcaacccgatggatgacaacctgatctgtgccgtgaagctgttgaagcttacaggaagtgtgctggaagatgcctggaaagagaaaggcaagatggacatggaggagataattcaaagaattgagaacgtggtgctggacgccaactgttcacgagatgtcaagcaaatgctgctgaaactggtggaactgagatcctccaattgggggagagtccatgccacgtcaacctatagggaggctaccccggagaacgatcctaattactttatgaatgagccgacattctacacaagcgacggcgtcccattcaccgctgccgacccggattatcaggaaaaatatcaggagctgctcgaaagagaggacttctttccagattacgaagaaaatgggacagatctgtctggagcaggagacccatacctagatgacatcgatgacgaaatggacccagagatcgaggaagcttacgagaaattctgcctcgaatctgaacggaaacgcaagcagtag

SEQ ID NO: 165263 - DNA, 2782 bp, Artificial Sequence
  derived and/or modified sequence
ctggaaagccgagggtagccgagcggggcgggcgctctggagcggcgggtgctcgggctgccgtccgctccgccagaagcaccgagcagccgagccggggcccgccgccctcctcctccatgaggcccgagtgaggcgcggcggctatagccgacccgcggcgccttccccccgcgtcctatcgcgagcgcagcggcagcggcccctggaggaggaggcggaggaggaggagcatgtcggacggtttcgatcgggccccaggtgctggtcggggccggagccggggcctgggccgcggagggggcgggcctgagggcggcggtttcccgaacggagcggggcctgctgagcgggcgcggcaccagccgccgcaacccaaagccccgggcttcctgcagccaccgccgctgcgccagcccaggacgaccccgccgccaggggcccagtgcgaggtccccgccagcccccagcggccttcccggcccggggcgctcccagagcaaacgaggcccctgagagctccacctagttcacaggataaaatcccacagcagaactcggagtcagcaatggctaagccccaggtggttgtagctcctgtattaatgtctaagctgtctgtgaatgcccctgaattttacccttcaggttattcttccagttacacagaatcctatgaggatggttgtgaggattatcctactctatcagaatatgttcaggattttttgaatcatcttacagagcagcctggcagttttgaaactgaaattgaacagtttgcagagaccctgaatggttgtgttacaacagatgatgctttgcaagaacttgtggaactcatctatcaacaggccacatctatcccaaatttctcttatatgggagctcgcctgtgtaattacctgtcccatcatctgacaattagcccacagagtggcaacttccgccaattgctacttcaaagatgtcggactgaatatgaagttaaagatcaagctgcaaaaggggatgaagttactcgaaaacgatttcatgcatttgtactctttctgggagaactttatcttaacctggagatcaagggaacaaatggacaggttacaagagcagatattcttcaggttggtcttcgagaattgctgaatgccctgttttctaatcctatggatgacaatttaatttgtgcagtaaaattgttaaagttgacaggatcagttttggaagatgcttggaaggaaaaaggaaagatggatatggaagaaattattcagagaattgaaaacgttgtcctagatgcaaactgcagtagagatgtaaaacagatgctcttgaagcttgtagaactccggtcaagtaactggggcagagtccatgcaacttcaacatatagagaagcaacaccagaaaatgatcctaactactttatgaatgaaccaacattttatacatctgatggtgttcctttcactgcagctgatccagattaccaagagaaataccaagaattacttgaaagagaggacttttttccagattatgaagaaaatggaacagatttatccggggctggtgatccatacttggatgatattgatgatgagatggacccagagatagaagaagcttatgaaaagttttgtttggaatcagagcgtaagcgaaaacagtaaagttaaatttcagcatatcagttttataaagcagtttaggtatggtgatttagcagaacacaagagagcaagaaaatgtcacatctataccaaattaaggatgttgagttatgttactaatgtatgcaactttaattttgtttaacactatctgccaaaataaactttattccctataacttaaaatgtgtatatatatataatagtttattatgtacagttaattctactgttttggctgcaataaaatcgattttgaaataaatgaaatgttgaaaattttgctagttggttagatgcttatcctttaaattctacttttcttgaggggaaaaagtcttcttctggaaatacatattactgcaaaaatgtagcatccttttttaggtaggagtattatagctttcattttagtttgacatttagtgtcccaatgaattgaatttcaaatatgaatcataatcttgaaaatctttagcactaaagtcttggaatatatcaacaactgatttacatatgcagatgctatttgataccaagggctttttaaatgtcatgggggggaaaaacccaacttggtgaactcccagctaaacaaccaagacttcactgaagatttattccaattctagaattgttcttttttatttttattttttcaactgactaacttcattaccttaaaggctagaacattattctgctttatttatatggctttctcacttttattttgtagcatgggttgcatcgacttttttactagagaattttactagatatttgtcattcaagttttcatctgctttataattgatacaccttgagggtcacttttctaatacttttactataatgtggtaccacctcagccctaataaataatatttttacctaatgtcaaatctttttccagctaactaaaaactgtgtacaaaaggattgcttgtaaatatgcatgtaaatagttctgttaataacccactgttttacatttggtacatctgtgtctgctaatacagttagctttctcacttttctgcttgtttgttcagtctgaattaaaattagactttgaaaataaagcttaaatagttgtttcctctaaa

SEQ ID NO: 165264 - DNA, 1814 bp, Artificial Sequence
  derived and/or modified sequence
acattttcttgaaatttctggaggggaaggttaacgggaagagaacgaagcttgttaaacgtaggtgtgacctactgtggtaaacacctagggtgaattaaagaggggacacatattttgattccgtttctactcccttcccccgatgctaacggagcaggtgacagtctcccagggaccactcctcagcagtccgcgggtctcggccggagccgagtcattgaacacacctgtgcgccagcgaaccctggcgcagggtccacgccccctccccccgtgtttttatttcccgggcgtcaactgtcggtctcgcacgtctctcctgagaactaccgagtaggtcgggcctgcctgtgagcaaacgaggcccctgagagctccacctagttcacaggataaaatcccacagcagaactcggagtcagcaatggctaagccccaggtggttgtagctcctgtattaatgtctaagctgtctgtgaatgcccctgaattttacccttcaggttattcttccagttacacagaatcctatgaggatggttgtgaggattatcctactctatcagaatatgttcaggattttttgaatcatcttacagagcagcctggcagttttgaaactgaaattgaacagtttgcagagaccctgaatggttgtgttacaacagatgatgctttgcaagaacttgtggaactcatctatcaacaggccacatctatcccaaatttctcttatatgggagctcgcctgtgtaattacctgtcccatcatctgacaattagcccacagagtggcaacttccgccaattgctacttcaaagatgtcggactgaatatgaagttaaagatcaagctgcaaaaggggatgaagttactcgaaaacgatttcatgcatttgtactctttctgggagaactttatcttaacctggagatcaagggaacaaatggacaggttacaagagcagatattcttcaggttggtcttcgagaattgctgaatgccctgttttctaatcctatggatgacaatttaatttgtgcagtaaaattgttaaagttgacaggatcagttttggaagatgcttggaaggaaaaaggaaagatggatatggaagaaattattcagagaattgaaaacgttgtcctagatgcaaactgcagtagagatgtaaaacagatgctcttgaagcttgtagaactccggtcaagtaactggggcagagtccatgcaacttcaacatatagagaagcaacaccagaaaatgatcctaactactttatgaatgaaccaacattttatacatctgatggtgttcctttcactgcagctgatccagattaccaagagaaataccaagaattacttgaaagagaggacttttttccagattatgaagaaaatggaacagatttatccggggctggtgatccatacttggatgatattgatgatgagatggacccagagatagaagaagcttatgaaaagttttgtttggaatcagagcgtaagcgaaaacagtaaagttaaatttcagcatatcagttttataaagcagtttaggtatggtgatttagcagaacacaagagagcaagaaaatgtcacatctataccaaattaaggatgttgagttatgttactaatgtatgcaactttaattttgtttaacactatctgccaaaataaactttattccctataacttaaaatgtgtatatatatataatagtttattatgtacagttaattctactgttttggctgcaataaaatcgattttgaaataaatgaaatgttgaaaatttt

SEQ ID NO: 165265 - DNA, 1440 bp, Artificial Sequence
  derived and/or modified sequence
atgtccgatggctttgatcgagctccaggggctggaagaggacgttcacgaggccttgggaggggcggaggaggtcctgaaggcggtggcttccccaacggcgcaggacctgcagaaagagccagacatcagccgccacagccaaaggcgccaggcttcctacagccgcctcctttgagacagccaaggaccactccaccgcctggcgcacagtgcgaagtcccagcatctccccagaggcctagtcgcccaggggcactgccggaacaaaccagacccctgagagccccaccttcaagtcaggacaagattcctcaacagaattcggaatcagcaatggcaaagccacaggtcgtggttgcaccagtcctaatgagcaaactaagcgtcaacgctcccgaattttacccgtcagggtattcgagctcctacacggaaagctacgaggacggttgtgaggattatcccacattgtcagagtacgtgcaggattttctcaatcatctcactgaacagccaggttcctttgagacagaaatcgagcaatttgccgagacactaaacggatgcgtgaccacagacgacgctctccaagagcttgtagaactcatttaccagcaggccacctctatacccaactttagctatatgggcgctcgcctatgcaattatctgtctcaccatctgaccatcagcccccagagcggcaactttaggcaactgttgctgcaacgctgtcgtactgagtatgaggtaaaggaccaggccgctaagggggacgaagtgactcggaaaagattccatgctttcgtgcttttcctgggagaactatacctcaacttggaaatcaagggaaccaacggccaggtgacacgggcagatattctgcaagtgggcctgagggagcttctgaacgctttgttttcgaatccaatggacgataacctgatctgcgccgtcaaactcttaaagctaacaggttctgtcctggaagatgcctggaaggagaaggggaaaatggatatggaggagattatacagcgcattgagaatgtcgtattggacgccaactgcagcagggacgttaaacagatgctgcttaagctggtggaactgcgaagtagcaactgggggcgagtccacgcaacctcaacttatagagaggccactccggaaaatgaccccaactatttcatgaacgagcccaccttttacaccagcgatggtgtgccattcacagccgctgatccagactatcaggaaaagtatcaagaactcctggaacgggaggatttcttcccggattacgaggagaacggcaccgacctctctggcgcaggggatccctacctggacgatatcgatgacgaaatggaccccgagatcgaggaagcctatgagaagttttgcctggaatcagaaagaaagcgtaagcagtag

SEQ ID NO: 165266 - DNA, 1440 bp, Artificial Sequence
  derived and/or modified sequence
atgagcgacggcttcgacagagcccccggcgccggcagaggcagaagcagaggcctgggcagaggcggcggcggccccgagggcggcggcttccccaacggcgccggccccgccgagagagccagacaccagcccccccagcccaaggcccccggcttcctgcagcccccccccctgagacagcccagaaccacccccccccccggcgcccagtgcgaggtgcccgccagcccccagagacccagcagacccggcgccctgcccgagcagaccagacccctgagagccccccccagcagccaggacaagatcccccagcagaacagcgagagcgccatggccaagccccaggtggtggtggcccccgtgctgatgagcaagctgagcgtgaacgcccccgagttctaccccagcggctacagcagcagctacaccgagagctacgaggacggctgcgaggactaccccaccctgagcgagtacgtgcaggacttcctgaaccacctgaccgagcagcccggcagcttcgagaccgagatcgagcagttcgccgagaccctgaacggctgcgtgaccaccgacgacgccctgcaggagctggtggagctgatctaccagcaggccaccagcatccccaacttcagctacatgggcgccagactgtgcaactacctgagccaccacctgaccatcagcccccagagcggcaacttcagacagctgctgctgcagagatgcagaaccgagtacgaggtgaaggaccaggccgccaagggcgacgaggtgaccagaaagagattccacgccttcgtgctgttcctgggcgagctgtacctgaacctggagatcaagggcaccaacggccaggtgaccagagccgacatcctgcaggtgggcctgagagagctgctgaacgccctgttcagcaaccccatggacgacaacctgatctgcgccgtgaagctgctgaagctgaccggcagcgtgctggaggacgcctggaaggagaagggcaagatggacatggaggagatcatccagagaatcgagaacgtggtgctggacgccaactgcagcagagacgtgaagcagatgctgctgaagctggtggagctgagaagcagcaactggggcagagtgcacgccaccagcacctacagagaggccacccccgagaacgaccccaactacttcatgaacgagcccaccttctacaccagcgacggcgtgcccttcaccgccgccgaccccgactaccaggagaagtaccaggagctgctggagagagaggacttcttccccgactacgaggagaacggcaccgacctgagcggcgccggcgacccctacctggacgacatcgacgacgagatggaccccgagatcgaggaggcctacgagaagttctgcctggagagcgagagaaagagaaagcagtag

SEQ ID NO: 165267 - protein, 808 aa, Artificial Sequence
  derived and/or modified sequence
MAETAAGVGRFKTNYAVERKIEPFYKGGKAQLDQTGQHLFCVCGTRVNILEVASGAVLRSLEQEDQEDITAFDLSPDNEVLVTASRALLLAQWAWQEGSVTRLWKAIHTAPVATMAFDPTSTLLATGGCDGAVRVWDIVRHYGTHHFRGSPGVVHLVAFHPDPTRLLLFSSATDAAIRVWSLQDRSCLAVLTAHYSAVTSLAFSADGHTMLSSGRDKICIIWDLQSCQATRTVPVFESVEAAVLLPEEPVSQLGVKSPGLYFLTAGDQGTLRVWEAASGQCVYTQAQPPGPGQELTHCTLAHTAGVVLTATADHNLLLYEARSLRLQKQFAGYSEEVLDVRFLGPEDSHVVVASNSPCLKVFELQTSACQILHGHTDIVLALDVFRKGWLFASCAKDQSVRIWRMNKAGQVMCVAQGSGHTHSVGTVCCSRLKESFLVTGSQDCTVKLWPLPKALLSKNTAPDNGPILLQAQTTQRCHDKDINSVAIAPNDKLLATGSQDRTAKLWALPQCQLLGVFSGHRRGLWCVQFSPMDQVLATASADGTIKLWALQDFSCLKTFEGHDASVLKVAFVSRGTQLLSSGSDGLVKLWTIKNNECVRTLDAHEDKVWGLHCSRLDDHALTGASDSRVILWKDVTEAEQAEEQARQEEQVVRQQELDNLLHEKRYLRALGLAISLDRPHTVLTVIQAIRRDPEACEKLEATMLRLRRDQKEALLRFCVTWNTNSRHCHEAQAVLGVLLRREAPEELLAYEGVRAALEALLPYTERHFQRLSRTLQAAAFLDFLWHNMKLPVPAAAPTPWETHKGALP

SEQ ID NO: 165268 - DNA, 2427 bp, Artificial Sequence
  derived and/or modified sequence
atggccgagaccgccgccggcgtgggcagattcaagaccaactacgccgtggagagaaagatcgagcccttctacaagggcggcaaggcccagctggaccagaccggccagcacctgttctgcgtgtgcggcaccagagtgaacatcctggaggtggccagcggcgccgtgctgagaagcctggagcaggaggaccaggaggacatcaccgccttcgacctgagccccgacaacgaggtgctggtgaccgccagcagagccctgctgctggcccagtgggcctggcaggagggcagcgtgaccagactgtggaaggccatccacaccgcccccgtggccaccatggccttcgaccccaccagcaccctgctggccaccggcggctgcgacggcgccgtgagagtgtgggacatcgtgagacactacggcacccaccacttcagaggcagccccggcgtggtgcacctggtggccttccaccccgaccccaccagactgctgctgttcagcagcgccaccgacgccgccatcagagtgtggagcctgcaggacagaagctgcctggccgtgctgaccgcccactacagcgccgtgaccagcctggccttcagcgccgacggccacaccatgctgagcagcggcagagacaagatctgcatcatctgggacctgcagagctgccaggccaccagaaccgtgcccgtgttcgagagcgtggaggccgccgtgctgctgcccgaggagcccgtgagccagctgggcgtgaagagccccggcctgtacttcctgaccgccggcgaccagggcaccctgagagtgtgggaggccgccagcggccagtgcgtgtacacccaggcccagccccccggccccggccaggagctgacccactgcaccctggcccacaccgccggcgtggtgctgaccgccaccgccgaccacaacctgctgctgtacgaggccagaagcctgagactgcagaagcagttcgccggctacagcgaggaggtgctggacgtgagattcctgggccccgaggacagccacgtggtggtggccagcaacagcccctgcctgaaggtgttcgagctgcagaccagcgcctgccagatcctgcacggccacaccgacatcgtgctggccctggacgtgttcagaaagggctggctgttcgccagctgcgccaaggaccagagcgtgagaatctggagaatgaacaaggccggccaggtgatgtgcgtggcccagggcagcggccacacccacagcgtgggcaccgtgtgctgcagcagactgaaggagagcttcctggtgaccggcagccaggactgcaccgtgaagctgtggcccctgcccaaggccctgctgagcaagaacaccgcccccgacaacggccccatcctgctgcaggcccagaccacccagagatgccacgacaaggacatcaacagcgtggccatcgcccccaacgacaagctgctggccaccggcagccaggacagaaccgccaagctgtgggccctgccccagtgccagctgctgggcgtgttcagcggccacagaagaggcctgtggtgcgtgcagttcagccccatggaccaggtgctggccaccgccagcgccgacggcaccatcaagctgtgggccctgcaggacttcagctgcctgaagaccttcgagggccacgacgccagcgtgctgaaggtggccttcgtgagcagaggcacccagctgctgagcagcggcagcgacggcctggtgaagctgtggaccatcaagaacaacgagtgcgtgagaaccctggacgcccacgaggacaaggtgtggggcctgcactgcagcagactggacgaccacgccctgaccggcgccagcgacagcagagtgatcctgtggaaggacgtgaccgaggccgagcaggccgaggagcaggccagacaggaggagcaggtggtgagacagcaggagctggacaacctgctgcacgagaagagatacctgagagccctgggcctggccatcagcctggacagaccccacaccgtgctgaccgtgatccaggccatcagaagagaccccgaggcctgcgagaagctggaggccaccatgctgagactgagaagagaccagaaggaggccctgctgagattctgcgtgacctggaacaccaacagcagacactgccacgaggcccaggccgtgctgggcgtgctgctgagaagagaggcccccgaggagctgctggcctacgagggcgtgagagccgccctggaggccctgctgccctacaccgagagacacttccagagactgagcagaaccctgcaggccgccgccttcctggacttcctgtggcacaacatgaagctgcccgtgcccgccgccgcccccaccccctgggagacccacaagggcgccctgccctag

SEQ ID NO: 165269 - DNA, 2427 bp, Artificial Sequence
  derived and/or modified sequence
atggctgagaccgccgctggcgtaggaaggtttaaaaccaactatgccgtcgagagaaaaatcgagcccttttataaagggggaaaggcccagttggatcaaactggccagcacttgttttgtgtgtgcggcacacgagttaacatcctggaggtggcttctggcgccgtgctcaggagcctggagcaggaagaccaggaggatattacggcgttcgatctctctccagataacgaggttctcgttactgctagccgggctcttttattggctcagtgggcctggcaagaagggtcagtcacgcggctttggaaagctattcacacagcccccgtggccacaatggcctttgacccaactagtaccctccttgcaacaggcgggtgcgatggcgccgtgcgggtctgggacatagtcaggcactacggaactcatcatttccgcggctcccctggcgtggtgcacctggtggcattccacccggatcctacgaggcttcttctgttcagttccgccacagatgcggccataagggtctggagtctccaggacaggtcttgtctggccgttctcaccgcccattattccgcagtgacatctctcgccttctctgccgacgggcacaccatgctgagttctggcagagataaaatttgtatcatctgggacctgcagtcttgccaggcaacgagaaccgtgcccgttttcgaatcggttgaggctgccgtcctgctgcccgaggaaccagtttctcaactgggcgttaagagtcctggcctctattttttaaccgctggagatcaggggaccctgagagtgtgggaagctgcatctgggcagtgcgtgtacacacaagctcagccaccagggcctgggcaggaactgacgcactgtacgctggcccacactgccggtgttgtgctgaccgctacagcggaccacaatctccttttatatgaagctcgttctctgaggctccagaaacagtttgcaggctacagcgaggaagtgctggacgtgagatttttggggcccgaagactcccatgtggtggttgccagcaactccccctgccttaaggtctttgaattgcagaccagcgcctgccaaatcttgcatggccacacggacatcgtccttgccctagatgtttttcgtaaagggtggctgttcgccagctgcgcaaaggaccaaagcgtgaggatctggaggatgaacaaagctgggcaggtgatgtgtgtggcacaaggatccggacatactcattctgtcggtacggtgtgctgttcacgtttgaaggaatcgttcctcgttaccgggtcacaggactgcaccgtgaagctgtggcctctccctaaggctctcctgagcaagaataccgctcccgacaacggaccaatcttgctccaagctcaaactacacaacgctgccacgataaagacatcaactccgtggcaattgctccaaatgacaagctgctcgcaaccggcagccaggacaggacagctaagctttgggcattgcctcagtgccaactcttaggagtgttctccggccaccgacgcggcctgtggtgtgtccagttcagtcctatggaccaggttcttgcaactgcaagcgcagatgggacaattaagctgtgggctcttcaggacttttcctgtctcaaaactttcgaaggtcatgacgcttccgtgctaaaggtagctttcgtcagccgcggcacccagctgctttcatccggctctgacggtcttgtgaaattgtggaccattaaaaacaatgagtgtgtgaggactctggatgctcatgaagataaggtgtggggacttcactgttcaagactcgatgaccacgctctgaccggtgcttccgatagtagagttattctgtggaaggatgttaccgaggcagaacaagctgaggagcaggctcggcaggaggaacaggtcgttcgtcagcaggaactcgacaacctcctgcacgagaagcgttacctgcgggcactgggcctggcaatctccctggatcgtccgcatacagtgctgaccgtcatccaggcgatccgcagagatcccgaggcctgtgaaaaactggaggcaacgatgttaaggctccgcagagaccagaaagaggccttgctgaggttttgtgtaacttggaatactaacagccgacactgtcacgaggctcaggccgtcctgggtgttctgctcaggcgcgaggcgcctgaggagctgctagcctacgaaggcgtacgggcagcactggaagctctcttgccctacacagagaggcacttccagcgtctgagcagaactctgcaagccgcggcattcctcgatttcctgtggcacaatatgaagctacctgtcccggctgccgcaccaacaccttgggagactcacaaaggcgctctcccctag

SEQ ID NO: 165270 - DNA, 2427 bp, Artificial Sequence
  derived and/or modified sequence
atggccgagacggccgccggagtggggcggtttaagactaattatgcggtggaaagaaaaattgaacctttttacaaaggggggaaggcgcagcttgatcagacgggccagcatctcttttgcgtgtgcgggacaagggtcaatattctcgaagtggcatccggtgcggtactccgaagcttagaacaggaggatcaagaagacattactgcatttgatcttagcccagacaacgaagtgctcgtaaccgcatctcgagccttgctcctcgcgcaatgggcctggcaagaggggagtgtaaccagactatggaaggccatccacacagctcctgttgcgaccatggcattcgaccccaccagtacgctgttagcgactggcggctgcgatggtgcagtgagggtttgggatattgtccgacactacgggactcaccatttccgcgggagcccaggcgtggtgcacctggtggctttccatcccgatcctacgaggcttttgctgttttcttctgcaaccgacgccgccatcagagtgtggtctttgcaggacagaagttgtctagctgtgctcaccgctcattactccgccgtcacaagtctcgctttttcagctgatggccacaccatgctttcctccggtcgtgataaaatctgtatcatctgggatctccagtcctgtcaggccactcggacagtgcccgtattcgagtccgtggaggctgccgtgcttctgcccgaggaacccgtgtcccaactcggggtgaagtcccccgggctctacttcctgactgccggtgatcagggcacgctcagagtatgggaggccgccagcggacagtgcgtatacacacaggcccagccacccggccctggacaagagttgacacactgtaccctggcccataccgctggcgtggtgctaacagcaaccgccgaccacaaccttttactttacgaggcacgatcactcagactgcagaagcagtttgcgggatacagtgaggaagtgctggacgtgcgcttcctgggaccggaggatagccacgtggtggtggccagcaacagtccctgcttgaaggtttttgagctccagaccagcgcttgtcagatattacatggtcacaccgatattgtgttggcgcttgatgtgttcaggaagggatggctcttcgcgagctgcgctaaagaccagagcgtgcgcatttggcgtatgaataaagcagggcaggttatgtgcgtcgcacaaggatcagggcatacccactcagtcggcactgtatgctgttctcgcctgaaggagtccttcctggtcaccgggtcccaagattgtacagtgaaactttggcccctccccaaagctctgctgtcgaagaatacggcccccgacaatggacccattctgttgcaagcccagactacacaacggtgtcatgacaaagacataaactcggttgccatcgctcctaatgataagttgctcgcgaccgggagtcaagacaggaccgccaagctctgggcactgccacagtgtcaactgctaggggtcttctccggacacagaagaggtctgtggtgcgtgcagttctccccgatggaccaggtgctcgctactgctagtgcagacgggaccattaaactctgggctctacaggattttagctgtctaaagactttcgaggggcatgacgcatccgtactcaaagtggccttcgtttctcgcggcacccagctgctgtcctccggatccgacgggttggtcaagttatggaccattaaaaataatgaatgtgtcaggacactggacgcacacgaagataaagtctggggcctgcactgcagtcggttggatgaccacgctctcaccggtgcttcagattctagggttattttgtggaaagacgtgaccgaggcagagcaggccgaagaacaggcaaggcaggaggaacaagttgtaagacagcaagagctcgataatctgctccatgagaagcggtatctgcgcgccttggggctggctatcagcttggatcgtccacataccgtgctgacagtcatccaggctattaggagggatcctgaggcttgcgaaaaactggaagcaacaatgctgcgcttgcgtagagatcagaaggaggctctcctgagattctgtgtgacttggaataccaactccaggcactgccacgaggcccaggctgttctgggggtgctcctgcggcgagaggcccctgaagagttgctcgcctatgaaggcgtgcgcgcagcattggaagcactactgccatatactgagcgccacttccagaggctgtcccggaccttgcaggccgccgcatttctggacttcctttggcataatatgaagttaccggtaccggctgccgcgcctacaccttgggagactcataaaggagctttgccttag

SEQ ID NO: 165271 - DNA, 2427 bp, Artificial Sequence
  derived and/or modified sequence
atggccgagacagctgctggggtgggccgcttcaagaccaactatgctgtggagaggaagattgagcccttctacaagggcggcaaggcccagctggaccagacaggccagcacctgttctgtgtgtgtggcaccagggtgaacatcctggaggtggccagcggggctgtgctgcggagcctggagcaggaggaccaggaggacatcacagcctttgacctgagcccagacaatgaggtgctggtgacagccagccgggccctgctgctggcccagtgggcctggcaggagggctctgtgacccggctgtggaaggccatccacacagcccctgtggccaccatggcctttgaccccaccagcaccctgctggccaccggcggctgtgatggagctgtgcgggtgtgggacatcgtgcgccactacggcacccaccacttccggggcagccctggggtggtgcacctggtggccttccacccagaccccacccggctgctgctcttcagcagcgccacagatgctgccatccgggtgtggagcctgcaggacaggagctgcctggccgtgctgacagcccactacagcgctgtgaccagcctggccttcagcgcagatggccacaccatgctgagcagcggccgggacaagatctgcatcatctgggacctgcagagctgccaggccaccaggacagtgcctgtgtttgagagcgtggaggccgctgtgctgctgcctgaggagcctgtgtcccagctgggcgtgaagagccctggcctgtacttcctgacagctggggaccagggcaccctgcgggtgtgggaggccgccagcggccagtgtgtgtacacccaggcccagcccccaggccctggccaggagctgacccactgcaccctggcccacacagctggggtggtgctgacagccacagctgaccacaacctgctgctgtatgaggcccggagcctgcggctgcagaagcagtttgctggctacagcgaggaggtgctggatgtgcgcttcctgggccctgaggacagccacgtggtggtggccagcaacagcccctgcctgaaggtgtttgagctgcagaccagcgcctgccagatcctgcacggccacacagacatcgtgctggccctggatgtgttcaggaagggctggctgtttgccagctgtgccaaggaccagagcgtgcgcatctggaggatgaacaaggccggccaggtgatgtgtgtggcccagggcagcggccacacccacagcgtgggcaccgtgtgctgcagccggctgaaggagagcttcctggtgacaggcagccaggactgcaccgtgaagctgtggcccctgcccaaggccctgctgagcaagaacacagccccagacaatggccccatcctgctgcaggcccagaccacccagcgctgccacgacaaggacatcaacagcgtggccatcgccccaaatgacaagctgctggccaccggcagccaggacagaacagccaagctgtgggccctgccccagtgccagctgctgggcgtcttcagcggccacagaagaggcctgtggtgtgtgcagttcagccccatggaccaggtgctggccacagccagcgcagatggcaccatcaagctgtgggccctgcaggacttcagctgcctgaagacctttgagggccatgatgcctctgtgctgaaggtggcctttgtgtcccggggcacccagctgctgagcagcggcagtgatggcctggtgaagctgtggaccatcaagaacaatgaatgtgtgaggaccctggatgcccacgaggacaaggtgtggggcctgcactgcagccggctggatgaccacgccctgaccggggccagtgacagcagggtcatcctgtggaaggatgtgacagaggccgagcaggccgaggagcaggcccggcaggaggagcaggtggtgcggcagcaggagctggacaacctgctgcacgagaagcgctacctgcgggccctgggcctggccatcagcctggaccggccccacacagtgctgaccgtcatccaggccatccggcgggaccctgaggcctgtgagaagctggaggccaccatgctgcggctgcggcgggaccagaaggaggccctgctgcgcttctgtgtgacctggaacaccaacagccgccactgccacgaggcccaggccgtgctgggcgtgctgctgcggcgggaggcccctgaggagctgctggcctatgagggcgtgcgggccgccctggaggccctgctgccctacacagagcggcacttccagaggctgagcaggaccctgcaggccgccgccttcctggacttcctgtggcacaacatgaagctgcctgtgcctgctgctgcccccaccccctgggagacccacaagggggccctgccctag

SEQ ID NO: 165272 - DNA, 2427 bp, Artificial Sequence
  derived and/or modified sequence
atggccgagaccgccgccggcgtgggccggttcaagaccaactacgcagtggaacggaagatcgaacctttctacaagggcggaaaagcccagctagaccaaactggtcagcatctgttctgtgtatgtgggactcgggtgaacattctggaggtggcatcgggcgccgtgctaaggagtctggagcaggaagatcaggaagatatcactgctttcgacctgtcacccgacaacgaagtactggtaactgcatcccgcgccttgttactggcacagtgggcttggcaagaggggtctgtgacacgcttgtggaaagctatccacaccgccccagtggcaacgatggcgttcgaccctacgtctacactgttggctactggcgggtgtgatggggccgtaagggtttgggacatcgtgaggcactacggcacacatcactttcgggggagcccgggagtcgtccatcttgtggccttccatccggatccaaccagactgttgttgttttcttcagccaccgacgcagcgatccgcgtatggagcctacaagatcgctcctgtcttgctgtcctaaccgctcattattccgctgtgacctcactggcattctcggcagacggccacactatgttatcttctggaagagacaaaatttgtatcatatgggacttgcagtcctgccaggccaccagaaccgtcccagtatttgagagcgtcgaggccgcggtgctgctccccgaagagccagtatcccagcttggcgtaaagtcaccaggactgtactttcttaccgctggcgaccagggaacattgagagtgtgggaggccgcgtccggacagtgtgtgtacactcaagctcagccccccgggcctgggcaggagttgacacactgcactcttgctcatacggcaggggtagtcttgaccgcgactgcagaccacaacctgctcctttatgaggcccgcagcttacgtctgcagaagcagtttgctggttatagcgaggaagtgctggatgtgcgctttttggggcctgaagatagccatgtggtcgtggcatcaaacagtccttgtctgaaagtgttcgaactgcagaccagcgcttgccaaatactccacggtcacacggatatcgtgttggcgcttgacgtgttccgcaaagggtggctctttgccagctgcgcaaaggaccagtccgtgaggatctggcggatgaacaaagccgggcaggtgatgtgtgtagcccaagggtcaggccacacccattccgtaggcaccgtgtgttgttccagactcaaggaatcttttttggtaaccggcagccaagattgcactgtgaagctctggccactccccaaggcgctgctcagtaagaacaccgcaccagataatggccccatattgctgcaagcccagacgacgcagcggtgtcacgacaaggacatcaactccgtggccattgcccctaacgataaacttctggccacaggctcgcaggacaggacagcgaagctctgggcgcttccgcagtgtcaactcctgggcgtcttctcaggtcatagacggggcctgtggtgcgtgcaattctccccaatggatcaagtgcttgccactgcatctgcagacggaactataaaactctgggcacttcaggacttctcctgtctcaagacattcgaggggcatgacgcaagcgtgctgaaggttgcgttcgtgagcaggggtacccagctgttaagcagtggatctgacggtctagtgaaactgtggactatcaagaacaacgaatgtgtccgcactcttgacgcccatgaagacaaagtatggggtttgcactgctcccggctagatgatcacgctctgacaggcgcatcagactctagagtgatcctttggaaggacgtaaccgaagctgagcaggcagaggagcaggctcgacaggaagagcaagtcgtgagacagcaggagttggacaatttgcttcatgagaaacgttatctgagagccctgggcctggctatcagcctagaccggccgcacacagtccttacagtgattcaggccatcaggagggatccagaggcctgcgagaaactggaagccactatgctacgtctgaggcgagatcagaaggaggctctgcttagattttgcgttacttggaacaccaacagcagacattgccatgaagcccaagctgtgcttggggtgctgctgcgacgggaagcgccagaggagttgctggcatacgagggcgtccgcgctgctctcgaggctctccttccatacactgagcggcacttccagcgactgtcaaggaccttacaggccgccgcctttctcgactttctctggcacaatatgaaactccccgttccagctgcagccccaactccatgggagacacataagggggccttgccctag

SEQ ID NO: 165273 - DNA, 2427 bp, Artificial Sequence
  derived and/or modified sequence
atggccgagaccgccgccggcgtgggccggttcaagaccaactacgccgtggagcgcaagattgaacccttctacaaaggcgggaaagctcaattggaccaaactggtcagcaccttttctgcgtgtgcgggacacgggtgaatatcctggaagtagccagtggtgccgtcctgcgttcactggagcaggaggatcaggaagacatcactgccttcgatctctccccagataacgaggtcctagtaacagcaagtcgggcgttactcctcgctcagtgggcatggcaggaaggatcggttacccgcctctggaaggctatacacaccgccccagtcgcaacgatggcttttgaccctacatcaaccttgttggcgacaggcggttgtgacggggctgtgcgcgtatgggatatagtgcgccattacggcacccaccattttcgcggtagcccaggcgtggtgcatctcgtggcgtttcaccccgaccccacgcggttgctacttttcagctccgcaacagacgcagcaatacgcgtttggagtcttcaggaccggtcttgcctggccgtgctgacagctcactatagtgccgtgacgagtttggccttcagtgcagacgggcacacaatgctgagtagcggtcgcgataaaatctgtatcatctgggatctgcaatcttgtcaggccacacgtactgtcccagtctttgaatcagttgaggcagcggttttactgcccgaagagccggtgtcccaactgggcgtgaaaagccccggactctactttttaactgcaggcgatcaggggacgctgagggtctgggaggcggcctctggacagtgtgtgtacacccaggcccagcctccaggacccggtcaggagctgacacactgcacattggcacatactgccggtgtggtacttactgcaacagctgatcataatcttctgctgtatgaggccaggtccctcagattgcagaaacagtttgctgggtactccgaagaggtccttgatgtgaggttcctggggcccgaagattctcatgttgtcgtggcttcaaattctccctgtctcaaggtctttgaactccagacatcggcctgtcagatcctccatggtcacaccgacatagtactggccctcgacgtattcaggaagggctggctgttcgccagctgcgccaaggaccagtctgtacggatatggagaatgaacaaagctggacaagtgatgtgtgtggcgcaaggctctgggcatactcatagtgtcggcactgtatgttgctcccgcctgaaggagagcttcctggtgacgggctctcaggactgtaccgtgaagctgtggcctctgcctaaagccttgttgagcaagaacaccgcacccgacaacggcccaatcctgctgcaggcccaaacaactcagcggtgtcacgataaagatattaatagtgtagctattgcgcccaacgataaactgttggccacgggctctcaagatcgcaccgcaaaactgtgggcactccctcaatgccaattgctgggtgtgttctcaggacaccgacggggactctggtgcgtgcagttcagcccaatggatcaggtgctggcaaccgcctccgctgacggcaccatcaagttgtgggccctgcaggatttcagctgcctgaaaactttcgagggccatgatgcaagtgtcctcaaagtggcgttcgtctctaggggtacgcagttgctgagctctggatcagacgggctagtgaagttatggacgatcaaaaacaatgaatgcgtgagaacgctcgacgcccacgaggataaagtctggggtcttcactgctcacgcctggatgaccacgcactgaccggagcatcggacagccgtgtgattctgtggaaagatgttacagaggcagagcaggctgaggaacaggcaaggcaggaggagcaggtggtcagacagcaagaattggacaatcttctacatgaaaagcggtatctgcgcgccttggggttggcaatttccctggatcggcctcacaccgtcctcacagtcattcaggctattcgaagggaccctgaagcttgcgagaagctggaggctacgatgctgagactgcgacgggatcagaaagaggcgctattgagattctgtgtaacttggaacactaactctcggcactgccatgaggcacaggccgtgctaggcgtgctcctgagacgcgaagcccctgaagagttactggcatacgaaggggttagggccgcactggaggcactgcttccatataccgagcgccacttccagcggttatcgagaactctacaggctgcagctttcctggatttcctctggcataatatgaagctgccagtgcccgcagccgcaccaaccccctgggaaacacataaaggcgccctcccttag

SEQ ID NO: 165274 - DNA, 2427 bp, Artificial Sequence
  derived and/or modified sequence
atggcggaaactgcagcaggggtggggagattcaaaaccaactatgctgttgagaggaagattgaacccttctacaagggcggaaaggctcagctggaccagactgggcagcacctgttttgtgtctgtggaacacgggtgaatattctggaggtcgcatccggggctgtcctgcgaagcctggagcaggaggaccaggaagacattactgcctttgacctgtcccctgacaacgaggttctggtgacagcctctagggctctccttctcgctcagtgggcctggcaggaaggaagtgtgactcgtctgtggaaggctattcacaccgcgccagttgccacaatggctttcgacccgacatccacccttctcgccactggcggttgtgatggcgctgttagagtgtgggatatagtcagacattacgggacccaccactttagaggatctcccggagtagtgcatcttgtggctttccacccggatcctactagactcctgctgttttctagcgccactgacgccgctattcgggtttggtctctccaagatcgttcttgtctggccgtgctcacagctcactactctgccgtgaccagcttagcatttagcgcagatggacataccatgttgtccagcggacgcgataagatttgtataatctgggacttgcagtcttgccaggccaccaggacagtaccggtctttgagtcagttgaggctgccgtgttgctgcctgaggagcccgtgagccaactgggggtcaagtctcccggtctgtattttctgacggccggagatcaaggtaccctacgggtgtgggaagcggcaagcggccaatgtgtatacacacaggctcagcctccaggtcctggccaggagctgacgcattgtacgttggctcacacagcaggggtggtgctgaccgcaaccgcggatcataacctgctgttatacgaggcccgttcattgagactgcagaaacagtttgccggatacagtgaagaggtcctggatgttcggtttctgggccctgaagattcccatgtcgtggtcgccagcaacagtccctgtcttaaggtttttgagcttcagacgtccgcgtgccagattctgcatggtcacaccgacatcgtgttagccctggacgttttccggaagggctggctgttcgctagctgtgcgaaggatcaaagtgtgaggatatggagaatgaataaagctgggcaagtcatgtgcgttgctcagggcagtggtcatacacatagcgtcggcacagtctgctgttcgcgtctgaaagagtctttcctggtcactggtagccaggactgcacagtaaaattgtggcccttgccgaaagctttgctgtccaaaaataccgcccctgacaacggcccaatcctcctccaggcccagaccacccaacggtgccatgataaggatatcaactctgtagccatagctccaaatgacaagctcttagccactggctctcaagaccgcacggctaagctgtgggccctaccacagtgccaactcttaggcgtcttttcgggtcaccgcaggggcctgtggtgtgtgcagttctcaccaatggaccaggtcctggctacagcttcagccgacggcaccatcaagctttgggctcttcaggatttcagttgtctgaaaacgttcgaagggcatgacgctagtgtgctcaaggtggcttttgtctcaagaggaacacagctgctcagtagtggaagtgacggactggttaagctttggacaataaagaacaatgagtgcgtaagaaccctcgatgcccatgaagacaaagtctgggggctccactgctctcggctcgacgatcacgccctgacaggggcaagtgactccagggtgatcctgtggaaggacgtgacagaggccgagcaggccgaggaacaagcccgacaggaagaacaggtggtgaggcagcaggaactcgataacctcttgcacgagaagcgatacctgagagcactgggattggccattagcctggatcgaccccatacggtgctcactgtgatacaggcgatacgtcgcgacccagaagcctgcgagaaactcgaagctaccatgctgcgacttcggagggaccagaaagaggccctgttgcggttctgcgttacatggaataccaattctcgacactgccatgaagcacaggctgttctgggcgtcctgctccggagagaggcccctgaagagctccttgcatacgaaggtgtcagggcagccctcgaggcattgcttccctatactgagagacacttccagagactgtctcgaactcttcaagccgctgcctttctggatttcctctggcacaatatgaaacttccggtacctgcagcagcacccacgccatgggagacacacaagggggctctaccttag

SEQ ID NO: 165275 - DNA, 2427 bp, Artificial Sequence
  derived and/or modified sequence
atggccgaaacggccgcaggcgtgggcagatttaagactaactatgccgtggagcgcaaaattgaacccttctacaagggcggtaaggcccagttggaccaaacgggccagcacttgttttgcgtctgcggtacccgcgtgaacatcctcgaagtggcgtcgggagctgtcctccggtccctggaacaggaggaccaggaggatataacagccttcgacctgagcccagataacgaagtgctggtcaccgctagtcgggcacttctgctggcacaatgggcatggcaggagggttctgtgacacgcctgtggaaggctatccatacagcaccagtcgccacaatggccttcgacccaacctctactctactggccactggaggatgcgatggagccgtaagggtctgggatatagtccgccactatggcacccaccactttcgcggatcccctggagtggtgcacttagtggcctttcatccggacccaaccagattgctcctgtttagttccgctacggacgcggctatccgggtgtggagcctccaggaccggagttgcttggcggtgctcaccgcccactattctgccgtgacctccctcgccttctccgccgacggccataccatgctttcttcaggccgtgacaaaatatgtatcatttgggacctgcagtcatgccaggcgacgcggaccgtacccgtcttcgaatcggtcgaagccgctgtgcttctgcccgaggagccagttagtcaacttggtgtcaagtccccaggactctactttctgaccgcaggggaccaggggactctgagggtatgggaggctgcatcaggccaatgcgtttacacccaggcccagcctcctggcccaggccaggagctgactcattgcactttagcgcatacagctggggtcgtgctcacagccacagcagaccataacttactgctgtatgaagcccgttctctccggcttcaaaaacagttcgccggttactcagaagaagttcttgacgtacgcttcttggggcctgaggactctcacgttgtagtggcctctaatagcccatgcctcaaggtatttgagctgcagacctcagcttgccagatcctgcatgggcataccgacatcgtccttgcattggatgttttccgcaagggctggctgttcgcaagttgtgcaaaagatcagtcggttagaatctggagaatgaacaaagccggacaagtgatgtgtgttgcccagggcagtggacatacacatagcgtgggcactgtgtgctgctcaagactcaaggaatcatttcttgtgaccggaagtcaggactgcaccgtgaagctctggcccctccccaaggcgctgctgtctaagaacacagcacctgacaatggccctatcctgctccaggctcaaaccactcagagatgccacgataaggacattaactctgtcgctatcgctcccaatgataagctcctagcaacaggttctcaggacagaacggccaagctatgggccctcccgcagtgccagctcctgggcgtgttttctggccaccgcagaggcctgtggtgcgtgcagttttctccaatggaccaagttctagccaccgccagcgcagatggaaccatcaagctgtgggccttgcaggatttttcctgcctgaaaacctttgagggtcacgatgccagcgtgctcaaggttgcgttcgtgagtagaggtactcagttactgtcctccggatcggatggcttagtgaagctgtggactattaagaataatgagtgtgtgaggactctcgacgctcatgaggacaaagtatggggcctccactgcagtagactggatgaccatgcactgactggtgccagcgatagccgggttatcctgtggaaagacgtgactgaggctgaacaggccgaagagcaggctcggcaggaagaacaggtcgtgagacagcaggaattggataacctgttgcacgagaaaaggtatctgcgggctctgggtctggccatatccctggacaggccccacacggtacttacagtgatccaggcaatcagacgggatcctgaggcttgcgaaaagttagaggccactatgctccggttgaggcgggatcagaaagaagcattactccgcttctgcgtgacctggaacaccaattcacgccattgccatgaggcacaggcggtgctgggtgtgcttctgagacgtgaggctcctgaggagctgctcgcctatgaaggcgtgcgggctgccctagaagctctccttccctacactgaacggcattttcaaaggctgagtaggactcttcaggcagctgcctttctcgatttcttgtggcacaacatgaaactgcctgtgccagctgcagctcccacaccatgggagacccataagggggcattgccctag

SEQ ID NO: 165276 - DNA, 2620 bp, Artificial Sequence
  derived and/or modified sequence
gcgcggtgacgccatcgcagcgcgccgggagtgtggcgttctgtgaagagttcggtgctaacctccctcacgcggcggtggctgccgggaccctagcaggtttcagctggagcggcggcggcggcaacatggcagagaccgcggccggagtgggccgcttcaagaccaactatgctgtggagcgcaaaattgagcctttctacaagggcggaaaagcacagctggaccagactggccagcacctcttctgcgtctgtggcaccagagtcaacattctggaagtggcctcgggggccgtgctgcggagtctggagcaggaggaccaggaggacatcactgcctttgacctcagccctgacaacgaggtgctggtgacagccagtcgggcattgctgctggctcagtgggcctggcaagagggcagcgttacccgcctgtggaaggcgatacacacggcccccgtggccaccatggccttcgaccccacctccactctgctagccacaggtggctgtgatggggccgtgcgcgtctgggacatcgtgcggcactacgggacacaccacttccgaggctcgcccggtgtcgtgcacctagtggccttccacccggaccctacacgcctgctgctcttctcctcggccacggatgccgccatccgcgtgtggtcactgcaggaccggtcatgcctggctgtgctgactgcccactacagcgccgtcacctcactggccttcagcgccgacggccacaccatgctcagctccggccgtgacaagatatgtatcatctgggaccttcagagctgccaggccacgaggaccgtgcctgtgtttgagagcgtggaggctgctgtgctgttgccagaggagccagtgtcccagctgggtgtgaagtccccagggctgtactttctgacagctggcgaccaaggcactctgcgcgtgtgggaggcagcttctgggcagtgtgtgtacacgcaggcccagccgccgggccctgggcaggagctgacccactgcaccctggcacacaccgccggcgtggtcctcaccgccaccgccgaccacaacctgttgctctacgaggctcgctccctgcggctgcagaaacagttcgctggctacagtgaggaggttttggatgtccggtttcttgggcccgaggactcccacgttgtcgtggcctccaatagcccctgcctaaaagtgtttgagctgcagacgtcagcctgccagatcctccacggccacacggatatcgtcctggccctggatgtgttccggaaggggtggctctttgccagctgtgccaaggatcagagcgtccgtatctggagaatgaacaaggctggccaggtgatgtgcgtggctcagggttccggtcacacacacagtgtgggcaccgtctgctgctctaggctgaaggagtccttcctggtgacaggcagccaggactgcactgtgaagctgtggcctcttcccaaagccttgctgtccaagaacacagccccagacaacggccctatcctcctgcaggcccagaccactcagcgctgccatgataaggacatcaacagcgtggctattgcccccaacgacaagctgctggccacaggctcacaggaccgcacggccaagctctgggccctgccacagtgccagctgctgggtgtcttctcaggccaccggcgtggcctctggtgcgtccagttctctcccatggaccaggtgctggccacggcctcagctgatggcaccatcaagctctgggcactccaggacttcagctgtctcaagacatttgaggggcacgatgcttctgtgctgaaggtggcctttgtgagccgtggcacgcagctgctgtccagcggttcggatggcctcgtgaagctctggaccatcaagaacaacgagtgtgtgcggacgctggatgcccacgaggacaaggtctgggggctgcactgcagccggctggacgaccacgccctcactggggccagtgactcccgagtcatcctctggaaggatgtgaccgaggcggagcaggcagaggagcaggccaggcaagaggagcaggtggtcaggcagcaagagctggacaacctgctgcatgagaagcggtacctgcgggcgctgggcctggccatctccctggatcggccccacaccgtgctgactgtcatccaggccatccggagggaccctgaggcctgcgagaagctggaagccaccatgctccgactgcggcgcgaccagaaagaggccctgctgcgcttctgcgtcacgtggaacaccaactcgcggcactgccacgaggcccaggccgtgctgggtgtgctcttgaggcgagaggcccccgaggagctgctggcctacgaaggcgtgcgggcagcgcttgaggccctgctgccctacactgagcggcactttcagcggctcagcaggaccctccaggccgccgctttcttggacttcctgtggcacaacatgaagctccctgtgccggccgccgcccccaccccctgggaaacccataaaggcgcactgccctagccggtccggcctctctccagtccatcctgaacccctggaaaacccataaaggccgctctcctggc

SEQ ID NO: 165277 - DNA, 6803 bp, Artificial Sequence
  derived and/or modified sequence
gcgcggtgacgccatcgcagcgcgccgggagtgtggcgttctgtgaagagttcggtgctaacctccctcacgcggcggtggctgccgggaccctagcaggtttcagctggagcggcggcggcggcaacatggcagagaccgcggccggagtgggccgcttcaagaccaactatgctgtggagcgcaaaattgagcctttctacaagggcggaaaagcacagctggaccagactggccagcacctcttctgcgtctgtggcaccagagtcaacattctggaagtggcctcgggggccgtgctgcggagtctggagcaggaggaccaggaggacatcactgcctttgacctcagccctgacaacgaggtgctggtgacagccagtcgggcattgctgctggctcagtgggcctggcaagagggcagcgttacccgcctgtggaaggcgatacacacggcccccgtggccaccatggccttcgaccccacctccactctgctagccacaggtggctgtgatggggccgtgcgcgtctgggacatcgtgcggcactacgggacacaccacttccgaggctcgcccggtgtcgtgcacctagtggccttccacccggaccctacacgcctgctgctcttctcctcggccacggatgccgccatccgcgtgtggtcactgcaggaccggtcatgcctggctgtgctgactgcccactacagcgccgtcacctcactggccttcagcgccgacggccacaccatgctcagctccggccgtgacaagatatgtatcatctgggaccttcagagctgccaggccacgaggaccgtgcctgtgtttgagagcgtggaggctgctgtgctgttgccagaggagccagtgtcccagctgggtgtgaagtccccagggctgtactttctgacagctggcgaccaaggcactctgcgcgtgtgggaggcagcttctgggcagtgtgtgtacacgcaggcccagccgccgggccctgggcaggagctgacccactgcaccctggcacacaccgccggcgtggtcctcaccgccaccgccgaccacaacctgttgctctacgaggctcgctccctgcggctgcagaaacagttcgctggctacagtgaggaggttttggatgtccggtttcttgggcccgaggactcccacgttgtcgtggcctccaatagcccctgcctaaaagtgtttgagctgcagacgtcagcctgccagatcctccacggccacacggatatcgtcctggccctggatgtgttccggaaggggtggctctttgccagctgtgccaaggatcagagcgtccgtatctggagaatgaacaaggctggccaggtgatgtgcgtggctcagggttccggtcacacacacagtgtgggcaccgtctgctgctctaggctgaaggagtccttcctggtgacaggcagccaggactgcactgtgaagctgtggcctcttcccaaagccttgctgtccaagaacacagccccagacaacggccctatcctcctgcaggcccagaccactcagcgctgccatgataaggacatcaacagcgtggctattgcccccaacgacaagctgctggccacaggctcacaggaccgcacggccaagctctgggccctgccacagtgccagctgctgggtgtcttctcaggccaccggcgtggcctctggtgcgtccagttctctcccatggaccaggtgctggccacggcctcagctgatggcaccatcaagctctgggcactccaggacttcagctgtctcaagacatttgaggggcacgatgcttctgtgctgaaggtggcctttgtgagccgtggcacgcagctgctgtccagcggttcggatggcctcgtgaagctctggaccatcaagaacaacgagtgtgtgcggacgctggatgcccacgaggacaaggtctgggggctgcactgcagccggctggacgaccacgccctcactggggccagtgactcccgagtcatcctctggaaggatgtgaccgaggcggagcaggcagaggagcaggccaggcaagaggagcaggtggtcaggcagcaagagctggacaacctgctgcatgagaagcggtacctgcgggcgctgggcctggccatctccctggatcggccccacaccgtgctgactgtcatccaggccatccggagggaccctgaggcctgcgagaagctggaagccaccatgctccgactgcggcgcgaccagaaagaggccctgctgcgcttctgcgtcacgtggaacaccaactcgcggcactgccacgaggcccaggccgtgctgggtgtgctcttgaggcgagaggcccccgaggagctgctggcctacgaaggcgtgcgggcagcgcttgaggccctgctgccctacactgagcggcactttcagcggctcagcaggaccctccaggccgccgctttcttggacttcctgtggcacaacatgaagctccctgtgccggccgccgcccccaccccctgggaaacccataaaggcgcactgccctagccggtccggcctctctccagtccatcctgaacccctggaaaacccataaaggccgctctcctggccggctctgtctctctggactgcagtccagccccccaccctggccaacaccctacctagccagccagaagggcactggagctgatggtctcggccctgccacgcccatcccgcaccctggcctggcagagatccagcccgcggctccgcacgcttagacggtgggggtcatgcagaacaagctttactcagaggaacagcaaatggccccctcccatccctgctggccagggagatccgccctccccgctcctccccagccctgggatggcgcggtccatcccctcatcgggatcctcgcgctcactgctccgtcgtggggtgcggcacagagtccacgcaccctcgagggcggccctggcgccgtgggcgccgctccagggccctgcgtgtgacggtgcagcagcggctctggatggcgcccggcgaaggtcgggtgggcacggtggggggaggggcggtggcctgggagggttcagggaagccccgggcctcacccgccgggtcgtctcctccacggaaccccgtcccgctcaggagagcgcccagcccttccggccgcagcagcaccgcggggagtaggcccgcccggtcgccgtacctgcgaggggcggggtgtggttagggccccgcccgcctcggctagcctgccctgcccacgcccgctcccgcgtacctgcatagccaccagccgcggtctgacgtttccaacacgcgcacgcgcgcccccgcgggcacggacagctcatctgcgcggctgctctcgtaggcgcgggaagcacagaactggggacctggtgggagtgggtgtttggagtcaccgcggggccacagaggacgaggcccgcccgcacccttctccacattctccttgcttgagtctgctgacggcggggccgctctaagaccggttcggggcttcctctaggtgcggagaccaagcacgggctcctggcccgccctgcccgcggtgcttctggcccagtcttgccacacggtcaagccgcagtggtggcgtgaggggtggggttaggcgcataccgctgctccctagggacgggcctccctcccggccttggcccggggccgcctcctccaggtagggcgctggaaaccaggcggtctgccggtcttcgttctccaccagccaccagcctgtgcgcaagaagcgggcagggactcaaatctcgaggctccctcgggtccaggagcagaggagcaaatccctgggttcttggggggccctacctgaggggtgccgcagcagcacgtccaggctctcctgggcctgcgcctgaaaaggcctatcccgcgtgtcctgggtacagaagggctgcaggcagcgcaggctctgagcctccagactgtggatggagaggcggcccgcagcgcgagaaagaggctgctcctctggggtgggcaggatcacccggctgggaagggcagcccgtacgagtgagaggtaggcggatggggagggtgaaactgggggcgccaccccggcaagaccgccagcctcccactctctgcccctattcgctggctgttcccccccaccctggacctctcccagctccaaacgccgctgcatgctgggagtttggggcgagtcaggcacctgccgggtggcagcgcgggctccaggtccaggggttgcggtgcgaagaagccagtgatcgtcgggctccgtgccacgcgctctgcagtcgccagcagcctccgagaataggtttccaacagctgcaggcgcgccaggccgcggctcgtgcgccccacgcgtcccaacagtggtgcatcttaaggcaccacaaaaacgtactgtgatacgccgctttgggcttcactggtccctggcgcccccaggcaagccaccgccttccccgctcccgtacccaggctggcctgaccgagaagctttgggagaacgcggtcagatctccgcagcaggcccgcctccaccgggaaggtctccttgagggtcttctgagggcgggaaccagggcattggtcttccagagcccactgtgcacccttgagagggcggggtccctcacccggatggcaggggctgggagcttcagcagggacgaagggcctccagtgggagtcactgatgggaggcagtccagtgggaggcagccgcgtggggaagccgccaccgcggcatcagggtggcccagggtcactcaccttgagctgcctgaattcgtcccaactcctgcgcacgaaggtgtcgctgccgtctgaccagcgcacagagaaggcaaacgtctgggggacaaaaagttgggagtgccgtggaggtgctggtccaggcacccccttcctatcccttggggccactaaggacccagccaggtcttacttggagcctcttgatctgcaccagggctgccccttgcactgaaactgggtatcgggggcctgccatggctgtggcttccaggctgcagattcctgaaatgggcgaggacccttctgcctccccgtgcttgagagggctctgggggacccagaaaaccccctgggatagaatcctggcaacacctcaagcctgtggggtccttgtggagccgccccagctgagtcctttgcagctttcttgctgtcccccaagcccacgatctgggggcaggagcacagggattgggggacttccaggcagagctgctgggaggaagaagaagaatgagctttccagccctggaggcgtgcaagactgaagaaggggcgaagggtaggcgggactgctgcctggggccctcctgcctgcctctggccacaggaggagggaggagaaggcagggctaatcaaagcgccacctgtcctgcccacctctctggattcccctaccctgtgaggtaattgccctgccagggtgcgcccaacaactttgaactggcctggggatttctgtgcagaaccaaggactcagtgcttacagctttaagtgctttgtctgacttaatcctaatgctggaggaaaggtctcttaatgtccccaactcatagaggaggaaatgtgtgttaaatgcgtaattattgtgagctgttctatacatgctgggggaggggcagacctcacaggctcaccccaggggttcccctgcagtgaggagacttggggtaggagaaagagggcccatctgtgcagtcactggcatttggtgggtgggggtggtggtcagggaagtggtcactagggctgttttgagaaccacctctcaattcacgatttgccatgacttactgcaaacatggcctgggcagaggctcgcccaggtgccccacctctctggctgcttccttatagttcgggcttcggaagccacattcaaccctggcacacagtggtttttcctcgtgctggggccaccagttctgtgttgggatgcacctactccagccccttcagggagcagtcagcctctaaggcatccctccaggaagctgccctggctgcaacaaagggcctttgtgtgtctgtcccaccagcactctctctcatgccctcaagctgtccctggtcttggcatgggcaatgaacacctgctcacatagggctgatttgcagggttcccccagccagctgtcaccttctccctgtctcagctgagggcccagctgacctggtggggtccagcgtgtgaacccaggggagaccttgctcccctggaagacaggagaagctggggaggatttattcacaagcagaggcctagagggattctgaggccacctgcctaccccagctgacagctcctgccccacaccccatcagccctgcatggtttccactttttcctcccctaccctcttttcttgcctgaatagtacaccccaccctccatctgtatgctcctcacttgcccctacaaaatccactccaaggacagacacagtgcctcacctgtaatccaagtactttgggaggccgaggcagggggattgcttgagctcaggagttcgagaccagtctgggcaacatgttgagacctccatctgtgccccccaaaaatacaaaaattagctgggcgtggtggcgtgtgcctgtagtctacttgggaggctgaggtgggagatcacttgagcctaagcagtcgcggctgcagtgaacaagatcgcgccactgcactccaccctgggtaacggaacaagaccctgtctcaaaaaaaaaaaagaaa

SEQ ID NO: 165278 - protein, 209 aa, Artificial Sequence
  derived and/or modified sequence
MELNSLLILLEAAEYLERRDREAEHGYASVLPFDGDFAREKTKAAGLVRKAPNNRSSHNELEKHRRAKLRLYLEQLKQLVPLGPDSTRHTTLSLLKRAKVHIKKLEEQDRRALSIKEQLQQEHRFLKRRLEQLSVQSVERVRTDSTGSAVSTDDSEQEVDIEGMEFGPGELDSVGSSSDADDHYSLQSGTGGDSGFGPHCRRLGRPALS

SEQ ID NO: 165279 - protein, 58 aa, Artificial Sequence
  derived and/or modified sequence
MELNSLLILLEAAEYLERRDREAEHGYASVLPFDGDFAREKTKAAGLVRKAPNNRPPQ

SEQ ID NO: 165280 - DNA, 3773 bp, Artificial Sequence
  derived and/or modified sequence
ccgtcccggggcggacgggcgcgggcgggaggatggagctgaactccctgctgatcctgctggaggcggccgagtacctggagcgcagggatcgagaggccgagcacggctacgcctcggtgctgcccttcgacggcgacttcgccagggagaaaacaaaggcggccggcctggtgcgcaaggccccgaacaacaggtcttcacacaacgagctagaaaagcacagacgagccaaactcaggctgtaccttgagcagctcaagcaactggtgcccctgggccccgacagcacccgccacaccacgctgagcctcctgaagcgggccaaggtgcacatcaagaaactggaggagcaggaccgccgggcactgagcatcaaggagcagctgcagcaggagcatcgtttcctgaagcggcgcctggagcagctgtcggtgcagagcgtggagcgcgtgcgcacagatagcacgggctctgctgtctccacggacgactcagagcaagaagtggacatagagggcatggagtttggccctggtgagctggacagtgttggcagcagcagtgacgcggacgaccactacagcctgcagagtggcaccggcggcgacagtggcttcgggccccactgccggcggctgggccgccccgccctctcgtaggcccgtgccctctgctccttggcctgcctgcccgccagccacgcgtgtcagccctccagttctccttcagttgacgccagcctctccacaggcccactgctgtgccattctggaagctccagctgctgctgggctgcctggcactgcccgcttgccggtcagggcctgccgagctgcctgccccttccagctgggcagagtcccctgcaaggaggcagggcccagcttccacatccggagccctggtcagcatagccgcccacggtctgttctcagattcctaatcattccagaagtattaaacgtcattgctgcaaacctcggcaggtgccgtgtgaggggcttaatgaccaccacagggagctcagaccccaaccctggatcccaggagaaaggagtggaccgaggaaggaaggaaggcaaggctgtctgtccatccgtccgtctgtccacctacctgtcagtccacataggctcctggcgtggacaaggggtctgtgaagggcgggaactgggtgagcacctggggcaggtgggtggttaaggtccttcccacttcgcaggtgtcagaacctagggctgggctctcggggccaggcaggccagcccagcccacgccgagctgggcagcgtctgctctggtaggactgtcagacgcacacgcgcacgcacctagacacacccactcatgtacatgctcacacatgcagacacacctgggcgtcccgaggtcacatgttctggggatgatggccttcaggggtcatctggcaaacagcccctgggctgtgcctggatccccctctagctcctgctcacccacgcccacccagtagtcctgcctgtctgcacaggagaggggcttctcttcctggctggggctggggtgaactggaggctggttaagttgcagccgctgggtcctcgggggcttactcatctcccttttttaaacaaaaagcaaaaaagtaaaatgctgcactgcccagcagcccggttagggctcctggagccaccttaggaaagggcttctcatgagctctgctgcggcagcttcagctggcagagaggctttcccagaaaaaaaaaaaaaaccatttttaaaaagaagaaagcctaaagactctcggcctagggacgtccgtgtgtgccgcctctgtttcctgtaccagatttttgtattctattttcctagctgttgttgcgtccttgtttgctgaggggtgggagccacccagcgtctcagggacctgtccctccgtcacgtcgtcaaagtgtgccttgtgtcttgtgtcaggccttgcccttcccaccagcatgtccctcgtggctcagggtgccccaggcctgcccagctagtgctgtcctcccatctcctgtgggcagcccctcccggcagccagggcttcctggaggcgatgcagccaggcccctgtgggtggcacggaggggctgtgacctggtccccagtgttgccctccccagtggctggcaggggcctgcttgctcactagagagatggattctcacctgtcacctgactcgagccccctgcttcctggcctaggcgagggttccaggtttcagacactggcagccaatgaagactgtgctcgctgggtggtgcaggcctggcaccaggaggcttgcacccgcctttccttcctgacgtcctctgtccttggggctggcccatagcagtgcctgccgtgcctctggtacatctgtagccaattcccatatcatggggaaaattcgtgtctattttcagtcgtacgcatagacgccccaggatggggggcccactgtggcggaagggggtccctggaaacaactctggcacagaacctgccctgcaggctgtagggggcatggtgcctggagctgaggggcatccgaacgcgttgcgggtggttgtgaggaggcctgtctgcatctccttccggccccactggggtccaggggtgcccagaaaggagcttcccctgcctgcctgagtctgtccccccaggcttcatttcaaacaccgtggcacctccgagcaaggcgggccgtgtgtaaaagcttgcttccccagccagcactgcagggccctgaggtggtcgtgtccctgccctcaattcttgaagcaccagctccctgccccaccctccagtgcctgaggcagctaggggcttctgctctcatctctgaccagcagaatccacccggtgaccagtggtggcccctcagcccaccctcccggcagctcagcctgtggctcttgaggccgtggttcccacgtggactgggaggcagtctcagccacccggggtgctgttcagctgcccctccctgccatcagcaggtgggtgaggggttgcccactgggtgggggcccgtgctaggagtcaccacatgctccaacctcccactgctccctgtcaggggcccaggctgccatcactggaggctgcagggaccaagaggccatcaccgtgtctatagagagcagacagaagcagaacagagcccggggctcctgagcctctgcgtgtgccctcccagcccacaccagtgctctcggccactgagcacccagactcaggcttgggttccccagccttattggaaggcagctcccgcataccaggataacccccgcaaaccacatagcagacccccgccatcctcgcagagtgggagaggctgcagcaaggctttgcctctgcagaccccatcttagtggcacggtgcttgggcctgtgtccccgggtggtggaaccctgtaccggtctgtggccctagggtccctgctctgtctgccccggcccgtgctgtccgctgggtgaggcaggctcccccgtgccctgcctccctctgtcagggaacctgggaccccctccccactgcctgcacagaggaccctgaccctcggccagcagggtggccccaggtccatgttgggcactagggcaggttccgtgccagagtcgggggccacacgagggcctggtgccggtgaggggggcgtgcgctagagggggaaaggggcccccggccacctgtccaccgtgtgggccgtgctgtgtccttatgtcattgtaatataaatacagatttttatatctc

SEQ ID NO: 165281 - DNA, 4056 bp, Artificial Sequence
  derived and/or modified sequence
atcccagcccagctctgcatctgtcaacattctcggcccggcccgaggcgctcgacccgtccccattggccccagcccggcccggcgcccgcccccggggcgcgaacgccgcctcccattggctctgcgggccgccgctctcccttatgtgtcaatttgagggcctgaggcggagggtggcggccgagcgccggagtccgcggagtctggaagtgcggcggccgggcgcgcggggtgggcggcgagcggagccggccggagcgggccgggcagcggccgccgccgtcccggggcggacgggcgcgggcgggaggatggagctgaactccctgctgatcctgctggaggcggccgagtacctggagcgcagggatcgagaggccgagcacggctacgcctcggtgctgcccttcgacggcgacttcgccagggagaaaacaaaggcggccggcctggtgcgcaaggccccgaacaacaggtcttcacacaacgagctagaaaagcacagacgagccaaactcaggctgtaccttgagcagctcaagcaactggtgcccctgggccccgacagcacccgccacaccacgctgagcctcctgaagcgggccaaggtgcacatcaagaaactggaggagcaggaccgccgggcactgagcatcaaggagcagctgcagcaggagcatcgtttcctgaagcggcgcctggagcagctgtcggtgcagagcgtggagcgcgtgcgcacagatagcacgggctctgctgtctccacggacgactcagagcaagaagtggacatagagggcatggagtttggccctggtgagctggacagtgttggcagcagcagtgacgcggacgaccactacagcctgcagagtggcaccggcggcgacagtggcttcgggccccactgccggcggctgggccgccccgccctctcgtaggcccgtgccctctgctccttggcctgcctgcccgccagccacgcgtgtcagccctccagttctccttcagttgacgccagcctctccacaggcccactgctgtgccattctggaagctccagctgctgctgggctgcctggcactgcccgcttgccggtcagggcctgccgagctgcctgccccttccagctgggcagagtcccctgcaaggaggcagggcccagcttccacatccggagccctggtcagcatagccgcccacggtctgttctcagattcctaatcattccagaagtattaaacgtcattgctgcaaacctcggcaggtgccgtgtgaggggcttaatgaccaccacagggagctcagaccccaaccctggatcccaggagaaaggagtggaccgaggaaggaaggaaggcaaggctgtctgtccatccgtccgtctgtccacctacctgtcagtccacataggctcctggcgtggacaaggggtctgtgaagggcgggaactgggtgagcacctggggcaggtgggtggttaaggtccttcccacttcgcaggtgtcagaacctagggctgggctctcggggccaggcaggccagcccagcccacgccgagctgggcagcgtctgctctggtaggactgtcagacgcacacgcgcacgcacctagacacacccactcatgtacatgctcacacatgcagacacacctgggcgtcccgaggtcacatgttctggggatgatggccttcaggggtcatctggcaaacagcccctgggctgtgcctggatccccctctagctcctgctcacccacgcccacccagtagtcctgcctgtctgcacaggagaggggcttctcttcctggctggggctggggtgaactggaggctggttaagttgcagccgctgggtcctcgggggcttactcatctcccttttttaaacaaaaagcaaaaaagtaaaatgctgcactgcccagcagcccggttagggctcctggagccaccttaggaaagggcttctcatgagctctgctgcggcagcttcagctggcagagaggctttcccagaaaaaaaaaaaaaaccatttttaaaaagaagaaagcctaaagactctcggcctagggacgtccgtgtgtgccgcctctgtttcctgtaccagatttttgtattctattttcctagctgttgttgcgtccttgtttgctgaggggtgggagccacccagcgtctcagggacctgtccctccgtcacgtcgtcaaagtgtgccttgtgtcttgtgtcaggccttgcccttcccaccagcatgtccctcgtggctcagggtgccccaggcctgcccagctagtgctgtcctcccatctcctgtgggcagcccctcccggcagccagggcttcctggaggcgatgcagccaggcccctgtgggtggcacggaggggctgtgacctggtccccagtgttgccctccccagtggctggcaggggcctgcttgctcactagagagatggattctcacctgtcacctgactcgagccccctgcttcctggcctaggcgagggttccaggtttcagacactggcagccaatgaagactgtgctcgctgggtggtgcaggcctggcaccaggaggcttgcacccgcctttccttcctgacgtcctctgtccttggggctggcccatagcagtgcctgccgtgcctctggtacatctgtagccaattcccatatcatggggaaaattcgtgtctattttcagtcgtacgcatagacgccccaggatggggggcccactgtggcggaagggggtccctggaaacaactctggcacagaacctgccctgcaggctgtagggggcatggtgcctggagctgaggggcatccgaacgcgttgcgggtggttgtgaggaggcctgtctgcatctccttccggccccactggggtccaggggtgcccagaaaggagcttcccctgcctgcctgagtctgtccccccaggcttcatttcaaacaccgtggcacctccgagcaaggcgggccgtgtgtaaaagcttgcttccccagccagcactgcagggccctgaggtggtcgtgtccctgccctcaattcttgaagcaccagctccctgccccaccctccagtgcctgaggcagctaggggcttctgctctcatctctgaccagcagaatccacccggtgaccagtggtggcccctcagcccaccctcccggcagctcagcctgtggctcttgaggccgtggttcccacgtggactgggaggcagtctcagccacccggggtgctgttcagctgcccctccctgccatcagcaggtgggtgaggggttgcccactgggtgggggcccgtgctaggagtcaccacatgctccaacctcccactgctccctgtcaggggcccaggctgccatcactggaggctgcagggaccaagaggccatcaccgtgtctatagagagcagacagaagcagaacagagcccggggctcctgagcctctgcgtgtgccctcccagcccacaccagtgctctcggccactgagcacccagactcaggcttgggttccccagccttattggaaggcagctcccgcataccaggataacccccgcaaaccacatagcagacccccgccatcctcgcagagtgggagaggctgcagcaaggctttgcctctgcagaccccatcttagtggcacggtgcttgggcctgtgtccccgggtggtggaaccctgtaccggtctgtggccctagggtccctgctctgtctgccccggcccgtgctgtccgctgggtgaggcaggctcccccgtgccctgcctccctctgtcagggaacctgggaccccctccccactgcctgcacagaggaccctgaccctcggccagcagggtggccccaggtccatgttgggcactagggcaggttccgtgccagagtcgggggccacacgagggcctggtgccggtgaggggggcgtgcgctagagggggaaaggggcccccggccacctgtccaccgtgtgggccgtgctgtgtccttatgtcattgtaatataaatacagatttttatatctca

SEQ ID NO: 165282 - DNA, 1483 bp, Artificial Sequence
  derived and/or modified sequence
cgcggagtctggaagtgcggcggccgggcgcgcggggtgggcggcgagcggagccggccggagcgggccgggcagcggccgccgccgtcccggggcggacgggcgcgggcgggaggatggagctgaactccctgctgatcctgctggaggcggccgagtacctggagcgcagggatcgagaggccgagcacggctacgcctcggtgctgcccttcgacggcgacttcgccagggagaaaacaaaggcggccggcctggtgcgcaaggccccgaacaacaggcctcctcagtgagcaagcccggcccccgctgccgcttctctccaaaccaagtccctgacccgtggagaactctggggcgtgagctggggctcccccagcatggagaatccaaagctgacaaccagcgtcctggccaaggctgcccgaacactgcctctatgctgagcgtttcacacatgcagccagttcatcttcaccccaggctcagagaggtcttcacacaacgagccattctggaagctccagctgctgctgggctgcctggcactgcccgcttgccggtcagggcctgccgagctgcctgccccttccagctgggcagagtcccctgcaaggaggcagggcccagcttccacatccggagccctggtcagcatagccgcccacggtctgttctcagattcctaatcattccagaagtattaaacgtcattgctgcaaacctcggcaggtgccgtgtgaggggcttaatgaccaccacagggagctcagaccccaaccctggatcccaggagaaaggagtggaccgaggaaggaaggaaggcaaggctgtctgtccatccgtccgtctgtccacctacctgtcagtccacataggctcctggcgtggacaaggggtctgtgaagggcgggaactgggtgagcacctggggcaggtgggtggttaaggtccttcccacttcgcaggtgtcagaacctagggctgggctctcggggccaggcaggccagcccagcccacgccgagctgggcagcgtctgctctggtaggactgtcagacgcacacgcgcacgcacctagacacacccactcatgtacatgctcacacatgcagacacacctgggcgtcccgaggtcacatgttctggggatgatggccttcaggggtcatctggcaaacagcccctgggctgtgcctggatccccctctagctcctgctcacccacgcccacccagtagtcctgcctgtctgcacaggagaggggcttctcttcctggctggggctggggtgaactggaggctggttaagttgcagccgctgggtcctcgggggcttactcatctcccttttttaaacaaaaagcaaaaaagtaaaatgctgcactgcccagcagcccggttagggctcctggagccaccttaggaaagggcttctcatgagctctgctgcggcagcttcagctggcagagaggctttccc

SEQ ID NO: 165283 - DNA, 630 bp, Artificial Sequence
  derived and/or modified sequence
atggagcttaactcgttactcatcttactggaggccgctgagtacctcgagaggcgtgatcgcgaagctgagcacgggtatgccagtgtcctgccctttgacggcgattttgcccgcgagaaaacaaaagcggcgggactggtcagaaaggccccaaacaataggtcatctcacaatgagctggagaaacatcgccgtgccaagcttaggctgtacttagagcagctgaagcagctggttcctctggggcccgattccactcgccacacaaccctaagcctgctcaagcgggcgaaggtccatatcaaaaagctggaagagcaggataggcgggctctgtccattaaggagcagctgcaacaggaacaccgctttctgaagcgcagactggagcagctgagtgttcagtctgtggaacgagtgagaaccgatagtactgggtccgccgtgtcaaccgacgacagcgagcaggaagtcgatattgaagggatggagttcggccccggtgagctagacagtgtcggcagttccagcgatgccgatgaccattacagcctgcagagcggtactgggggggattccggctttgggccccattgccgccggctgggtcggccagctctcagctag

SEQ ID NO: 165284 - DNA, 177 bp, Artificial Sequence
  derived and/or modified sequence
atggagcttaacagcttgctgatccttctggaggccgcagagtacctggagagaagagaccgggaggccgagcatggatatgcctccgttctgccatttgacggggattttgcccgggaaaagaccaaagccgctggcttggtgcgtaaggccccaaacaaccggccgcctcagtag

SEQ ID NO: 165285 - DNA, 630 bp, Artificial Sequence
  derived and/or modified sequence
atggagctgaacagcctgctgatcctgctggaggccgctgagtacctggagcggcgggaccgggaggccgagcacggctacgcctctgtgctgccctttgatggagactttgcccgggagaagaccaaggctgctggcctggtgaggaaggcccccaacaacagaagcagccacaatgagctggagaagcacagaagagccaagctgcggctgtacctggagcagctgaagcagctggtgcccctgggccctgacagcaccaggcacaccaccctgagcctgctgaagagggccaaggtgcacatcaagaagctggaggagcaggaccggcgggccctgagcatcaaggagcagctgcagcaggagcaccgcttcctgaagaggcggctggagcagctgtctgtgcagagcgtggagcgggtgaggacagacagcacaggcagcgctgtgtccacagatgattctgagcaggaggtggacatcgagggcatggagtttggacctggagagctggacagcgtgggcagcagcagtgatgctgatgaccactacagcctgcagagcggcaccggcggggacagcggcttcggcccccactgccggcggctgggccggcctgccctgtcctag

SEQ ID NO: 165286 - DNA, 177 bp, Artificial Sequence
  derived and/or modified sequence
atggagctgaacagcctgctgatcctgctggaggccgctgagtacctggagcggcgggaccgggaggccgagcacggctacgcctctgtgctgccctttgatggagactttgcccgggagaagaccaaggctgctggcctggtgaggaaggcccccaacaaccggcccccccagtag

SEQ ID NO: 165287 - DNA, 630 bp, Artificial Sequence
  derived and/or modified sequence
atggagctgaacagcctgctgatcctgctggaggccgccgagtacctggagagacgcgaccgggaggccgagcatgggtacgctagcgtgcttccctttgacggagacttcgcacgcgagaagacaaaagccgccggactcgttcggaaagcccccaataataggtccagtcacaacgagcttgaaaaacacaggagagcaaagcttcgtctatacttggagcagctcaaacaacttgtcccactaggccccgatagcacccgccatacaactctatcactgctgaaacgcgccaaggtccatatcaagaaactggaggagcaagatcggcgcgccctgtcaatcaaggaacagctccagcaagagcatagatttcttaagcgcagacttgagcaactgtctgtgcaatccgttgagagagtccgaacagacagcacagggtctgccgtttccaccgacgattctgagcaagaggtcgacattgagggaatggaatttggcccaggggaactggattctgtcgggtcctcctcggatgccgatgatcactattcattacagagcggcaccggcggcgactccgggtttggccctcactgtcggcggctgggaagacccgctctatcatag

SEQ ID NO: 165288 - DNA, 177 bp, Artificial Sequence
  derived and/or modified sequence
atggagctgaacagcctgctgatcctgctggaggccgccgagtacctggagcgtcgggaccgcgaggcagagcacgggtatgctagcgtgcttcctttcgatggcgattttgcaagggaaaaaacaaaggccgcagggcttgtacgcaaggcacctaacaatcggccaccacagtag

SEQ ID NO: 165289 - DNA, 630 bp, Artificial Sequence
  derived and/or modified sequence
atggagctgaatagccttctgatcctgctggaggctgcagagtacctggagagaagagatcgggaagcagagcatggttatgcgtccgtcctgccctttgatggtgacttcgcccgagagaagaccaaagcagcgggtctggttcgcaaggccccaaataatcgatcctcacacaatgaactggagaaacaccgcagagccaagttgaggctgtacttagaacagctgaagcagctggtacctctcggccctgattctacgcgacacacaaccctgagccttctgaaaagggccaaagtgcacatcaaaaagttagaggagcaggacaggagggccctgtcaatcaaagaacagttacagcaggagcatcgctttctgaaacggaggctcgagcagttgagtgtgcagagcgtggagagagtccggaccgacagcaccggcagtgcagtgagtacggatgactcagagcaggaagttgatatcgaagggatggagtttggcccaggagaactggacagtgtaggctccagtagcgacgcagatgaccactactctctgcagagtgggaccgggggagatagcgggttcggaccacactgtcgcagactcggccgtccagccctgtcgtag

SEQ ID NO: 165290 - DNA, 177 bp, Artificial Sequence
  derived and/or modified sequence
atggaactgaactccctgttgattctgcttgaggcagcagagtacttggagagaagagatagggaggctgagcacggatacgcctcagtcctgccatttgacggcgattttgccagggagaagaccaaagcagccggtcttgtgcgcaaggccccaaataaccgcccaccccagtag

SEQ ID NO: 165291 - DNA, 630 bp, Artificial Sequence
  derived and/or modified sequence
atggagctgaacagcctgctgatcctgctggaggccgccgagtacctggagagaagagacagagaggccgagcacggctacgccagcgtgctgcccttcgacggcgacttcgccagagagaagaccaaggccgccggcctggtgagaaaggcccccaacaacagaagcagccacaacgagctggagaagcacagaagagccaagctgagactgtacctggagcagctgaagcagctggtgcccctgggccccgacagcaccagacacaccaccctgagcctgctgaagagagccaaggtgcacatcaagaagctggaggagcaggacagaagagccctgagcatcaaggagcagctgcagcaggagcacagattcctgaagagaagactggagcagctgagcgtgcagagcgtggagagagtgagaaccgacagcaccggcagcgccgtgagcaccgacgacagcgagcaggaggtggacatcgagggcatggagttcggccccggcgagctggacagcgtgggcagcagcagcgacgccgacgaccactacagcctgcagagcggcaccggcggcgacagcggcttcggcccccactgcagaagactgggcagacccgccctgagctag

SEQ ID NO: 165292 - DNA, 177 bp, Artificial Sequence
  derived and/or modified sequence
atggagctgaacagcctgctgatcctgctggaggccgccgagtacctggagagaagagacagagaggccgagcacggctacgccagcgtgctgcccttcgacggcgacttcgccagagagaagaccaaggccgccggcctggtgagaaaggcccccaacaacagacccccccagtag

SEQ ID NO: 165293 - protein, 437 aa, Artificial Sequence
  derived and/or modified sequence
MARVAWGLLWLLLGSAGAQYEKYSFRGFPPEDLMPLAAAYGHALEQYEGESWRESARYLEAALRLHRLLRDSEAFCHANCSGPAPAAKPDPDGGRADEWACELRLFGRVLERAACLRRCKRTLPAFQVPYPPRQLLRDFQSRLPYQYLHYALFKANRLEKAVAAAYTFLQRNPKHELTAKYLNYYQGMLDVADESLTDLEAQPYEAVFLRAVKLYNSGDFRSSTEDMERALSEYLAVFARCLAGCEGAHEQVDFKDFYPAIADLFAESLQCKVDCEANLTPNVGGYFVDKFVATMYHYLQFAYYKLNDVRQAARSAASYMLFDPKDSVMQQNLVYYRFHRARWGLEEEDFQPREEAMLYHNQTAELRELLEFTHMYLQSDDEMELEETEPPLEPEDALSDAEFEGEGDYEEGMYADWWQEPDAKGDEAEAEPEPELA

SEQ ID NO: 165294 - protein, 426 aa, Artificial Sequence
  derived and/or modified sequence
MARVAWGLLWLLLGSAGAQYEKYSFRGFPPEDLMPLAAAYGHALEQYEGESWRESARYLEAALRLHRLLRDSEAFCHANCSGPAPAAKPDPDGGRADEWACELRLFGRVLERAAFQVPYPPRQLLRDFQSRLPYQYLHYALFKANRLEKAVAAAYTFLQRNPKHELTAKYLNYYQGMLDVADESLTDLEAQPYEAVFLRAVKLYNSGDFRSSTEDMERALSEYLAVFARCLAGCEGAHEQVDFKDFYPAIADLFAESLQCKVDCEANLTPNVGGYFVDKFVATMYHYLQFAYYKLNDVRQAARSAASYMLFDPKDSVMQQNLVYYRFHRARWGLEEEDFQPREEAMLYHNQTAELRELLEFTHMYLQSDDEMELEETEPPLEPEDALSDAEFEGEGDYEEGMYADWWQEPDAKGDEAEAEPEPELA

SEQ ID NO: 165295 - DNA, 2284 bp, Artificial Sequence
  derived and/or modified sequence
atggctcgggtggcgtgggggctgctgtggttgctgctgggcagcgccggggcgcagtacgagaagtacagcttccggggcttcccgcccgaggacctgatgccgctggccgcggcgtacgggcacgctctggagcagtacgagggagagagctggcgcgagagcgcgcgctacctggaggcggcgctgcggctgcaccggctcctgcgcgacagcgaggccttctgccacgccaactgcagcggccccgcgcccgcggccaagcccgatcccgacggcggccgcgcagacgagtgggcctgcgagctgcggctcttcggccgcgtcctggagcgagccgccttccaggtgccctacccgccgcggcagctgctgcgtgacttccagagccgcctgccctaccagtacctgcactacgcgctgttcaaggctaaccggctggagaaggcggtggcggcggcctacaccttcctccagaggaacccgaagcacgagctgaccgccaagtatctcaactactatcaggggatgctggacgtcgccgacgagtccctcacggacctagaggcccagccctacgaggccgtgttcctccgggctgtgaagctctacaacagcggggatttccgcagcagcacggaggacatggagcgggccttgtcagagtacctggcagtctttgcccggtgcctggccggctgtgaaggggcccatgagcaggtggacttcaaggacttctacccggccatagcagatctctttgcagagtccctgcagtgcaaggtggactgtgaggccaatttgacccccaatgtgggtggctacttcgtggacaagttcgtggccaccatgtaccactacctgcagtttgcctactataagttgaatgatgtgcgccaggctgcccgcagcgccgccagctacatgctcttcgaccccaaggacagcgtcatgcagcagaacctggtgtattaccggttccaccgggctcgctggggcctggaagaggaggacttccagccccgggaggaggccatgctctaccacaaccagaccgccgagctgcgggagctgctggagttcacccacatgtacctgcagtcagatgatgagatggagctggaggagacagaaccgcccctggagcctgaggatgccctatctgacgccgagtttgagggggagggtgactacgaggagggcatgtatgctgactggtggcaggagccggatgccaagggtgacgaggccgaggctgagccagagcctgaactcgcatgagaaggggacaccccacaccgctcaagcttgggaagcctggtgccgatggccccaccctcaccagcctgggcagcagcaagaactatttattaaaaacttaagatgggccaggtgcggtggctcacacctgtaatcccagcattttgggaggccaaggtgggtggatcacttgaggccaggagttcaagaccagcctggccaacatgatgagacctccgtctctactaaaatacataaattagccgggtgtggtggcaggcgcctgaaatcccagctactcaagaggctgaggcaggagaatcgcttgaacctgggaggcaaaggttgcagtgaactgagattgcgccaccgcactccagcctgggcgacagagcgagactccatctttaaaaaaaaacaagacgggccggcacggtggctcacgcctgtaatcccagcactgagaggccgatcacttgaggtcaggagttcaagaccagcctggccaacatggtgaaaccccatctctactaaaaaatacaaaaattagccaggcatggtggcacacacctgtaatcgtagctgaggcaggagaatcgcctgaacccaggaggcggagcttgcagtgagccgagatcgtgccactgcactccagcctgggcgacagagtgagactccatctcaaaaaaaaaaaaaaaaacttaagatggacacagctgactggacccccatcctgcctcacccatgggtgctgcaccccagacccatcctgccacttctatgtctctggaccacaggatggtggtggcattgcaggttggcaagtgggctgatggggtccgccctcctcactgctgagctcctcacctggacagtctcctggacaaggagtttccagctgctggctggagtctcaggccaaattgcagagggtcctccagggtcctgaagagcactggactaagagtctagtggttccagggccctgaccagtaggtgctcaataaatgtttgttgttgaatg

SEQ ID NO: 165296 - DNA, 1314 bp, Artificial Sequence
  derived and/or modified sequence
atggcccgggtggcttggggtctgctctggcttttactggggtccgccggcgcacagtacgagaagtactcattcaggggttttccaccagaagaccttatgcctctggctgcagcgtatggacatgccctggaacaatatgagggagaatcgtggagagaatcggctaggtacctggaggcagccctgcgattgcataggctattgagggactccgaagcgttttgccatgccaattgctcaggtcccgccccagccgcaaaacctgaccccgatggaggaagagccgatgaatgggcctgcgagctgcgacttttcggcagggtgctggaaagagctgcttgtcttcgacggtgcaagaggaccttgcctgcattccaggtgccttacccaccccggcaactactgcgtgacttccaatccaggttgccataccaatacctacactacgccctgttcaaggctaatagactggagaaagccgtcgccgcagcctatacctttctgcagagaaatcccaaacacgaacttactgccaaatacctgaactactaccaggggatgctggacgtggccgacgagtctcttacagacctggaagcccaaccttatgaagccgtctttcttcgagcggtgaaactgtataacagcggagatttccgatcctctactgaagatatggaaagagccctcagcgagtatctggctgtattcgcacggtgtctggcgggctgcgagggcgcacatgagcaggtagacttcaaggacttttaccctgcaatcgccgatctgttcgccgagtctcttcaatgtaaggtcgattgtgaggccaatctgaccccaaacgtcggaggctattttgtcgataaattcgtggcaacaatgtatcattacctgcagttcgcttactacaagttgaacgacgttagacaggctgcacggagcgctgcctcgtatatgctgttcgaccctaaagacagcgttatgcagcagaatctcgtgtattatagattccaccgtgcccgatggggcttagaagaggaggactttcaacctagagaagaggctatgttgtaccataaccagaccgcagagttgcgggaactgctggagtttacccacatgtacctgcaatctgacgacgaaatggaactggaagaaaccgaaccaccactggagcctgaagacgccctttccgacgcggaattcgagggtgaaggagattatgaagagggcatgtacgctgattggtggcaggaaccagacgcgaagggcgacgaagctgaagcggagccagagccggagttggcgtag

SEQ ID NO: 165297 - DNA, 1314 bp, Artificial Sequence
  derived and/or modified sequence
atggctcgggtagcatggggactcctgtggctgttgctcggtagcgccggcgcccagtacgaaaagtactcatttcgagggttccccccggaggatctcatgccactggccgccgcatatggccacgccctggagcagtatgaaggcgaatcctggcgcgagtctgctcgatacctcgaagccgccctgcgactacatagattgttgcgcgattccgaggccttttgtcatgctaattgctcaggtcccgccccagccgcaaaacctgatcctgatgggggacgagctgacgagtgggcttgcgaactccgtctattcgggagagtactcgagcgcgcagcctgcctgcggaggtgcaaacgcaccctacctgcctttcaagtgccctacccaccacgccaactcctccgggacttccaatcaaggttaccttaccagtacttacattacgcactcttcaaagccaaccggctggaaaaggccgtggcagcagcctacacattcttgcagcggaatcctaaacacgaactgacggccaaatatctgaactattatcaagggatgttggatgtggctgatgaatctctcactgacctcgaggcccagccttacgaggcggtcttcttacgtgctgtaaagttatacaatagcggtgatttcaggtcctcaaccgaagacatggaacgcgcactgtccgagtacctcgccgtgttcgctcggtgtcttgccggctgcgagggcgcccacgaacaagtagattttaaagacttctatcctgctatcgccgatctcttcgccgagagtctccagtgcaaggtagactgtgaagccaatctaacccctaatgtgggcgggtattttgttgataagtttgtagctacaatgtatcattacctgcagtttgcatattacaagctcaacgatgttagacaagccgcccggtcagctgccagctatatgctgttcgaccccaaggattccgtgatgcagcagaacctggtctactacaggttccacagggcgagatgggggttagaagaggaagactttcagcctcgggaggaagctatgctataccataaccagacagccgagctgcgtgaactactggagttcacacacatgtatctccagtcagacgatgaaatggagcttgaggagactgaaccgccgctggaaccagaagatgccctcagcgatgccgagtttgagggcgagggagattatgaagaaggaatgtatgctgattggtggcaagaacctgacgcaaagggagatgaagcagaagcagaaccagagcccgaactagcatag

SEQ ID NO: 165298 - DNA, 1281 bp, Artificial Sequence
  derived and/or modified sequence
atggcccgggtggcatgggggttgttgtggctgctcctgggatccgctggggcccaatacgaaaagtattctttccgggggttccctcccgaggacctcatgcccttggctgccgcctacggtcatgcactagaacagtacgagggagagagttggagagagagtgcccgatatctggaagccgctctacgcctccaccgtcttttgagggatagtgaagcgttttgtcatgccaattgttcagggcccgctcccgccgccaaacccgatcctgatggggggcgggctgacgagtgggcatgcgaacttaggctgtttggtagagtactggagcgcgcggcgttccaggtgccttaccctccgcgccaactgctccgggactttcagagtagactgccgtatcagtaccttcactatgctctcttcaaagccaatcggctggagaaggccgtcgccgccgcttataccttcctgcaacggaatcccaaacacgagttgacagcaaaatatttgaattattaccaaggcatgctggatgtggccgatgagtcccttactgatttggaggcccaaccttacgaagccgtattcctcagagcagtgaagctctacaacagcggagacttccgctccagtacagaggacatggagagggcgctgagtgagtatctggcagtgttcgcaaggtgtctagctggatgcgagggggcacacgagcaagtggattttaaagacttctatcctgccattgccgatctgttcgctgagtcgcttcaatgcaaagtggactgtgaggcaaacctgacccctaatgtgggggggtatttcgttgataaatttgtggcgaccatgtaccattatctacagtttgcatattataagttgaacgacgtgagacaagcagctaggagcgctgcctcctatatgctgttcgatcctaaagattccgttatgcaacagaacctcgtgtattaccggtttcatcgcgctagatgggggctcgaagaggaggacttccagcctcgggaggaagccatgctctatcacaatcaaacagccgagcttcgggagctgctggagttcacccacatgtatcttcagagcgacgacgagatggagctagaagagacggagccgcccctagaacccgaagatgcactgagcgacgcagaattcgagggagagggcgactacgaagagggaatgtacgctgactggtggcaggagccagatgccaaaggagacgaagccgaggcagagcccgagcctgagctcgcgtag

SEQ ID NO: 165299 - DNA, 1314 bp, Artificial Sequence
  derived and/or modified sequence
atggcccgggtggcctggggcctgctgtggctgctgctgggcagcgctggggcccagtatgagaagtacagcttccggggcttccccccagaggacctgatgcccctggccgccgcctacggccacgccctggagcagtatgaaggagagagctggagggagagcgcccgctacctggaggccgccctgcggctgcaccggctgctgcgggacagcgaggccttctgccacgccaactgcagcggccctgccccagctgccaagccagaccctgatggcggccgggcagatgagtgggcctgtgagctgcggctgtttggccgggtgctggagagagctgcctgcctgcggcgctgcaagaggaccctgcctgccttccaggtgccctacccaccccggcagctgctgcgggacttccagagccggctgccctaccagtacctgcactacgccctcttcaaggccaaccggctggagaaggctgtggccgccgcctacaccttcctgcagaggaaccccaagcatgagctgacagccaagtacctgaactactaccagggcatgctggatgtggctgatgagagcctgacagacctggaggcccagccctatgaggccgtgttcctgcgggctgtgaagctgtacaacagcggggacttccgcagcagcacagaggacatggagcgggccctgtctgagtacctggccgtgtttgcccgctgcctggccggctgtgagggcgcccacgagcaggtggacttcaaggacttctacccagccatcgctgacctgtttgctgagagcctgcagtgcaaggtggactgtgaggccaacctgacccccaacgtgggcggctactttgtggacaagtttgtggccaccatgtaccactacctgcagtttgcctactacaagctgaatgatgtgcggcaggccgcccggtctgctgccagctacatgctgtttgaccccaaggacagcgtgatgcagcagaacctggtgtactaccgcttccaccgggcccgctggggcctggaggaggaggacttccagccccgggaggaggccatgctgtaccacaaccagacagctgagctgcgggagctgctggagttcacccacatgtacctgcagagtgatgatgagatggagctggaggagacagagccccccctggagccagaagatgccctgagtgatgctgagtttgaaggagagggggactatgaggagggcatgtatgctgactggtggcaggagccagatgccaagggagatgaggccgaggccgagcctgagcctgagctggcctag

SEQ ID NO: 165300 - DNA, 1281 bp, Artificial Sequence
  derived and/or modified sequence
atggcccgggtggcctggggcctgctgtggctgctgctgggcagcgctggggcccagtatgagaagtacagcttccggggcttccccccagaggacctgatgcccctggccgccgcctacggccacgccctggagcagtatgaaggagagagctggagggagagcgcccgctacctggaggccgccctgcggctgcaccggctgctgcgggacagcgaggccttctgccacgccaactgcagcggccctgccccagctgccaagccagaccctgatggcggccgggcagatgagtgggcctgtgagctgcggctgtttggccgggtgctggagagagctgccttccaggtgccctacccaccccggcagctgctgcgggacttccagagccggctgccctaccagtacctgcactacgccctcttcaaggccaaccggctggagaaggctgtggccgccgcctacaccttcctgcagaggaaccccaagcatgagctgacagccaagtacctgaactactaccagggcatgctggatgtggctgatgagagcctgacagacctggaggcccagccctatgaagctgtgttcctgcgggctgtgaagctgtacaacagcggggacttccgcagcagcacagaggacatggagcgggccctgtctgagtacctggccgtgtttgcccgctgcctggccggctgtgagggcgcccacgagcaggtggacttcaaggacttctacccagccatcgctgacctgtttgctgagagcctgcagtgcaaggtggactgtgaggccaacctgaccccaaatgtgggcggctactttgtggacaagtttgtggccaccatgtaccactacctgcagtttgcctactacaagctgaatgatgtgcggcaggccgcccggtctgctgccagctacatgctgtttgaccccaaggacagcgtgatgcagcagaacctggtgtactaccgcttccaccgggcccgctggggcctggaggaggaggacttccagccccgggaggaggccatgctgtaccacaaccagacagctgagctgcgggagctgctggagttcacccacatgtacctgcagagtgatgatgagatggagctggaggagacagagccccccctggagccagaagatgccctgagtgatgctgagtttgaaggagagggggactatgaggagggcatgtatgctgactggtggcaggagccagatgccaagggagatgaagctgaggccgagcctgagcctgagctggcctag

SEQ ID NO: 165301 - DNA, 1314 bp, Artificial Sequence
  derived and/or modified sequence
atggcccgggtggcctggggcctgctgtggctgctgctgggcagcgcaggtgctcagtacgagaaatatagcttcaggggtttccctccggaagatctcatgccattagctgcagcttacggccacgctctggaacagtacgagggcgaatcctggagagaatctgcccgctacctggaagccgctctcaggctgcacagactgctgagggattccgaggcgttttgtcacgccaactgctcaggcccagcccccgcagctaaacctgatccagatggaggccgcgcagatgaatgggcttgcgagctgagactctttggccgagtcttagagcgggctgcgtgcctgcgccggtgcaaacgcacactgccagctttccaggtaccctaccccccccggcagctgctgcgcgatttccagtcccgactcccctatcagtatctgcattacgcattattcaaggccaaccgtctggaaaaagctgtggccgcggcgtacaccttccttcaacgaaaccccaaacacgagttaaccgcaaagtatctcaactactatcaaggaatgcttgatgtcgccgacgagtccttgacagacctagaggcccagccatacgaggctgtgttcctgagagctgtaaagctgtacaactctggagatttcagaagctctactgaggacatggaacgcgccctgtctgagtacttggctgtgtttgcccgatgcctcgccggctgtgaaggcgcgcatgagcaggttgatttcaaggatttttatcccgccattgccgatttgtttgccgaaagtttgcagtgtaaggtggactgcgaagcaaacctgacacctaacgtgggcggctactttgtggataagttcgtggcaactatgtatcactatctgcaattcgcttactataaacttaatgacgtccggcaggcggcacgcagtgccgccagctatatgctcttcgatcccaaggatagcgtcatgcagcagaacctcgtgtactatcggtttcacagggcacgctggggtcttgaagaggaggactttcagccccgggaggaagctatgctataccataaccagacagcagaactgcgagagttgctggagttcactcatatgtacctgcagagtgatgatgagatggagttagaggagaccgagccaccactcgagcccgaagacgccttgtcggacgccgagttcgagggcgagggggactacgaggaaggtatgtacgcagattggtggcaggaacctgacgcgaagggcgacgaagcagaggctgaacctgaaccagaacttgcctag

SEQ ID NO: 165302 - DNA, 1314 bp, Artificial Sequence
  derived and/or modified sequence
atggcccgggtggcctggggcctgctgtggctgctgctgggcagcgctggagcccagtacgaaaagtatagtttcagaggattcccccccgaagaccttatgccactcgccgctgcctacggccacgctctggagcagtacgagggcgagtcttggagggagtctgcccgctatctcgaggctgcccttcggctgcatcgcttactgcgcgactctgaagcgttttgccatgccaattgctctggccctgcacctgcagccaaacctgatcccgatggcggaagagccgacgagtgggcctgcgagctccggcttttcggtagagtactggagcgggccgcctgcctgagacgatgtaagcgcactctgccggcattccaggtaccctacccgccaagacagttgctacgcgactttcagagccgactgccatatcagtacctgcactacgccctgtttaaggccaaccggctggaaaaggccgtggcggccgcatatacgttcctacaacggaaccccaagcacgaactgaccgcgaagtacctcaactactatcaggggatgctagacgtagccgacgaatcgctgaccgatctggaggcgcaaccatacgaagctgtgtttttacgagctgttaaactgtacaacagcggtgacttccggagctctaccgaagatatggagcgagccctctctgagtatctggctgtattcgctagatgtctggccgggtgcgagggcgcgcacgaacaggtagacttcaaagacttttaccctgccattgctgatctttttgcagagtcgctgcagtgcaaagtggactgtgaagccaacctaacgcctaacgtaggaggatatttcgtggacaagtttgtggcgacaatgtaccactacctgcaatttgcttattataaactgaatgatgttcgacaggctgcccgctccgccgcgtcatatatgctgttcgatcctaaagacagcgttatgcagcagaacctggtgtattacaggttccatagggctcgttggggccttgaggaagaagatttccagccacgtgaggaggccatgctgtatcataaccagaccgctgagttgcgagagctcctggagtttactcacatgtacctgcaaagcgatgatgagatggaactggaggagacagagccccctttggagcccgaggacgccctctcagatgccgagttcgaaggcgagggagattatgaagaaggtatgtacgccgactggtggcaagagcccgacgctaaaggcgacgaggccgaggccgaacctgaaccagaactagcttag

SEQ ID NO: 165303 - DNA, 1281 bp, Artificial Sequence
  derived and/or modified sequence
atggcccgggtggcctggggcctgctgtggctgctgctgggcagcgcaggtgctcagtatgaaaagtattcttttcgcgggttcccgcccgaggacctgatgcccctggccgccgcgtatgggcatgcacttgagcagtatgagggggagagctggagggaaagcgctcgttacctggaagccgcactgagactgcaccgtctcctgagagactcggaggcattttgtcacgcaaactgctccggtcctgctcccgctgcgaagcctgaccctgacggcggtagagcggatgaatgggcgtgcgagctacggctgttcggccgcgttttggagcgagccgcattccaggtgccctatccacctaggcagctccttagagattttcagtcaaggctgccttaccagtatcttcactatgccctgttcaaggcaaataggctggaaaaagcagtggccgcagcctatactttcctgcaacgcaaccccaaacacgagctgaccgcaaaatacttaaactattaccaggggatgttagatgtagccgacgagtccctcactgatttagaagcccagccttatgaggccgtgtttctcagggctgttaaactgtataacagcggtgacttcagatcgtctacagaggatatggagcgcgcactgtccgagtacctggccgtctttgcccgatgcctcgcaggctgcgaaggcgctcacgagcaggtagactttaaggatttttatcccgcaatagccgacctgttcgctgaatctttgcagtgcaaggttgattgtgaggcaaatctcacacccaatgtcggtggatactttgtagacaagttcgtcgctacaatgtatcattaccttcagttcgcatattataagctgaatgatgtgaggcaagccgcacggtccgctgcttcgtacatgttgtttgaccctaaggatagcgtgatgcaacagaatttagtgtactatcgcttccacagggccagatggggcctcgaggaagaagactttcaacctagagaggaggctatgctgtaccacaaccagaccgccgagctccgggagctcttggaattcacccacatgtacctgcaatctgacgatgagatggaactggaggagacagagcccccgttagaaccggaagatgccctgtctgatgccgagtttgagggcgagggggactacgaagaagggatgtacgccgactggtggcaggaacccgacgctaagggcgacgaagcggaggctgaacctgaaccggagctggcttag

SEQ ID NO: 165304 - DNA, 1314 bp, Artificial Sequence
  derived and/or modified sequence
atggcacgagtggcttgggggctgctctggttgttgctcgggtcagctggagctcagtatgagaaatactcgttcagaggattcccccctgaggacctaatgcctctcgccgcagcctacgggcacgccttagaacaatacgaaggggagagttggcgggagagtgcaagatatctagaggctgcactccgcctacatcgcctgttgcgcgattcggaggccttctgccacgcaaactgcagcggaccagcccctgctgccaagccagatcctgacgggggtagggcagacgaatgggcgtgcgagctgcggctattcggaagggtcctcgaacgcgctgcctgcctccgccgatgcaagcgcacccttcctgcatttcaggtcccatatccgccacgccaattactgcgggacttccaatcacgtctgccataccagtatctacactacgcccttttcaaagccaatcgtctggaaaaggccgttgcagcggcttatacgttcctgcagagaaacccgaaacacgaactgacagctaaatacctgaattattatcaaggcatgctcgacgtggccgacgagagcttaaccgacctggaagcacagccttacgaggcagtgttcttgagagcggtgaagctgtataacagcggagattttagaagtagcaccgaagacatggagagggccctttcagaatacctcgcagtgttcgcaagatgtctggctggctgcgaaggagctcacgagcaggtcgatttcaaggacttttacccagcaatcgccgacctgttcgctgaatcactacagtgtaaggtggattgtgaagcgaacctcactccaaacgtaggagggtacttcgtagacaaatttgtagccactatgtatcattatctgcagtttgcatattataaacttaatgacgtcagacaagccgcacggtcggcagcatcttatatgctgtttgaccccaaagattccgttatgcagcagaacctagtttactaccggtttcatagggcaaggtggggcttggaagaagaggattttcagcccagggaagaggcaatgctgtaccacaaccagactgcagaactcagagagttactggaatttacgcatatgtacttgcagtcagacgacgagatggagctcgaagaaaccgagccacccctcgaacccgaggatgccctgagcgatgccgagtttgagggcgagggcgattatgaggaggggatgtacgctgactggtggcaggagcccgacgcaaaaggagatgaggcggaagccgaaccagagccagagctggcctag

SEQ ID NO: 165305 - DNA, 1314 bp, Artificial Sequence
  derived and/or modified sequence
atggccagggtggcatggggtctgctttggctcttactgggcagcgccggagctcaatacgagaagtactctttccggggattcccgcctgaggatctgatgcctctggccgcagcgtatggccacgccctggaacaatatgaaggagagtcctggcgtgaatccgcaagatatctcgaggccgctctccggctgcaccgtctgttaagggactcggaggcattttgccacgctaactgttccggccctgcaccggcagcaaagccagatcccgatggcggtcgtgcagatgagtgggcttgtgagctccgccttttcggaagggtcctggagagggctgcctgtcttaggcgatgcaaaagaaccctgcccgcttttcaggtcccctacccccctcgtcagctgctgagggatttccagtctcgccttccttaccagtatcttcactatgcactcttcaaggctaacagattagaaaaagcggtggcagcagcatatacctttctgcagaggaacccaaagcatgagctgaccgccaaatatttgaattactatcaggggatgctggacgtggcggatgagagcctgaccgatttagaagcccagccctacgaggccgtttttctcagggcagtgaagctgtacaactcgggcgacttccgaagtagtactgaggacatggaaagggctctctcggagtacctggccgtgtttgctaggtgtctggcgggatgcgaaggggctcacgagcaggtggatttcaaggacttttacccggctattgccgacctgttcgctgagtcactgcagtgcaaagtggattgcgaagccaatctgactccaaatgttggaggttatttcgtggacaagttcgtggctaccatgtaccactacctacagttcgcatactataaactgaatgatgtgagacaagccgcacgcagtgccgcttcttatatgctttttgatccgaaagactctgtgatgcagcagaacctagtttactatagatttcatagagctagatggggcctggaggaagaggatttccagcctcgagaagaagcaatgttgtatcacaatcagacagccgagctgcgcgaactgttggagttcacccatatgtatctgcagagcgatgacgaaatggagctcgaagagacggaaccccctctagagcctgaagacgctctcagcgatgcagagttcgaaggggaaggcgactatgaggaaggcatgtatgcggactggtggcaagagccagatgcgaaaggcgacgaggccgaggccgagcctgagccagagctagcatag

SEQ ID NO: 165306 - DNA, 1281 bp, Artificial Sequence
  derived and/or modified sequence
atggcgagagtggcctggggactgctatggttacttctgggctctgcgggagcgcaatacgagaaatattccttccgaggcttccctcctgaagacctaatgccattagcagcagcttacggacatgctctcgagcagtacgaaggcgaaagctggagagaaagcgccagatatcttgaagcagctctgaggctccatagacttctgcgggacagcgaagccttttgccacgcaaattgcagcggtcccgctcccgctgctaagcccgatcccgatggcggaagggctgatgagtgggcttgcgaactaaggctgttcggaagagtgcttgagagagccgcttttcaggtgccatacccccctcgccagctgttgagagactttcagtcccgcttaccttaccagtacctgcactatgctctattcaaagctaacagattggaaaaggcggtcgccgctgcctataccttcctccagcgcaaccccaaacacgagctcacggcaaagtacctcaactactaccagggcatgctggacgtggctgatgagtcgcttaccgatctggaagcccagccttacgaggctgtcttcctgagggccgtgaaactttacaacagcggtgacttcaggagctctacagaggatatggaacgcgctttatccgagtacttggcggtcttcgccaggtgtttagctggctgtgaaggtgcacacgaacaggtcgatttcaaggatttctacccagcaattgcagacctcttcgctgagtcgcttcaatgcaaagtagactgtgaggctaacctgacacctaatgtcggtggttatttcgtggataagtttgtggctactatgtaccattatctgcagttcgcatactataagctgaacgacgtccgtcaggctgctcgttctgctgcctcctatatgctcttcgaccccaaggactccgtgatgcagcagaatctcgtttactataggtttcaccgggcacgctggggattagaagaagaagatttccagccaagggaggaggcgatgctgtaccacaaccagaccgctgagcttcgggaattacttgaattcacccacatgtacctccaaagtgatgacgagatggagctagaggagactgagccgccactagagcctgaagacgctttaagcgatgctgagtttgaaggggaaggggactacgaggaaggaatgtatgccgattggtggcaagaaccagatgcgaaaggggacgaagcagaagcagagccagaacctgagctggcgtag

SEQ ID NO: 165307 - DNA, 1314 bp, Artificial Sequence
  derived and/or modified sequence
atggccagagtggcctggggcctgctgtggctgctgctgggcagcgccggcgcccagtacgagaagtacagcttcagaggcttcccccccgaggacctgatgcccctggccgccgcctacggccacgccctggagcagtacgagggcgagagctggagagagagcgccagatacctggaggccgccctgagactgcacagactgctgagagacagcgaggccttctgccacgccaactgcagcggccccgcccccgccgccaagcccgaccccgacggcggcagagccgacgagtgggcctgcgagctgagactgttcggcagagtgctggagagagccgcctgcctgagaagatgcaagagaaccctgcccgccttccaggtgccctacccccccagacagctgctgagagacttccagagcagactgccctaccagtacctgcactacgccctgttcaaggccaacagactggagaaggccgtggccgccgcctacaccttcctgcagagaaaccccaagcacgagctgaccgccaagtacctgaactactaccagggcatgctggacgtggccgacgagagcctgaccgacctggaggcccagccctacgaggccgtgttcctgagagccgtgaagctgtacaacagcggcgacttcagaagcagcaccgaggacatggagagagccctgagcgagtacctggccgtgttcgccagatgcctggccggctgcgagggcgcccacgagcaggtggacttcaaggacttctaccccgccatcgccgacctgttcgccgagagcctgcagtgcaaggtggactgcgaggccaacctgacccccaacgtgggcggctacttcgtggacaagttcgtggccaccatgtaccactacctgcagttcgcctactacaagctgaacgacgtgagacaggccgccagaagcgccgccagctacatgctgttcgaccccaaggacagcgtgatgcagcagaacctggtgtactacagattccacagagccagatggggcctggaggaggaggacttccagcccagagaggaggccatgctgtaccacaaccagaccgccgagctgagagagctgctggagttcacccacatgtacctgcagagcgacgacgagatggagctggaggagaccgagccccccctggagcccgaggacgccctgagcgacgccgagttcgagggcgagggcgactacgaggagggcatgtacgccgactggtggcaggagcccgacgccaagggcgacgaggccgaggccgagcccgagcccgagctggcctag

SEQ ID NO: 165308 - DNA, 1281 bp, Artificial Sequence
  derived and/or modified sequence
atggccagagtggcctggggcctgctgtggctgctgctgggcagcgccggcgcccagtacgagaagtacagcttcagaggcttcccccccgaggacctgatgcccctggccgccgcctacggccacgccctggagcagtacgagggcgagagctggagagagagcgccagatacctggaggccgccctgagactgcacagactgctgagagacagcgaggccttctgccacgccaactgcagcggccccgcccccgccgccaagcccgaccccgacggcggcagagccgacgagtgggcctgcgagctgagactgttcggcagagtgctggagagagccgccttccaggtgccctacccccccagacagctgctgagagacttccagagcagactgccctaccagtacctgcactacgccctgttcaaggccaacagactggagaaggccgtggccgccgcctacaccttcctgcagagaaaccccaagcacgagctgaccgccaagtacctgaactactaccagggcatgctggacgtggccgacgagagcctgaccgacctggaggcccagccctacgaggccgtgttcctgagagccgtgaagctgtacaacagcggcgacttcagaagcagcaccgaggacatggagagagccctgagcgagtacctggccgtgttcgccagatgcctggccggctgcgagggcgcccacgagcaggtggacttcaaggacttctaccccgccatcgccgacctgttcgccgagagcctgcagtgcaaggtggactgcgaggccaacctgacccccaacgtgggcggctacttcgtggacaagttcgtggccaccatgtaccactacctgcagttcgcctactacaagctgaacgacgtgagacaggccgccagaagcgccgccagctacatgctgttcgaccccaaggacagcgtgatgcagcagaacctggtgtactacagattccacagagccagatggggcctggaggaggaggacttccagcccagagaggaggccatgctgtaccacaaccagaccgccgagctgagagagctgctggagttcacccacatgtacctgcagagcgacgacgagatggagctggaggagaccgagccccccctggagcccgaggacgccctgagcgacgccgagttcgagggcgagggcgactacgaggagggcatgtacgccgactggtggcaggagcccgacgccaagggcgacgaggccgaggccgagcccgagcccgagctggcctag

SEQ ID NO: 165309 - protein, 374 aa, Artificial Sequence
  derived and/or modified sequence
MGLPRGSFFWLLLLLTAACSGLLFALYFSAVQRYPGPAAGARDTTSFEAFFQSKASNSWTGKGQACRHLLHLAIQRHPHFRGLFNLSIPVLLWGDLFTPALWDRLSQHKAPYGWRGLSHQVIASTLSLLNGSESAKLFAPPRDTPPKCIRCAVVGNGGILNGSRQGPNIDAHDYVFRLNGAVIKGFERDVGTKTSFYGFTVNTMKNSLVSYWNLGFTSVPQGQDLQYIFIPSDIRDYVMLRSAILGVPVPEGLDKGDRPHAYFGPEASASKFKLLHPDFISYLTERFLKSKLINTHFGDLYMPSTGALMLLTALHTCDQVSAYGFITSNYWKFSDHYFERKMKPLIFYANHDLSLEAALWRDLHKAGILQLYQR

SEQ ID NO: 165310 - DNA, 2105 bp, Artificial Sequence
  derived and/or modified sequence
ggagcgcgcgctctgggcgccgggacgacactccagccccgggggacccgccgcccagctcccgagggtgcggcagcctctggccactcagccggggccgagagggagctgccgggcgggcaggcgccgcaggcacccggcgggcagggcggggcagggcaagacggccgcctccgcaagtgccacccggcccacccggttctctcccttctgcctgggacgtcagcggacggggcgctcgcgggccggggctgtatggggctcccgcgcgggtcgttcttctggctgctgctcctgctcacggctgcctgctcggggctcctctttgccctgtacttctcggcggtgcagcggtacccggggccagcggccggagccagggacaccacatcatttgaagcattctttcaatccaaggcatcgaattcttggacaggaaagggccaggcctgccgacacctgcttcacctggccattcagcggcacccccacttccgtggcctgttcaatctctccattccagtgctgctgtggggggacctcttcaccccagcgctctgggaccgcctgagccaacacaaagccccgtatggctggcgggggctctctcaccaagtcatcgcctccaccctgagccttctgaacggctcagagagtgccaagctgtttgccccgcccagggacacccctccaaagtgtatccggtgtgccgtggtgggcaacggaggcattctgaatgggtcccgccagggtcccaacatcgatgcccatgactatgtattcagactcaatggagctgtgatcaaaggcttcgagcgcgatgtgggcaccaagacttccttctatggtttcactgtgaacacgatgaagaactccctcgtctcctactggaatctgggcttcacctccgtgccacaaggacaggacctgcagtatatcttcatcccctcagacatccgcgactatgtgatgctgagatcggccattctgggcgtgcctgtccctgagggcctagataaaggggacaggccgcacgcctattttggaccagaagcctctgccagtaaattcaagctgctacatccggacttcatcagctacctgacagaaaggttcttgaaatcaaagttgattaacacacattttggagacctatatatgcctagtaccggggctctcatgctgctgacagctttgcatacctgtgaccaggtcagtgcctatggattcatcacaagcaactactggaaattttccgaccactatttcgaacgaaaaatgaagccattgatattttatgcaaaccacgatctgtccctggaagctgccctgtggagggacctgcacaaggccggcatccttcagctgtaccagcgctgaccccaatgcactgagccctttgcttcttcaagagttgcggccctgatcctctcaagtggccaaaagcttttttaacttttcaatcttcaccttcccttgccaacagagggcactggggtgaattcaagattttcatcgaggtctgttcaatataggacaccccagcttgtccttggctcatccaagaactcttctgtatctaaaacaatacatctcaatcttggccaagggaaaatggactgctttgctggattggcactgagcaactttaggaaatgtcggtggagtgttcagcaagatcagacagcagtccaggtcaaaggcaaacacacacgctccagcccaaatcctcctggtggcacatcctaccccagatgctaaagtgattcaaggactccaggacacctcttaagagcctttctaagaacatgataggcttacttctgctccataataaagtgggagaaaaaagccagaatataacttaagactagataactgcgtacatgatggaccatttttttttttttggctgggtagagaaatcatataaaacgcaggctgtttagcatggagatgactctcagaacactgggagggtctggcacttgatgggggttagttgcttggcagcctgcctgccactgagggaagtcccattagagatgtatcaccaccttgtcaccaacaggatgatgtcaccaggtaataaaccttcatcctca

SEQ ID NO: 165311 - DNA, 1125 bp, Artificial Sequence
  derived and/or modified sequence
atgggcctgccccggggctccttcttctggttgctcttactgctgaccgccgcttgttcgggactgctgtttgcgctgtattttagcgccgtccagagataccccggacccgctgcaggggcaagagacactacatctttcgaggccttcttccagtctaaggcctctaacagctggaccggaaagggccaagcttgccgccatcttttgcacttagcaattcagcgacaccctcactttcgtggcctattcaatctgagtattcccgtacttctgtggggagatctgtttacacctgcactctgggatcggttaagtcaacataaggctccctacggatggcgtgggctatcccatcaggtgatcgcctccacattgtcactgctgaatggctctgaatcagcaaaactgttcgcccccccccgcgacaccccacccaaatgcattagatgtgccgtggtcggcaatggcggtatcctgaacggcagtcgccagggaccgaacattgacgcgcacgactatgtgttcaggctgaatggagcagtaatcaaaggatttgaacgggatgtaggaacgaaaacctccttttatggctttaccgtgaacactatgaagaattccttagtcagttattggaatctagggtttacttcggttccccagggtcaggacctccaatacattttcatcccatctgacattcgtgactatgtaatgctgagatctgcaatcctgggcgtgccagtgccagagggtctggataagggggataggccccatgcctattttggaccagaggcctccgcctccaaatttaaacttctccaccccgattttatctcctatttaactgaaaggttcttaaaatctaagctcataaacacacatttcggtgatctgtatatgccttccaccggcgctcttatgctgctgaccgccctgcacacttgcgaccaagtcagcgcttacgggtttattacgtcaaattactggaaattctcagaccattatttcgaaagaaaaatgaagccccttattttctacgcgaatcatgatctctccctcgaggctgccctttggagagatctccataaggcagggatcctgcagctctatcagcgctag

SEQ ID NO: 165312 - DNA, 1125 bp, Artificial Sequence
  derived and/or modified sequence
atgggcctgccccggggcagcttcttctggctgctgctgctgctgacagctgcctgcagcggcctgctgtttgccctgtacttctctgctgtgcagcgctacccaggccctgctgctggggcccgggacaccaccagctttgaggccttcttccagagcaaggccagcaacagctggacaggcaagggccaggcctgccgccacctgctgcacctggccatccagaggcacccccacttccggggcctcttcaacctgagcatccctgtgctgctgtggggagacctcttcaccccagccctgtgggaccggctgagccagcacaaggccccctacggctggaggggcctgagccaccaggtgattgccagcaccctgagcctgctgaatggcagcgagagcgccaagctgtttgccccaccccgggacaccccacccaagtgcatccgctgtgctgtggtgggcaatggaggcatcctgaatggcagccggcagggccccaacattgatgcccatgactatgtgttccggctgaatggagctgtgatcaagggctttgaaagagatgtgggcaccaagaccagcttctacggcttcaccgtgaacaccatgaagaacagcctggtgtcctactggaacctgggcttcacctctgtgccccagggccaggacctgcagtacatcttcatccccagcgacatccgggactatgtgatgctgcggagcgccatcctgggcgtgcctgtgcctgagggcctggacaagggggaccggccccacgcctactttggacctgaggccagcgccagcaagttcaagctgctgcacccagacttcatctcctacctgacagagcgcttcctgaagagcaagctgatcaacacccactttggagacctgtacatgcccagcactggagccctgatgctgctgacagccctgcacacctgtgaccaggtgtctgcctacggcttcatcaccagcaactactggaagttcagtgaccactactttgagaggaagatgaagcccctcatcttctacgccaaccacgacctgagcctggaggccgccctgtggagggacctgcacaaggccggcatcctgcagctgtaccagaggtag

SEQ ID NO: 165313 - DNA, 1125 bp, Artificial Sequence
  derived and/or modified sequence
atgggcctgccccggggcagcttcttctggctgctgctgctgctgactgccgcatgtagtggcttgctcttcgccttgtatttctccgccgtgcaacgttatcccgggcccgccgcaggagcccgggataccacatctttcgaggcgttcttccaaagtaaagcaagtaactcgtggactggaaaaggtcaggcctgtagacacctactccatctggctatccagcgccacccccactttagggggctcttcaatttgagcatccccgtgttgttatggggtgacctatttactccagcgctctgggacagactctctcagcacaaagcaccatatggctggcgtggcctcagccatcaggtcatcgcttctaccttgagcttgcttaatggctctgagtctgccaagctttttgcccccccaagagatacacctccaaaatgcattcgatgcgctgtggtggggaacggcggtatactgaacggctcacgccagggtcctaatatcgatgctcatgactacgtcttcagacttaatggtgccgtcatcaaaggcttcgaacgcgatgtcgggacaaagacaagcttctacggcttcactgtcaacacaatgaagaattctctggtttcctactggaatttggggtttacctctgtgccacaggggcaagacttacagtatattttcataccctctgacatacgagactacgtcatgctcagatccgccatactgggtgttcccgtgcctgagggcctagacaaaggcgataggcctcacgcatacttcgggccggaggccagcgctagcaagttcaaacttctgcatcccgactttatttcttacttgactgaacggttcctcaagagcaaactgatcaatacacattttggcgatttgtacatgccatctacaggggctttgatgctgttgacagccctgcacacctgcgaccaagtctcagcctatggtttcatcacctctaattactggaagttctcggaccattactttgagaggaaaatgaaaccattgatcttctacgccaatcacgatctgtccctcgaggccgctttatggagggatctccataaggccgggatacttcagctttatcaacgctag

SEQ ID NO: 165314 - DNA, 1125 bp, Artificial Sequence
  derived and/or modified sequence
atgggactgccgagggggagcttcttctggctgctgttattactgaccgcggcttgtagcgggctcctgttcgccctgtatttcagcgcagttcagcgttaccctggccctgccgctggtgcacgggacacgacctccttcgaggcctttttccagtccaaggcaagtaacagttggaccggaaaagggcaggcctgccgccaccttctacacctggcgatccaaagacatcctcacttccgtggcctattcaatctgtcaatccccgtactgctctggggggacctgtttactcccgctttatgggatcgcctgtcccagcacaaagctccttacgggtggaggggactgtcccaccaggtcattgcaagtaccctgtcactgcttaacggcagcgagtctgccaagctgtttgcccctccacgagacaccccccctaagtgtattagatgtgccgtcgtgggcaacggcggaatactgaacggctcacggcaggggccaaacatagatgcccacgactacgtcttccgactgaacggcgcagtgattaaaggctttgaaagggatgtgggaaccaagacgtcgttctacggcttcaccgttaatactatgaaaaatagcctggttagttattggaaccttggcttcacgtccgtccctcaggggcaagacttgcaatatatctttatcccaagtgacatccgcgactacgtcatgctccgatcggccatcctaggtgttccagtgcctgaaggcctggacaagggagatcggcctcatgcctactttggccctgaagcctctgcttctaaatttaagcttcttcatcctgacttcatttcttatctcactgagagatttctcaagtctaaacttattaatacccatttcggggatctgtatatgccctccacgggagccctgatgctgctgacagcactgcacacctgtgatcaagtgagcgcctacgggtttattacaagcaactattggaaattttcagatcattattttgagagaaagatgaaacccttgattttctacgcaaaccatgacctttcactggaggccgcactatggagggatctgcataaggcaggcattctgcaactgtaccaaaggtag

SEQ ID NO: 165315 - DNA, 1125 bp, Artificial Sequence
  derived and/or modified sequence
atgggcctgcccagaggcagcttcttctggctgctgctgctgctgaccgccgcctgcagcggcctgctgttcgccctgtacttcagcgccgtgcagagataccccggccccgccgccggcgccagagacaccaccagcttcgaggccttcttccagagcaaggccagcaacagctggaccggcaagggccaggcctgcagacacctgctgcacctggccatccagagacacccccacttcagaggcctgttcaacctgagcatccccgtgctgctgtggggcgacctgttcacccccgccctgtgggacagactgagccagcacaaggccccctacggctggagaggcctgagccaccaggtgatcgccagcaccctgagcctgctgaacggcagcgagagcgccaagctgttcgccccccccagagacaccccccccaagtgcatcagatgcgccgtggtgggcaacggcggcatcctgaacggcagcagacagggccccaacatcgacgcccacgactacgtgttcagactgaacggcgccgtgatcaagggcttcgagagagacgtgggcaccaagaccagcttctacggcttcaccgtgaacaccatgaagaacagcctggtgagctactggaacctgggcttcaccagcgtgccccagggccaggacctgcagtacatcttcatccccagcgacatcagagactacgtgatgctgagaagcgccatcctgggcgtgcccgtgcccgagggcctggacaagggcgacagaccccacgcctacttcggccccgaggccagcgccagcaagttcaagctgctgcaccccgacttcatcagctacctgaccgagagattcctgaagagcaagctgatcaacacccacttcggcgacctgtacatgcccagcaccggcgccctgatgctgctgaccgccctgcacacctgcgaccaggtgagcgcctacggcttcatcaccagcaactactggaagttcagcgaccactacttcgagagaaagatgaagcccctgatcttctacgccaaccacgacctgagcctggaggccgccctgtggagagacctgcacaaggccggcatcctgcagctgtaccagagatag

SEQ ID NO: 165316 - protein, 596 aa, Artificial Sequence
  derived and/or modified sequence
MSNYSVSLVGPAPWGFRLQGGKDFNMPLTISSLKDGGKAAQANVRIGDVVLSIDGINAQGMTHLEAQNKIKGCTGSLNMTLQRASAAPKPEPVPVQKGEPKEVVKPVPITSPAVSKVTSTNNMAYNKAPRPFGSVSSPKVTSIPSPSSAFTPAHATTSSHASPSPVAAVTPPLFAASGLHANANLSADQSPSALSAGKTAVNVPRQPTVTSVCSETSQELAEGQRRGSQGDSKQQNGPPRKHIVERYTEFYHVPTHSDASKKRLIEDTEDWRPRTGTTQSRSFRILAQITGTEHLKESEADNTKKANNSQEPSPQLASSVASTRSMPESLDSPTSGRPGVTSLTAAAAFKPVGSTGVIKSPSWQRPNQGVPSTGRISNSATYSGSVAPANSALGQTQPSDQDTLVQRAEHIPAGKRTPMCAHCNQVIRGPFLVALGKSWHPEEFNCAHCKNTMAYIGFVEEKGALYCELCYEKFFAPECGRCQRKILGEVISALKQTWHVSCFVCVACGKPIRNNVFHLEDGEPYCETDYYALFGTICHGCEFPIEAGDMFLEALGYTWHDTCFVCSVCCESLEGQTFFSKKDKPLCKKHAHSVNF

SEQ ID NO: 165317 - protein, 474 aa, Artificial Sequence
  derived and/or modified sequence
MAYNKAPRPFGSVSSPKVTSIPSPSSAFTPAHATTSSHASPSPVAAVTPPLFAASGLHANANLSADQSPSALSAGKTAVNVPRQPTVTSVCSETSQELAEGQRRGSQGDSKQQNGPPRKHIVERYTEFYHVPTHSDASKKRLIEDTEDWRPRTGTTQSRSFRILAQITGTEHLKESEADNTKKANNSQEPSPQLASSVASTRSMPESLDSPTSGRPGVTSLTAAAAFKPVGSTGVIKSPSWQRPNQGVPSTGRISNSATYSGSVAPANSALGQTQPSDQDTLVQRAEHIPAGKRTPMCAHCNQVIRGPFLVALGKSWHPEEFNCAHCKNTMAYIGFVEEKGALYCELCYEKFFAPECGRCQRKILGEVISALKQTWHVSCFVCVACGKPIRNNVFHLEDGEPYCETDYYALFGTICHGCEFPIEAGDMFLEALGYTWHDTCFVCSVCCESLEGQTFFSKKDKPLCKKHAHSVNF

SEQ ID NO: 165318 - DNA, 6101 bp, Artificial Sequence
  derived and/or modified sequence
agccaggaggcggaagttcccgcgggcggtggggacggcgccctcaccgcgagtcacttgtcagcccttgtctgaggcggaggcagccccgcgccgcgccggacccgagcatatttcattttctgtcattggactttgagccattagaaccatgagcaactacagtgtgtcactggttggcccagctccttggggtttccggctgcagggcggtaaggatttcaacatgcctctgacaatctctagtctaaaagatggcggcaaggcagcccaggcaaatgtaagaataggcgatgtggttctcagcattgatggaataaatgcacaaggaatgactcatcttgaagcccagaataagattaagggttgtacaggctctttgaatatgactctgcaaagagcatctgctgcacccaagcctgagccggttcctgttcaaaagggagaacctaaagaagtagttaaacctgtgcccattacatctcctgctgtgtccaaagtcacttccacaaacaacatggcctacaataaggcaccacggccttttggttctgtgtcttcaccaaaagtcacatccatcccatcaccatcgtctgccttcaccccagcccatgcgaccacctcatcacatgcttccccttcacccgtggctgccgtcactcctcccctgttcgctgcatctggactgcatgctaatgccaatcttagtgctgaccagtctccatctgcactgagcgctggtaaaactgcagttaatgtcccacggcagcccacagtcaccagcgtgtgttccgagacttctcaggagctagcagagggacagagaagaggatcccagggtgacagtaaacagcaaaatggcccaccaagaaaacacattgtggagcgctatacagagttttatcatgtacccactcacagtgatgccagcaagaagagactgattgaggatactgaagactggcgtccaaggactggaacaactcagtctcgctctttccgaatccttgcccagatcactgggactgaacatttgaaagaatctgaagccgataatacaaagaaggcaaataactctcaggagccttctccgcagttggcttcctcggtagcttccacacggagcatgcccgagagcctggacagcccaacctctggcagaccaggggttaccagcctcacagctgcagctgccttcaagcctgtaggatccactggcgtcatcaagtcaccaagctggcaacggccaaaccaaggagtaccttccactggaagaatctcaaacagcgctacttactcaggatcagtggcaccagccaactcagctttgggacaaacccagccaagtgaccaggacactttagtgcaaagagctgagcacattccagcagggaaacgaactccgatgtgcgcccattgtaaccaggtcatcagaggaccattcttagtggcactggggaaatcttggcacccagaagaattcaactgcgctcactgcaaaaatacaatggcctacattggatttgtagaggagaaaggagccctgtattgtgagctgtgctatgagaaattctttgcccctgaatgtggtcgatgccaaaggaagatccttggagaagtcatcagtgcgttgaaacaaacttggcatgtttcctgttttgtgtgtgtagcctgtggaaagcccattcggaacaatgtttttcacttggaggatggtgaaccctactgtgagactgattattatgccctctttggtactatatgccatggatgtgaatttcccatagaagctggtgacatgttcctggaagctctgggctacacctggcatgacacttgctttgtatgctcagtgtgttgtgaaagtttggaaggtcagacctttttctccaagaaggacaagcccctgtgtaagaaacatgctcattctgtgaatttttgaaagtcaacagttcaggagaagagaaggaatttgaagagaaaaaggaaaattaaaattactaattaatttttagattcaatatttatatggagttttgaaaaataatagtggccctgaaggaataaattccagctttaaaaaccaagtctgaggaaatatttggcttcataaagtaaagagacggtttggcatttattattactttttcctgtattttatgcccataaaataagctttataaaaaccaatttcctgatggactattaaattcatcttagaataaattagtgaagaatttaattttagaataaataatccaatctgaaataattataccttctttccttgttaggtagttatgagtaaatctgcaaaaggcaatgaaaatgccttaaattttatcaataacagaattattgtatttaaaaaaaaactaatacttatctttaaaatagtaaataggattttaaacagagaattttatcagtaataggtgtcagtttttaaaaaattgcttgtaggctgagcgcggtggctcacgcctgtaatcccagcactttgggaggccaaggtgggtggaccacatgaggtcaggagtttgagatcagcctggccaacatggtgaaaccccatctctactaaaaatacaaaaattagccggacgcagtggcacgcgcctgtaatcccagctactcaagaggctgaggcacgagaatcacttgaacccgggagggagaggttgcagtgagccaagatcgtaccactgcactccagcctgggtgacagagtgagactctgtctccaaaaaaaaactttgcttgtatattatttttgccttacagtggatcattctagtaggaaaggacaataagattttttatcaaaatgtgtcatgccagtaagagatgttatattcttttctcatttcttccccacccaaaaataagctaccatatagcttataagtctcaaatttttgccttttactaaaatgtgattgtttctattcattgtgtatgcttcatcacctatattaggcaaattccatttttttcccttgtgctaaggtaaagatttaattaaataattttggcctctcatagttttctctctctttaaagagaataaatagagggccaggtgtggtggctcacgcctgtgatcccagcactttgggaggccaagacgggcggatcatgaggtcaagagatcaagatcatcctggccaacatggtgaaaccctgtctctactaaaaatacaaaaatgagctgggcatggtggggcgtgcctgtagtcccatgtacttgggaggctgaggcaggaaaattcttgaacccaggagacggaagttgcagtgagctgagatcacaccactgcactccagcctggtgacagagcaagactccggctcttaaaaaaaaaaaaaaaaaaaaaaaaagagagagagagaataaatagaaaagaatgtggctgggaattgtgaatcagaagattataccccccaattgtttttcaatccccttttctcaaataataaattagttaaatcagtttctgagttatgccactggctgatgaagagttgagaggtctctttgcagaatgatctttttgtttcgttttgtttcttcttctgcatttaaaaattaaaagattggtttgaggatgtgatgaaattgagactttttgtggttttctctcaataataagtgaaccaatttcaaatgtgatcacaaagtttggaaagcttttattcacagaggttgggtagtgttgggaggggagtttaattactcagattggcctgttatttgatttcctcctttgggaaaagaattatgtagataccacatggagacagggaaacaattgtggtaaaactgtggatcctgttgctatttgcccagtgagaaaacagattctggtatttgatttggtttttctctttgtttccagaatggatgaaagtccatgaacctcctaagttataatttaaatttgtttggggcaaggtgattttatagtcgagacagagccctaggtccttcctgccccatcactcacttacgacatcacttccattgtgtgcatgtttgttatagaggaggttttaggctacaatatttgtttaacctccctaagaactttcaaggcatctgtcctgaaagctgttaatttatggtctagcagatttatattatatgcagataataattaactggggataaaagaatggcaaggggtgacacaaagtagcaaactgaatacttctccaatagcaaccccaagctacctcctcaccctgcatcttggagggaggcaggaaatttcttttgaaataaagtgctggagctgaattctgcattatttatcgttgctgctgaaaccacctataaaagacttgctggctaatgtgcattgtcatataatgtacactgtcacatctttacagtcttgtatgttatagaatacaaaataagttgatggttttgtttggtgtgagctttttgtttgtttgtttagttttgccttcataggttatatgccaagatagtatttgataagtcaatgacatttggatgttttcttcaaagaattttatttgacccagatttcttataaagttatcttacattaaggatgtcattttcatcagaccttctttctacatattattcatgaagcataatgttgcatttctccaaattttatgcctgaaagggtagtgttgcttcctaaggtatcatgttgtctttgtgctttgtccatctcttccgtggcgaagctttatatctgttcctaaaacagttaatcctgtgaaataaatattgaacataatccagaagaatctctctgtttcccttggggaatgccatatttaattcaccagcagtaatcctttaataactggcagagcactttattcttctggtgagctccctgaatatttatttttctgattataaattttctatattagtagcattttttaattattacttcttcactatagagcatttacttttagtctctagatgtatattttggaatgctgtacttggcataacatagattaaaatcataatgcatgactaaaaactccttggatttatttcccattttaaaatttttagcggtaagttcagatttataatctttctctagacttccatggtctgaatgttgcctgctgaagtagcaacctaaaaagtatcccctgcttatgcttgtccagttggccctccatgtccataggcttcgcatctgtgattcagcccactgtgggtcaaaaatatttggggaaaaaaatggatggttgcgcctttgctgaacatgtacaaacttttttttgtcattaaacaatatagtataacaactatttacaaagcatttacattgtattagctattataggtaatctagagatgatttaaagtgtatggtaggatgtgcataggttatatgcaaatactacaccattttctataagggacttgaacatcatggactttagtatcctagggggttcttggaacccatcacccataggggcaccataggacaactatagtaccgtgtttatttcctattaattcaggttccgtttagagtctaaaactaaaacctaatcatttagtcacagtgtaaaaacaaatggaaataacagctcaaatcttcaaaatattactatagcattatgtttaaaataatctacaacaaaaatgtaccattttcaagcagtactacattaggagcccttttatagaaaataatttcttctttacccccgttccagtgtgaatctagtattctgttaacatttgtgtggcatttggagtttgtcatccccattgaagggagagccttctcagacatgaagcaagggaaacatactgaatagttttacacaaatttgatctggcttccatttgtccccctcatttcccaaatgtttaaatgtattggatttggattctcaatgtataagttgccttatctgttaatgtctatcttctgtctctttaattttgtatatctgctgttttgcttttggatacattttctaattagaagtcacatgataaatataatcagtatagtaataataccataatgtgcacatactcaataaataaatgactgcattgttgtaaatga

SEQ ID NO: 165319 - DNA, 1791 bp, Artificial Sequence
  derived and/or modified sequence
atgagcaactacagcgtgagcctggtgggccccgccccctggggcttcagactgcagggcggcaaggacttcaacatgcccctgaccatcagcagcctgaaggacggcggcaaggccgcccaggccaacgtgagaatcggcgacgtggtgctgagcatcgacggcatcaacgcccagggcatgacccacctggaggcccagaacaagatcaagggctgcaccggcagcctgaacatgaccctgcagagagccagcgccgcccccaagcccgagcccgtgcccgtgcagaagggcgagcccaaggaggtggtgaagcccgtgcccatcaccagccccgccgtgagcaaggtgaccagcaccaacaacatggcctacaacaaggcccccagacccttcggcagcgtgagcagccccaaggtgaccagcatccccagccccagcagcgccttcacccccgcccacgccaccaccagcagccacgccagccccagccccgtggccgccgtgaccccccccctgttcgccgccagcggcctgcacgccaacgccaacctgagcgccgaccagagccccagcgccctgagcgccggcaagaccgccgtgaacgtgcccagacagcccaccgtgaccagcgtgtgcagcgagaccagccaggagctggccgagggccagagaagaggcagccagggcgacagcaagcagcagaacggcccccccagaaagcacatcgtggagagatacaccgagttctaccacgtgcccacccacagcgacgccagcaagaagagactgatcgaggacaccgaggactggagacccagaaccggcaccacccagagcagaagcttcagaatcctggcccagatcaccggcaccgagcacctgaaggagagcgaggccgacaacaccaagaaggccaacaacagccaggagcccagcccccagctggccagcagcgtggccagcaccagaagcatgcccgagagcctggacagccccaccagcggcagacccggcgtgaccagcctgaccgccgccgccgccttcaagcccgtgggcagcaccggcgtgatcaagagccccagctggcagagacccaaccagggcgtgcccagcaccggcagaatcagcaacagcgccacctacagcggcagcgtggcccccgccaacagcgccctgggccagacccagcccagcgaccaggacaccctggtgcagagagccgagcacatccccgccggcaagagaacccccatgtgcgcccactgcaaccaggtgatcagaggccccttcctggtggccctgggcaagagctggcaccccgaggagttcaactgcgcccactgcaagaacaccatggcctacatcggcttcgtggaggagaagggcgccctgtactgcgagctgtgctacgagaagttcttcgcccccgagtgcggcagatgccagagaaagatcctgggcgaggtgatcagcgccctgaagcagacctggcacgtgagctgcttcgtgtgcgtggcctgcggcaagcccatcagaaacaacgtgttccacctggaggacggcgagccctactgcgagaccgactactacgccctgttcggcaccatctgccacggctgcgagttccccatcgaggccggcgacatgttcctggaggccctgggctacacctggcacgacacctgcttcgtgtgcagcgtgtgctgcgagagcctggagggccagaccttcttcagcaagaaggacaagcccctgtgcaagaagcacgcccacagcgtgaacttctag

SEQ ID NO: 165320 - DNA, 1791 bp, Artificial Sequence
  derived and/or modified sequence
atgagtaattatagcgtgagtctggtgggtcccgcgccctgggggttcaggctgcagggtggtaaagattttaatatgccactgaccatctcctcacttaaggacggaggcaaggccgcccaagccaacgtccgcatcggggatgttgtattaagtattgatggaatcaacgcacagggcatgacccatctggaagcacagaacaaaatcaagggatgtacaggatcattgaacatgaccctccagagagcaagcgctgctcctaaaccggaacccgtgcccgttcagaagggagaacccaaagaagtcgtgaaacccgtgcccatcacgagtcccgccgtgtccaaggtaacatctactaacaatatggcctataataaggccccacggcccttcggatctgtttctagcccaaaagttactagtattcccagcccgtcttcagcctttacgcctgcccacgctacaactagttcacatgcttccccatcgcctgtcgcggccgtaaccccaccgctgtttgccgctagtggcctgcacgcgaacgctaacctctcggctgatcagagcccttccgccctcagcgccgggaaaacagcggtcaatgtgcctcgacaacccactgtgacttctgtatgttctgagacatcccaggagttggccgaggggcagcgccgtggatcccagggtgactctaagcagcagaacggtcccccacgcaaacatatcgtggagagatacacagaattttatcacgtcccaacacacagcgatgcgagtaaaaaaagactaattgaagatacggaagactggaggcccagaacaggaacgacccagtctaggagttttcgaatcctggcgcaaataacaggaaccgagcacctcaaagaatctgaggctgacaacaccaaaaaggctaacaatagccaagagcccagcccacagctggcctcatccgtggcaagtacaagaagtatgcctgaaagcctggattctccaacatctggtcggcctggtgttaccagccttaccgccgccgcagcttttaagcctgtcggaagcaccggcgtcattaagagtccatcatggcagaggccaaatcaaggcgtgccctccactggcagaatctccaatagtgccacatactcaggaagcgtggccccggcaaattcagccttaggtcagacacagcccagcgaccaggatacgctggtgcagagggctgaacacatacccgcaggcaagaggacacctatgtgtgcacactgcaatcaggtaatccgcggccccttcttggtggccctgggtaagtcctggcatcctgaagaattcaattgtgcacattgcaaaaatacaatggcctatatcggatttgtcgaggagaaaggcgccctgtattgtgaattgtgctacgagaaatttttcgcccctgagtgcggccggtgccagcggaaaattctgggtgaggtcattagcgccctgaagcaaacatggcacgtttcctgcttcgtgtgcgtggcatgcgggaagcccattcggaacaatgtctttcatctggaggatggagagccctactgcgaaacagattactacgccctgttcggtaccatatgtcatggctgcgagttcccaattgaggctggagatatgtttttagaagccctcgggtacacatggcatgacacatgtttcgtatgttcggtgtgttgtgaaagcctagagggacaaaccttttttagcaagaaggataaacctctgtgtaaaaaacatgcccattcggttaacttctag

SEQ ID NO: 165321 - DNA, 1791 bp, Artificial Sequence
  derived and/or modified sequence
atgagcaactacagcgtgtccctggtgggccctgccccctggggcttccggctgcagggcggcaaggacttcaacatgcccctgaccatcagcagcctgaaggatggcggcaaggccgcccaggccaacgtgagaattggagatgtggtgctgagcattgatggcatcaatgcccagggcatgacccacctggaggcccagaacaagatcaagggctgcaccggcagcctgaacatgaccctgcagagggccagcgctgcccccaagccagagcctgtgcctgtgcagaagggggagcccaaggaggtggtgaagcctgtgcccatcaccagccctgctgtgtccaaggtgaccagcaccaacaacatggcctacaacaaggccccccggcccttcggctctgtgagcagccccaaggtgaccagcatccccagccccagcagcgccttcaccccagcccacgccaccaccagcagccacgccagccccagccctgtggccgctgtgaccccacccctgtttgctgccagcggcctgcacgccaatgccaacctgtctgctgaccagagccccagcgccctgtctgctgggaagacagctgtgaatgtgccccggcagcccaccgtgacctctgtgtgcagcgagaccagccaggagctggccgagggccagaggcggggcagccagggcgacagcaagcagcagaatggcccccccaggaagcacatcgtggagcgctacacagagttctaccacgtgcccacccacagtgatgccagcaagaagaggctgattgaggacacagaggactggaggcccaggacaggcaccacccagagccgctccttccgcatcctggcccagatcaccggcacagagcacctgaaggagagcgaggccgacaacaccaagaaggccaacaacagccaggagcccagcccccagctggccagctctgtggccagcaccaggtccatgcctgagagcctggacagccccaccagcggccggcctggggtgaccagcctgacagctgctgctgccttcaagcctgtgggcagcactggagtcatcaagagccccagctggcagaggcccaaccagggcgtgcccagcacaggccgcatcagcaacagcgccacctacagcggctctgtggccccagccaacagcgccctgggccagacccagcccagcgaccaggacaccctggtgcagagagctgagcacatcccagctgggaagaggacccccatgtgtgcccactgcaaccaggtgatccggggccccttcctggtggccctgggcaagtcctggcaccctgaggagttcaactgtgcccactgcaagaacaccatggcctacatcggctttgtggaggagaagggggccctgtactgtgagctgtgctatgagaagttctttgccccagaatgtggccgctgccagaggaagatcctgggggaggtgatcagcgccctgaagcagacctggcacgtgtcctgctttgtgtgtgtggcctgtgggaagcccatcagaaataatgtgttccacctggaggatggagagccctactgtgaaacagactactatgccctgtttggcaccatctgccacggctgtgagttccccattgaagctggggacatgttcctggaggccctgggctacacctggcatgacacctgctttgtgtgcagcgtgtgctgtgagagcctggagggccagaccttcttcagcaagaaggacaagcccctgtgcaagaagcacgcccacagcgtgaacttctag

SEQ ID NO: 165322 - DNA, 1791 bp, Artificial Sequence
  derived and/or modified sequence
atgagcaactacagcgtgagcctggtgggccccgccccctggggcttccgactacagggtggcaaggacttcaatatgcccttaactatttcttccctgaaggacggtggcaaggccgctcaggctaatgtacgcatcggcgatgtggtgctgtcaatagacggaataaacgcccagggcatgacacatcttgaagcgcagaataagataaaaggatgtacaggttccttgaacatgacacttcagagggcatccgccgctcccaaacccgaaccggtccctgtgcagaagggtgaacctaaagaagtggtcaagccagtccccattacctcaccagctgtgagcaaggtgacatccaccaataacatggcttacaacaaagcacctaggccttttgggagcgtgtcctccccgaaggtaactagcatcccctcccctagcagtgcgtttacccctgcccacgcaaccacgagttctcatgcttccccatctcctgtcgccgcggtaacacctccgctcttcgctgcctctgggctacacgctaacgccaacctatccgcagaccagtctccatctgcactcagcgcaggaaagacggccgtcaacgtgccaaggcagcccaccgtgacttcagtgtgttccgaaacttcacaggaactggcagaaggccagcggcgaggctcgcagggcgacagcaaacagcagaacggaccacccagaaagcatatcgttgagaggtacactgagttctaccatgtgccgacacactccgacgcctcaaagaagaggctgattgaggataccgaagactggcggcctcgtaccggtaccacccagtcacggagctttcggatcttagcccagattacaggaacagagcacctgaaggaaagtgaagcagataatacaaagaaggcaaataacagtcaggaacccagcccccagctggcatcctccgtggcctccaccagaagtatgcccgagtctctggatagccccacatccggcagaccaggcgtcaccagtctgacggccgcagccgccttcaagccagtaggctcaacaggggtcattaaatctccttcttggcagagaccaaatcagggggtcccaagcaccggtaggatctctaactctgccacctactccggttcggtggcgccagccaattccgcactagggcagacgcagccatccgaccaggataccttggttcagcgcgcagaacacatccctgcaggcaaaagaacacccatgtgcgcacattgcaaccaggtaatccgtggtcctttcctcgtggctctgggtaaatcgtggcaccctgaggaattcaactgtgcacactgtaaaaataccatggcctacatcggattcgtcgaagagaaaggcgcattatactgcgagctctgctacgaaaagttctttgcccccgagtgtgggcgatgccagcgaaagattctgggggaggtgattagtgcgctcaagcaaacctggcacgtgtcttgcttcgtgtgtgtggcctgtggaaaaccaatacgtaacaatgtattccatcttgaggacggcgagccttattgcgaaacggattactatgcgctgtttggaaccatctgtcatgggtgcgagtttcccatcgaggcaggtgatatgtttctggaagccctcggttatacttggcacgacacctgcttcgtgtgctccgtctgctgtgaatcactggaaggtcagacttttttctccaaaaaggacaaaccgctgtgcaaaaaacacgcacacagtgtgaatttctag

SEQ ID NO: 165323 - DNA, 1791 bp, Artificial Sequence
  derived and/or modified sequence
atgtctaattacagcgtaagcctggtcggaccagctccttggggatttcgccttcagggaggtaaggatttcaacatgcccctgacaatttctagtctgaaggatggcggaaaggcagcccaagccaatgtgcgaatcggagacgtcgtcctgtccatcgatggcatcaacgctcagggtatgacacacctggaagcgcaaaataagatcaaagggtgcactggaagcctaaacatgacgctacaacgtgcctccgccgcacctaagcctgaaccggtcccagtgcagaaaggcgagcccaaggaagttgttaaacccgtaccgattacatcacctgcggtaagcaaggtcacctccaccaacaacatggcatataacaaagcacctaggccatttggcagcgtgagcagcccaaaagtgaccagcatcccttccccctccagcgcctttactccagcgcacgctacaacctcttcacacgcttccccctcccctgtagcagcagtcacacccccactttttgcggctagcgggctccacgccaatgccaaccttagtgcagaccagagtccttccgccctctcagctggaaagacagctgtgaacgtcccccgacaaccgacagtgactagcgtttgtagcgaaacatctcaggagctagctgagggccaaagacgaggatcacagggcgattcaaagcagcagaacggtccacctagaaagcacattgtcgagagatatactgagttctatcacgtccccactcatagtgatgcttcaaaaaagcgcctgattgaggatactgaagactggaggccacgcacaggtactactcaatcacgtagcttccgaatactggctcaaatcacagggaccgaacacctgaaggagtcggaagcggataacacaaaaaaagccaataacagccaggagccatccccacagctcgcttcaagtgtggcatctacgcggagtatgccagaatctctggacagtcctacatctgggagacccggtgtcacaagcctgacagcggcagccgcattcaaacctgtgggcagcaccggcgttatcaaatccccatcgtggcagcgccctaatcagggggtgccatcaaccgggaggatatctaattcagccacttactcggggtccgtggctcctgctaactcggcgctgggacagacccagccttcagatcaggatacactcgtgcagcgagccgagcatatccctgccggtaagcggaccccaatgtgtgcccattgtaaccaggtaataaggggtcccttccttgtggccctgggcaagtcttggcaccctgaggaattcaactgtgcgcattgcaagaacaccatggcctatatagggttcgtagaggagaagggtgccctgtactgtgagctctgttacgagaagtttttcgctcctgaatgtgggcgttgtcagaggaagattcttggggaggtcatctcagctttgaagcagacttggcacgtgtcctgcttcgtctgtgtggcctgcgggaaacccataaggaataacgtgttccacctcgaagacggcgagccctactgtgagaccgactattatgccctgttcgggacaatttgtcacggatgcgagtttcccattgaggccggtgacatgttcctggaagcgttgggctacacttggcacgacacctgcttcgtgtgttctgtgtgttgtgaatctctggaggggcagactttcttttcaaaaaaggataagccactgtgtaaaaagcacgctcactccgtgaatttttag

SEQ ID NO: 165324 - DNA, 6083 bp, Artificial Sequence
  derived and/or modified sequence
gttcccgcgggcggtggggacggcgccctcaccgcgagtcacttgtcagcccttgtctgaggcggaggcagccccgcgccgcgccggacccgagcatatttcattttctgtcattggactttgagccattagaaccatgagcaactacagtgtgtcactggttggcccagctccttggggtttccggctgcagggcggtaaggatttcaacatgcctctgacaatctctagtctaaaagatggcggcaaggcagcccaggcaaatgtaagaataggcgatgtggttctcagcattgatggaataaatgcacaaggaatgactcatcttgaagcccagaataagattaagggttgtacaggctctttgaatatgactctgcaaagagcatctgctgcacccaagcctgagccggttcctgttcaaaagggagaacctaaagaagtagttaaacctgtgcccattacatctcctgctgtgtccaaagtcacttccacaaacaacatggcctacaataaggcaccacggccttttggttctgtgtcttcaccaaaagtcacatccatcccatcaccatcgtctgccttcaccccagcccatgcgaccacctcatcacatgcttccccttcacccgtggctgccgtcactcctcccctgttcgctgcatctggactgcatgctaatgccaatcttagtgctgaccagtctccatctgcactgagcgctggtaaaactgcagttaatgtcccacggcagcccacagtcaccagcgtgtgttccgagacttctcaggagctagcagagggacagagaagaggatcccagggtgacagtaaacagcaaaatggcccaccaagaaaacacattgtggagcgctatacagagttttatcatgtacccactcacagtgatgccagcaagaagagactgattgaggatactgaagactggcgtccaaggactggaacaactcagtctcgctctttccgaatccttgcccagatcactgggactgaacatttgaaagaatctgaagccgataatacaaagaaggcaaataactctcaggagccttctccgcagttggcttcctcggtagcttccacacggagcatgcccgagagcctggacagcccaacctctggcagaccaggggttaccagcctcacagctgcagctgccttcaagcctgtaggatccactggcgtcatcaagtcaccaagctggcaacggccaaaccaaggagtaccttccactggaagaatctcaaacagcgctacttactcaggatcagtggcaccagccaactcagctttgggacaaacccagccaagtgaccaggacactttagtgcaaagagctgagcacattccagcagggaaacgaactccgatgtgcgcccattgtaaccaggtcatcagaggaccattcttagtggcactggggaaatcttggcacccagaagaattcaactgcgctcactgcaaaaatacaatggcctacattggatttgtagaggagaaaggagccctgtattgtgagctgtgctatgagaaattctttgcccctgaatgtggtcgatgccaaaggaagatccttggagaagtcatcagtgcgttgaaacaaacttggcatgtttcctgttttgtgtgtgtagcctgtggaaagcccattcggaacaatgtttttcacttggaggatggtgaaccctactgtgagactgattattatgccctctttggtactatatgccatggatgtgaatttcccatagaagctggtgacatgttcctggaagctctgggctacacctggcatgacacttgctttgtatgctcagtgtgttgtgaaagtttggaaggtcagacctttttctccaagaaggacaagcccctgtgtaagaaacatgctcattctgtgaatttttgaaagtcaacagttcaggagaagagaaggaatttgaagagaaaaaggaaaattaaaattactaattaatttttagattcaatatttatatggagttttgaaaaataatagtggccctgaaggaataaattccagctttaaaaaccaagtctgaggaaatatttggcttcataaagtaaagagacggtttggcatttattattactttttcctgtattttatgcccataaaataagctttataaaaaccaatttcctgatggactattaaattcatcttagaataaattagtgaagaatttaattttagaataaataatccaatctgaaataattataccttctttccttgttaggtagttatgagtaaatctgcaaaaggcaatgaaaatgccttaaattttatcaataacagaattattgtatttaaaaaaaaactaatacttatctttaaaatagtaaataggattttaaacagagaattttatcagtaataggtgtcagtttttaaaaaattgcttgtaggctgagcgcggtggctcacgcctgtaatcccagcactttgggaggccaaggtgggtggaccacatgaggtcaggagtttgagatcagcctggccaacatggtgaaaccccatctctactaaaaatacaaaaattagccggacgcagtggcacgcgcctgtaatcccagctactcaagaggctgaggcacgagaatcacttgaacccgggagggagaggttgcagtgagccaagatcgtaccactgcactccagcctgggtgacagagtgagactctgtctccaaaaaaaaactttgcttgtatattatttttgccttacagtggatcattctagtaggaaaggacaataagattttttatcaaaatgtgtcatgccagtaagagatgttatattcttttctcatttcttccccacccaaaaataagctaccatatagcttataagtctcaaatttttgccttttactaaaatgtgattgtttctattcattgtgtatgcttcatcacctatattaggcaaattccatttttttcccttgtgctaaggtaaagatttaattaaataattttggcctctcatagttttctctctctttaaagagaataaatagagggccaggtgtggtggctcacgcctgtgatcccagcactttgggaggccaagacgggcggatcatgaggtcaagagatcaagatcatcctggccaacatggtgaaaccctgtctctactaaaaatacaaaaatgagctgggcatggtggggcgtgcctgtagtcccatgtacttgggaggctgaggcaggaaaattcttgaacccaggagacggaagttgcagtgagctgagatcacaccactgcactccagcctggtgacagagcaagactccggctcttaaaaaaaaaaaaaaaaaaaaaaaaagagagagagagaataaatagaaaagaatgtggctgggaattgtgaatcagaagattataccccccaattgtttttcaatccccttttctcaaataataaattagttaaatcagtttctgagttatgccactggctgatgaagagttgagaggtctctttgcagaatgatctttttgtttcgttttgtttcttcttctgcatttaaaaattaaaagattggtttgaggatgtgatgaaattgagactttttgtggttttctctcaataataagtgaaccaatttcaaatgtgatcacaaagtttggaaagcttttattcacagaggttgggtagtgttgggaggggagtttaattactcagattggcctgttatttgatttcctcctttgggaaaagaattatgtagataccacatggagacagggaaacaattgtggtaaaactgtggatcctgttgctatttgcccagtgagaaaacagattctggtatttgatttggtttttctctttgtttccagaatggatgaaagtccatgaacctcctaagttataatttaaatttgtttggggcaaggtgattttatagtcgagacagagccctaggtccttcctgccccatcactcacttacgacatcacttccattgtgtgcatgtttgttatagaggaggttttaggctacaatatttgtttaacctccctaagaactttcaaggcatctgtcctgaaagctgttaatttatggtctagcagatttatattatatgcagataataattaactggggataaaagaatggcaaggggtgacacaaagtagcaaactgaatacttctccaatagcaaccccaagctacctcctcaccctgcatcttggagggaggcaggaaatttcttttgaaataaagtgctggagctgaattctgcattatttatcgttgctgctgaaaccacctataaaagacttgctggctaatgtgcattgtcatataatgtacactgtcacatctttacagtcttgtatgttatagaatacaaaataagttgatggttttgtttggtgtgagctttttgtttgtttgtttagttttgccttcataggttatatgccaagatagtatttgataagtcaatgacatttggatgttttcttcaaagaattttatttgacccagatttcttataaagttatcttacattaaggatgtcattttcatcagaccttctttctacatattattcatgaagcataatgttgcatttctccaaattttatgcctgaaagggtagtgttgcttcctaaggtatcatgttgtctttgtgctttgtccatctcttccgtggcgaagctttatatctgttcctaaaacagttaatcctgtgaaataaatattgaacataatccagaagaatctctctgtttcccttggggaatgccatatttaattcaccagcagtaatcctttaataactggcagagcactttattcttctggtgagctccctgaatatttatttttctgattataaattttctatattagtagcattttttaattattacttcttcactatagagcatttacttttagtctctagatgtatattttggaatgctgtacttggcataacatagattaaaatcataatgcatgactaaaaactccttggatttatttcccattttaaaatttttagcggtaagttcagatttataatctttctctagacttccatggtctgaatgttgcctgctgaagtagcaacctaaaaagtatcccctgcttatgcttgtccagttggccctccatgtccataggcttcgcatctgtgattcagcccactgtgggtcaaaaatatttggggaaaaaaatggatggttgcgcctttgctgaacatgtacaaacttttttttgtcattaaacaatatagtataacaactatttacaaagcatttacattgtattagctattataggtaatctagagatgatttaaagtgtatggtaggatgtgcataggttatatgcaaatactacaccattttctataagggacttgaacatcatggactttagtatcctagggggttcttggaacccatcacccataggggcaccataggacaactatagtaccgtgtttatttcctattaattcaggttccgtttagagtctaaaactaaaacctaatcatttagtcacagtgtaaaaacaaatggaaataacagctcaaatcttcaaaatattactatagcattatgtttaaaataatctacaacaaaaatgtaccattttcaagcagtactacattaggagcccttttatagaaaataatttcttctttacccccgttccagtgtgaatctagtattctgttaacatttgtgtggcatttggagtttgtcatccccattgaagggagagccttctcagacatgaagcaagggaaacatactgaatagttttacacaaatttgatctggcttccatttgtccccctcatttcccaaatgtttaaatgtattggatttggattctcaatgtataagttgccttatctgttaatgtctatcttctgtctctttaattttgtatatctgctgttttgcttttggatacattttctaattagaagtcacatgataaatataatcagtatagtaataataccataatgtgcacatactcaataaataaatgactgcattgttgtaaa

SEQ ID NO: 165325 - DNA, 1853 bp, Artificial Sequence
  derived and/or modified sequence
cttgtcagcccttgtctgaggcggaggcagccccgcgccgcgccggacccgagcatatttcattttctgtcattggactttgagccattagaaccatgagcaactacagtgtgtcactggttggcccagctccttggggtttccggctgcagggcggtaaggatttcaacatgcctctgacaatctctagtagcatctgctgcacccaagcctgagccggttcctgttcaaaagggagaacctaaagaagtagttaaacctgtgcccattacatctcctgctgtgtccaaagtcacttccacaaacaacatggcctacaataaggcaccacggccttttggttctgtgtcttcaccaaaagtcacatccatcccatcaccatcgtctgccttcaccccagcccatgcgaccacctcatcacatgcttccccttcacccgtggctgccgtcactcctcccctgttcgctgcatctggactgcatgctaatgccaatcttagtgctgaccagtctccatctgcactgagcgctggtaaaactgcagttaatgtcccacggcagcccacagtcaccagcgtgtgttccgagacttctcaggagctagcagagggacagagaagaggatcccagggtgacagtaaacagcaaaatggcccaccaagaaaacacattgtggagcgctatacagagttttatcatgtacccactcacagtgatgccagcaagaagagactgattgaggatactgaagactggcgtccaaggactggaacaactcagtctcgctctttccgaatccttgcccagatcactgggactgaacatttgaaagaatctgaagccgataatacaaagaaggcaaataactctcaggagccttctccgcagttggcttcctcggtagcttccacacggagcatgcccgagagcctggacagcccaacctctggcagaccaggggttaccagcctcacagctgcagctgccttcaagcctgtaggatccactggcgtcatcaagtcaccaagctggcaacggccaaaccaaggagtaccttccactggaagaatctcaaacagcgctacttactcaggatcagtggcaccagccaactcagctttgggacaaacccagccaagtgaccaggacactttagtgcaaagagctgagcacattccagcagggaaacgaactccgatgtgcgcccattgtaaccaggtcatcagaggaccattcttagtggcactggggaaatcttggcacccagaagaattcaactgcgctcactgcaaaaatacaatggcctacattggatttgtagaggagaaaggagccctgtattgtgagctgtgctatgagaaattctttgcccctgaatgtggtcgatgccaaaggaagatccttggagaagtcatcagtgcgttgaaacaaacttggcatgtttcctgttttgtgtgtgtagcctgtggaaagcccattcggaacaatgtttttcacttggaggatggtgaaccctactgtgagactgattattatgccctctttggtactatatgccatggatgtgaatttcccatagaagctggtgacatgttcctggaagctctgggctacacctggcatgacacttgctttgtatgctcagtgtgttgtgaaagtttggaaggtcagacctttttctccaagaaggacaagcccctgtgtaagaaacatgctcattctgtgaatttttgaaagtcaacagttcaggagaagagaaggaatttgaagagaaaaaggaaaattaaaattactaattaatttttagattcaatatttatatggagttttgaaaaataatagtggccctgaag

SEQ ID NO: 165326 - protein, 359 aa, Artificial Sequence
  derived and/or modified sequence
MAEPFLSEYQHQPQTSNCTGAAAVQEELNPERPPGAEERVPEEDSRWQSRAFPQLGGRPGPEGEGSLESQPPPLQTQACPESSCLREGEKGQNGDDSSAGGDFPPPAEVEPTPEAELLAQPCHDSEASKLGAPAAGGEEEWGQQQRQLGKKKHRRRPSKKKRHWKPYYKLTWEEKKKFDEKQSLRASRIRAEMFAKGQPVAPYNTTQFLMDDHDQEEPDLKTGLYSKRAAAKSDDTSDDDFMEEGGEEDGGSDGMGGDGSEFLQRDFSETYERYHTESLQNMSKQELIKEYLELEKCLSRMEDENNRLRLESKRLGGDDARVRELELELDRLRAENLQLLTENELHRQQERAPLSKFGD

SEQ ID NO: 165327 - DNA, 1080 bp, Artificial Sequence
  derived and/or modified sequence
atggccgagcccttcctgagcgagtaccagcaccagccccagaccagcaactgcaccggcgccgccgccgtgcaggaggagctgaaccccgagagaccccccggcgccgaggagagagtgcccgaggaggacagcagatggcagagcagagccttcccccagctgggcggcagacccggccccgagggcgagggcagcctggagagccagcccccccccctgcagacccaggcctgccccgagagcagctgcctgagagagggcgagaagggccagaacggcgacgacagcagcgccggcggcgacttccccccccccgccgaggtggagcccacccccgaggccgagctgctggcccagccctgccacgacagcgaggccagcaagctgggcgcccccgccgccggcggcgaggaggagtggggccagcagcagagacagctgggcaagaagaagcacagaagaagacccagcaagaagaagagacactggaagccctactacaagctgacctgggaggagaagaagaagttcgacgagaagcagagcctgagagccagcagaatcagagccgagatgttcgccaagggccagcccgtggccccctacaacaccacccagttcctgatggacgaccacgaccaggaggagcccgacctgaagaccggcctgtacagcaagagagccgccgccaagagcgacgacaccagcgacgacgacttcatggaggagggcggcgaggaggacggcggcagcgacggcatgggcggcgacggcagcgagttcctgcagagagacttcagcgagacctacgagagataccacaccgagagcctgcagaacatgagcaagcaggagctgatcaaggagtacctggagctggagaagtgcctgagcagaatggaggacgagaacaacagactgagactggagagcaagagactgggcggcgacgacgccagagtgagagagctggagctggagctggacagactgagagccgagaacctgcagctgctgaccgagaacgagctgcacagacagcaggagagagcccccctgagcaagttcggcgactag

SEQ ID NO: 165328 - DNA, 4785 bp, Artificial Sequence
  derived and/or modified sequence
acctgcttccctctcggatagccagggctgatgatttcaactcattaatcattccgaactcttcccaacaaacagcctcatggctgtcccggacctcctctgtcccggctcaggaaatgatctcggtcggaagtgaaaagaccaaatcggccccaggaggccattttcttcgacagaagctgaggcgtgggggcgtggccttcccccgcttccccctccactcccccgcccgcccccggccccggctttccgatctcggcccagggaagagccttggtcgcgaatcaccagtttgcatttgcccctggggcgggggcggctttctgagaccaggctggggctgggactccgccaccttcagctaagggtaccgaggtcagtccgggagtcgcgtcaccgggactcgaacccgcctcttcgtcttccgaggcctagtgcgagcctgcggcgctaaacgcagtcacactgtccctttaaggcggcactttttattcttcatttgtttacttcttcatgcgctcttcggtctttacaaaatgtgctcgcgatatccttccgcaagtgtcagtctcaggcactcaccacccgccttgaagccatttctataatcttaagactcgcgagttagcagccgtgggccgacgtctctctttataggatttaattcttttacattttagggactactttttaggaataaaccattcttgcgttagttaataaaggttcataaccttcggaacccctccgctgagaacaaaatacgataatagcctttataacgcaccttttcataaaaatattctgtgaggactctcataggccatcgaatcttctcgtattcctgaaacagaatggtacggtccagaacccgccccatcttctctgcgattggccgtccttcctcagcgagtcgtgtgatttttcaccaatggccgctcgcgtttctttagcgaggtctaagcgatggaaggtggcggccagggagacgccccctacgcgtcctgggattggctacgtcgcacggcgcgcgagggcggcgggcccgaaagataagaactacgactcccggcgccccgcaaagggaactccgttacgcatgcgcacgggcggggcgaaaaagcttctatataaaaggggcgcagaggactgggagacagcagttggaagttggcaggtggagaggcaggttgggagggaaagtcgggggaggacgcggaagaggagctgtgggaagggggaggagggagggaggaaaagaggaggaggcggaggagaactgagcagagcagagcatcgagccaaaggggagatgagtttgtctgtcctctgctgaggctacggccgggcctagggaactgggagcttgggtggaagcgacacccgtggaagtgggaggaggtggcgccgggactttaaccccttgtgggctctgcggcaggggatttaaccctttgtggatctggcccctcggaggcagcgtcatcggtagttttaaccccttcggggctgggtttcacgcactggacttaccctcatcaccttgctcaccaactcctttattggggtgctccgcttggaggtttgaggcccacctccgcccattacgtactgttcctgccgctgcacccccttggacccgctagctggccgcactgtgggcgcttaaccctttactgacttgagctccccagattgcagttggagtttgctgatagaaggactagctaaaggcgtcactgcaggaattacaaactgaagaggactctgttggactgttttttttttctttttcttttttttaagaaaaacccatttttttccttaaggacttactagccaaaatttcttaaacttcgaggactctactagccatggccgagccattcttgtcagaatatcaacaccagcctcaaactagcaactgtacaggtgctgctgctgtccaggaagagctgaaccctgagcgccccccaggcgcggaggagcgggtgcccgaggaggacagtaggtggcaatcgagagcgttcccccagttgggtggccgtccggggccggagggggaagggagcctggaatcccaaccacctcccttgcagacccaggcctgtccagaatctagctgcctgagagagggcgagaagggccagaatggggacgactcgtccgctggcggcgacttcccgccgccggcagaagtggaaccgacgcccgaggccgagctgctcgcccagccttgtcatgactccgaggccagtaagttgggggctcctgccgcagggggcgaagaggagtggggacagcagcagagacagctggggaagaaaaaacataggagacgcccgtccaagaagaagcggcattggaaaccgtactacaagctgacctgggaagagaagaaaaagttcgacgagaaacagagccttcgagcttcaaggatccgagccgagatgttcgccaagggccagccggtcgcgccctataacaccacgcagttcctcatggatgatcacgaccaggaggagccggatctcaaaaccggcctgtactccaagcgggccgccgccaaatccgacgacaccagcgatgacgacttcatggaagaagggggtgaggaggatgggggcagcgatgggatgggaggggacggcagcgagtttctgcagcgggacttctcggagacgtacgagcggtaccacacggagagcctgcagaacatgagcaagcaggagctcatcaaggagtacctggaactggagaagtgcctctcgcgcatggaggacgagaacaaccggctgcggctggagagcaagcggctgggtggcgacgacgcgcgtgtgcgggagctggagctggagctggaccggctgcgcgccgagaacctccagctgctgaccgagaacgaactgcaccggcagcaggagcgagcgccgctttccaagtttggagactagactgaaacttttttgggggagggggcaaaggggactttttacagtgatggaatgtaacattatatacatgtgtatataagacagtggacctttttatgacacataatcagaagagaaatccccctggctttggtttcgtaaatttagctatatgtagcttgcgtgctttctcctgttcttttaattatgtgaaactgaagagttgcttttcttgttttcctttttagaagtttttttccttaatgtgaaagtaatttgaccaagttataatgcatttttgtttttaacaaatcccctccttaaacggagctataaggtggccaaatctgagaacaattaaattcattttagttataataaatttaatatttgtaaatgtaacatagtttcagtgtgatttctagagctaattcaaaatagtattgatatattttatgtgactgcatttttggggaggggtaccgaaatcgttaaatttgtcagtttgcaaaaatatcaatctttaatgggagaattttcaatttgccaattttttccttgaatgggtttaagtatgctacaatatacagttcaggcaaaatttaagatgtaattatcttcaatacttaagtgtgcttgctttctagtgccttggttttctttcttgatgctggaaaaataaacaaaccggtattgagtgtttaggcgagtggaaagtggctacaatccaaaattttaaatttaactctgcctcggccattcaaaagtctaataacaaaaaatgtaaacctaatttggcagtttgttaggttagacaactgacagcctcatttcattcctacaagttggttttcagtaatctcttccttccccccagtaaggctggaagaggctcttggcaaacttcttagtgcaagcaatggttagattaatttgtgaggcagctctttaagacgttcagaggtaagaaatactggatttataaagcaaatggctgtttgggggattccaaggatttacctaattgtccaattctacgtgctctctataccaaaacaaaaaaaaaaagctatccacctttccatgtgggtcaaactaaaattagaaatgtcccctcactgcagatcaaatgtaaagcttccagttaaggagctaaatgaggtcctcagctgaatgaggaaccctgtacatccccttgcacagccctattctaaatcgcttaaactatgctgatagctgcttaggttcttgagtagttctgctcttaaacgtagggaggccctgagaactaaattttgccccaaaataaaaacagaaattatgagattgcctcctgtcattttggttaacccagtccttcacctgccctgtgtcagtgtcttctgagggcaattgcgttgctcaaatcactagcacagaggttccttaatttggggccttagaaaccattgtgggccttggggtccatgaaccccatgaaattatttgtagacttgtatgtacatttttctggggagaaggttcaagagattcataagattgtcaaactccttgaaggttcagaacctctgcagggaagggggaagaaaaccctcccattaggaagcatgcttttgcagttaaatggcgatggtggaggtgatagggacttcaagagtaaaatgcaccttgtattgcataagaagcatacacaaatcaataaatcaagggagattataccagtaggactgaatcagggccttcaaagctggactgagttggtcctgttctggcacatatggtccactggagacaatgtatgattgagtttttctttggtctaaaaattatattaaacatttattttgaaata

SEQ ID NO: 165329 - DNA, 1080 bp, Artificial Sequence
  derived and/or modified sequence
atggctgaacctttcctgtcagagtatcaacatcaacctcagacatccaattgcaccggggccgccgctgtgcaggaagagcttaaccctgagcgtccgcccggcgcagaagaaagagtccctgaagaagactcaaggtggcagtcccgcgcgttcccgcagcttgggggcagacccggccccgagggcgagggctctctggagagtcaacccccgccactgcagacccaggcctgtccagagagtagctgtctgagggagggcgaaaaggggcagaacggcgacgactcatcagccgggggcgacttccctccccctgctgaggtcgagcctactccagaagcagagctgttagcccaaccttgccatgattctgaagcaagcaaacttggggcgcccgccgccggaggggaggaggagtgggggcagcaacagagacagctcggaaaaaagaagcacagacgcaggccgagtaagaagaagcggcattggaagccttactacaaattgacatgggaggagaaaaagaagttcgatgagaaacaaagtctgagggcctcaagaattcgggctgagatgttcgcgaaaggacaacccgtagctccatacaataccacgcagttcctgatggatgaccacgaccaggaagagcccgacctgaaaacagggctgtattccaaacgggccgccgccaagtccgacgacacatcagacgacgacttcatggaagaagggggcgaagaagacgggggctctgatggaatgggaggagatgggagcgagttcctgcaacgtgacttctccgaaacctatgagagataccataccgaatccctgcaaaacatgtccaagcaggagcttattaaggaatacctcgaacttgaaaagtgcctgagtcgtatggaagatgagaataacaggctacgtcttgagtctaaacgactggggggcgatgatgcccgcgttcgagagcttgaactcgaactcgacaggctccgtgccgagaacctgcaactcttaaccgagaacgaactccaccggcagcaagaaagggcacccctgtctaagttcggcgattag

SEQ ID NO: 165330 - DNA, 1080 bp, Artificial Sequence
  derived and/or modified sequence
atggccgagcccttcctgtctgagtaccagcaccagccccagaccagcaactgcacaggagctgctgctgtgcaggaggagctgaaccctgagaggcctcctggagctgaggagcgggtgcctgaggaggacagccgctggcagagccgggccttcccccagctgggcggccggcccggccctgagggggagggcagcctggagagccagcccccacccctgcagacccaggcctgcccagagagcagctgcctgcgggagggggagaagggccagaatggagatgacagcagcgctggaggagacttccccccacctgctgaggtggagcccaccccagaggccgagctgctggcccagccctgccatgattctgaggccagcaagctgggcgccccagctgctggaggagaggaggagtggggccagcagcagaggcagctgggcaagaagaagcacagaagaagacccagcaagaagaagaggcactggaagccctactacaagctgacctgggaggagaagaagaagtttgatgagaagcagagcctgcgggccagccgcatccgggcagagatgtttgccaagggccagcctgtggccccctacaacaccacccagttcctgatggatgaccatgaccaggaggagccagacctgaagacaggcctgtacagcaagagagctgctgccaagagtgatgacaccagtgatgatgacttcatggaggagggcggggaggaggatggcggcagtgatggcatgggaggagatggcagcgagttcctgcagagggacttcagcgagacctatgagcgctaccacacagagagcctgcagaacatgagcaagcaggagctgatcaaggagtacctggagctggagaagtgcctgagcaggatggaggatgagaacaaccggctgcggctggagagcaagaggctgggcggagatgatgcccgggtgcgggagctggagctggagctggaccggctgcgggcagagaacctgcagctgctgacagaaaatgagctgcaccggcagcaggagcgggcccccctgagcaagtttggagactag

SEQ ID NO: 165331 - DNA, 1080 bp, Artificial Sequence
  derived and/or modified sequence
atggccgagcccttcctgagcgagtaccagcaccagccccagacctccaactgtactggagccgcagctgttcaggaagaactcaatcctgagaggcccccaggcgctgaggagcgtgtgcccgaggaggactcgagatggcaatctagagctttcccccaacttggcggaaggccaggcccagaaggcgaagggtctctagagagtcaaccacctcctttgcaaactcaagcatgccctgagtcatcatgcttaagggagggtgaaaaggggcagaacggagacgatagcagtgccggcggagacttccctcctccggcggaggttgagcctaccccagaggccgaacttctggctcagccgtgccatgactcagaagctagtaagctgggcgcacccgcagccggtggcgaagaggaatggggccagcagcagagacaattaggaaaaaaaaagcaccgccgccggccttctaagaaaaagagacactggaagccctactacaaactaacctgggaggaaaaaaaaaagttcgatgaaaagcagtccctgcgcgctagtcgcattagggctgagatgttcgccaagggccagcccgtcgcaccttataacactacgcagttcctaatggatgatcacgaccaggaggaacccgacctgaaaactggcctgtactccaaacgagccgcggctaagtctgatgatacaagcgatgacgattttatggaggaaggaggagaggaagatggaggctctgatggaatgggcggcgacggctctgagtttttgcagcgggatttttcagagacctacgagaggtaccacacagaaagtcttcagaacatgagtaagcaggagctcataaaagaatacctggagctggaaaaatgcttgtctcggatggaggatgaaaacaatagattaagactggagagcaagcgattgggcggagacgatgccagggtgcgggaacttgagctcgaactggatagattacgagccgaaaatttacagctgttaactgagaacgagctccacagacaacaggaaagggctcctctgagtaaatttggagactag

SEQ ID NO: 165332 - DNA, 1080 bp, Artificial Sequence
  derived and/or modified sequence
atggccgagccgtttctatcggagtaccagcaccagcctcagacatcaaattgcacaggggcagctgccgttcaggaagagctgaacccagagagacctccaggagcggaggagcgggttcctgaagaagactctcgatggcagagccgggcttttccacagctggggggaaggcccggaccagagggagaaggcagcctggaaagccagcccccacccctgcagacccaggcgtgccctgaatccagctgtctcagggaaggggagaaaggacaaaacggcgatgattcctccgctggtggagattttcctccccctgccgaggttgagccgacccccgaagcagaactgctggcacagccctgccacgatagtgaagcgagcaagctgggagcccctgccgctgggggagaggaggaatggggacaacagcagagacagctgggcaaaaagaagcaccgtaggcggcctagcaagaagaaacggcattggaagccatactacaaattgacgtgggaagaaaagaaaaagttcgatgaaaagcagtctctcagagcatctcgcatcagggccgaaatgtttgccaagggacagcctgtggctccatacaataccacacaattcctgatggacgatcatgaccaggaagagcccgacttaaaaaccggattgtactcaaaacgcgctgcagctaaatccgatgacacctccgacgatgattttatggaggaaggcggtgaagaggacgggggatccgacgggatgggcggagatggctccgagttcctacagagagatttcagcgaaacttacgaacgttaccataccgaatccttgcagaacatgagtaagcaggagctgatcaaggagtatctggaacttgaaaaatgcttaagccgtatggaggatgagaacaaccgcttgcgactggaaagcaagcggcttggcggtgacgatgcaagggtacgcgagctcgaactggagctcgatagactccgcgcagagaacctccagttgctcaccgaaaacgagctgcacaggcaacaggagcgggcacccctctccaaattcggtgactag

SEQ ID NO: 165333 - protein, 1193 aa, Artificial Sequence
  derived and/or modified sequence
MWRVKKLSLSLSPSPQTGKPSMRTPLRELTLQPGALTNSGKRSPACSSLTPSLCKLGLQEGSNNSSPVDFVNNKRTDLSSEHFSHSSKWLETCQHESDEQPLDPIPQISSTPKTSEEAVDPLGNYMVKTIVLVPSPLGQQQDMIFEARLDTMAETNSISLNGPLRTDDLVREEVAPCMGDRFSEVAAVSEKPIFQESPSHLLEESPPNPCSEQLHCSKESLSSRTEAVREDLVPSESNAFLPSSVLWLSPSTALAADFRVNHVDPEEEIVEHGAMEEREMRFPTHPKESETEDQALVSSVEDILSTCLTPNLVEMESQEAPGPAVEDVGRILGSDTESWMSPLAWLEKGVNTSVMLENLRQSLSLPSMLRDAAIGTTPFSTCSVGTWFTPSAPQEKSTNTSQTGLVGTKHSTSETEQLLCGRPPDLTALSRHDLEDNLLSSLVILEVLSRQLRDWKSQLAVPHPETQDSSTQTDTSHSGITNKLQHLKESHEMGQALQQARNVMQSWVLISKELISLLHLSLLHLEEDKTTVSQESRRAETLVCCCFDLLKKLRAKLQSLKAEREEARHREEMALRGKDAAEIVLEAFCAHASQRISQLEQDLASMREFRGLLKDAQTQLVGLHAKQEELVQQTVSLTSTLQQDWRSMQLDYTTWTALLSRSRQLTEKLTVKSQQALQERDVAIEEKQEVSRVLEQVSAQLEECKGQTEQLELENSRLATDLRAQLQILANMDSQLKELQSQHTHCAQDLAMKDELLCQLTQSNEEQAAQWQKEEMALKHMQAELQQQQAVLAKEVRDLKETLEFADQENQVAHLELGQVECQLKTTLEVLRERSLQCENLKDTVENLTAKLASTIADNQEQDLEKTRQYSQKLGLLTEQLQSLTLFLQTKLKEKTEQETLLLSTACPPTQEHPLPNDRTFLGSILTAVADEEPESTPVPLLGSDKSAFTRVASMVSLQPAETPGMEESLAEMSIMTTELQSLCSLLQESKEEAIRTLQRKICELQARLQAQEEQHQEVQKAKEADIEKLNQALCLRYKNEKELQEVIQQQNEKILEQIDKSGELISLREEVTHLTRSLRRAETETKVLQEALAGQLDSNCQPMATNWIQEKVWLSQEVDKLRVMFLEMKNEKEKLMIKFQSHRNILEENLRRSDKELEKLDDIVQHIYKTLLSIPEVVRGCKELQGLLEFLS

SEQ ID NO: 165334 - protein, 316 aa, Artificial Sequence
  derived and/or modified sequence
MQSWVLISKELISLLHLSLLHLEEDKTTVSQESRRAETLVCCCFDLLKKLRAKLQSLKAEREEARHREEMALRGKDAAEIVLEAFCAHASQRISQLEQDLASMREFRGLLKDAQTQLVGLHAKQEELVQQTVSLTSTLQQDWRSMQLDYTTWTALLSRSRQLTEKLTVKSQQALQERDVAIEEKQEVSRVLEQVSAQLEECKGQTEQLELENSRLATDLRAQLQILANMDSQLKELQSQHTHCAQDLAMKDELLCQLTQSNEEQAAQWQKEEMALKHMQAELQQQQAVLAKEVRDLKETLEFADQENQVAHLELAW

SEQ ID NO: 165335 - DNA, 951 bp, Artificial Sequence
  derived and/or modified sequence
atgcagagctgggtgctgatcagcaaggagctgatcagcctgctgcacctgagcctgctgcacctggaggaggacaagaccaccgtgagccaggagagcagaagagccgagaccctggtgtgctgctgcttcgacctgctgaagaagctgagagccaagctgcagagcctgaaggccgagagagaggaggccagacacagagaggagatggccctgagaggcaaggacgccgccgagatcgtgctggaggccttctgcgcccacgccagccagagaatcagccagctggagcaggacctggccagcatgagagagttcagaggcctgctgaaggacgcccagacccagctggtgggcctgcacgccaagcaggaggagctggtgcagcagaccgtgagcctgaccagcaccctgcagcaggactggagaagcatgcagctggactacaccacctggaccgccctgctgagcagaagcagacagctgaccgagaagctgaccgtgaagagccagcaggccctgcaggagagagacgtggccatcgaggagaagcaggaggtgagcagagtgctggagcaggtgagcgcccagctggaggagtgcaagggccagaccgagcagctggagctggagaacagcagactggccaccgacctgagagcccagctgcagatcctggccaacatggacagccagctgaaggagctgcagagccagcacacccactgcgcccaggacctggccatgaaggacgagctgctgtgccagctgacccagagcaacgaggagcaggccgcccagtggcagaaggaggagatggccctgaagcacatgcaggccgagctgcagcagcagcaggccgtgctggccaaggaggtgagagacctgaaggagaccctggagttcgccgaccaggagaaccaggtggcccacctggagctggcctggtag

SEQ ID NO: 165336 - DNA, 3582 bp, Artificial Sequence
  derived and/or modified sequence
atgtggagagtcaagaaactgtctctttccctcagcccctccccacaaaccggaaaaccctcgatgcggactcccctgcgggagctcacgctccagccgggagccttgactaattcggggaaacgcagtcccgcctgcagctctctgacaccttctctgtgtaaacttgggttacaggagggtagcaataacagctcgcccgtggacttcgtgaacaataaacggactgacctgagcagtgagcactttagccacagttcgaaatggctggaaacctgccagcatgaatccgatgaacagcccctggatcccattcctcaaatttcttcaacccctaagacatccgaggaagccgtggacccacttgggaactatatggtgaaaaccatcgttctggtaccaagccctttgggacagcaacaggacatgattttcgaggcccgtttggacaccatggcagagaccaacagcattagcctgaatggccctctccgaacagacgatctggtccgagaggaagtggccccctgtatgggggaccgatttagtgaggttgcagccgtaagtgagaagcccatatttcaggagtcccccagtcatctgttagaagaatctccccccaacccgtgctctgaacagctgcattgtagtaaagagagtttatcatcgcggacggaagcagtccgggaagacctcgtaccctcagaatctaacgccttcctgccaagttcagtgctctggctcagtccatcaacggccttagcagccgacttcagggttaatcacgttgatccagaagaggagatcgtggagcacggcgcaatggaagagcgggaaatgcgctttccaacccacccaaaagagtccgagactgaggaccaagctttggtgagttctgttgaagacatactgtcaacatgtctcacacccaacctggtggagatggagtctcaagaggcccccggccctgctgttgaagatgtaggccggattctgggaagcgacaccgaatcctggatgagtcctttggcatggctcgagaaaggggtgaacaccagcgtgatgcttgagaatctgaggcaatccctctccctgcccagcatgctaagggacgctgcaatcggcacaactcctttctcgacgtgcagcgtcgggacttggtttaccccaagtgccccccaggagaaatccaccaacacctcacagactggattggtgggtaccaagcacagcaccagcgagacggagcaactgctgtgtggcaggccaccagaccttactgctctttcacggcatgacctggaggataatctgctcagctccttagtgatcctggaagtcctgagccggcagctgcgcgactggaagagtcagctggccgtcccccacccagagacccaggattcttcaacccaaacagacacaagccacagtgggattaccaacaagctgcagcacctgaaggagtcccacgagatggggcaggcactgcagcaggctcgaaacgtgatgcagtcatgggtgttaatttctaaggagctgatctctcttttacatttaagtctgctccatttggaggaagacaagacaacagtaagtcaggagtcacgacgcgccgagacactagtgtgctgctgcttcgacctcctaaagaagctgagagcaaagctgcagagtctgaaggctgaacgcgaagaggctcgccacagagaagagatggcgctgcgcggtaaggatgctgcagagatagtgcttgaagctttttgcgcacatgcctcacagcggatttcccagcttgaacaggacctggcatccatgcgcgagttcagaggcctgctgaaagatgcccagacccaactggtgggtctccatgccaaacaggaagaactcgtgcagcaaacagtgagcctcacctcaactctgcagcaggactggcggagcatgcagctggactacactacgtggacggcgctgctctcccggagccggcagctgactgaaaagctaaccgtgaagtcccagcaggccttgcaggagagagacgtggccatcgaggagaaacaggaggtaagccgcgtgctggaacaagtgtcagcacagctggaagagtgtaaggggcagacggagcagctcgagctggaaaattcccggcttgctacagacctcagggcccaattgcagatactcgcaaacatggatagtcagctaaaggagttgcagtcccagcatactcattgtgcgcaggacctggccatgaaggacgaattgttgtgtcagctgactcaatccaacgaggagcaggcagcccagtggcagaaggaagagatggctctcaaacacatgcaggcagaactgcagcagcagcaggctgttcttgccaaagaggtcagggacctcaaagagaccttggagttcgccgatcaggagaaccaagtcgcccatctcgagttggggcaagttgagtgccagctcaagacaactctggaggtgcttcgagaaaggagcctgcagtgcgagaacctaaaagacacagttgaaaacttaactgccaagctcgcctctacaattgctgacaaccaggagcaggacctcgagaagactaggcaatactctcagaagcttggccttctcaccgagcaactgcagagcttaaccctctttttgcagacaaaactgaaggagaaaacagagcaggagaccctgctactatctacggcgtgcccaccgacacaggaacacccattgcccaatgatcggacattcctgggctcaatcctgactgctgtggccgacgaggagccagaatctacccccgtaccactgcttggctccgataagtcagctttcacgcgggtcgcgagcatggtctcccttcagcctgccgagacgcccggaatggaagagagcctggcagaaatgagtattatgacaacagagctgcaaagtctctgcagcctactacaggaaagcaaggaggaggctattagaacgctccagcgtaagatttgcgagttgcaggctagacttcaagcccaggaagagcaacaccaggaagtgcagaaggctaaggaggccgatatcgaaaagttgaatcaggcattatgcttgcgctataaaaatgaaaaggaattacaagaggttattcaacagcagaatgagaagatcctcgaacaaattgataagagtggggagctgatctctctacgggaagaagtcacacacctaacacgctccctccgccgggccgaaacggagactaaagtgctccaagaggctttggctgggcagttggactcgaattgccaacccatggctaccaactggatccaagagaaggtgtggctttcccaggaagtggacaagctcagagttatgttccttgaaatgaagaatgagaaggagaagcttatgattaaatttcagtctcatcgaaatatacttgaggagaatctgagacggtctgacaaggagctggagaagctggacgacattgttcaacacatctacaagacgctgctttctatccctgaagtggtgaggggatgcaaggaactccagggactgcttgaatttctctcttag

SEQ ID NO: 165337 - DNA, 951 bp, Artificial Sequence
  derived and/or modified sequence
atgcagagttgggtcttaatcagcaaagagcttatttccctgttgcatctctcgctgttacacttggaagaggacaaaaccacagtcagtcaggagtcacgccgggctgagacactggtctgctgctgcttcgacctgctcaagaagctacgagccaaactgcaatccctaaaggctgagcgcgaagaggcccggcatagagaggaaatggccctaagagggaaagatgcagctgaaattgtgctcgaggctttctgtgcccacgccagccagcgaatttcccaattagagcaagatctcgcctccatgcgagagttcaggggtctcctcaaggatgcccaaacacagcttgtcggcctccatgcaaagcaggaagaactggtccagcagaccgtgtctcttacctccacactgcagcaagattggagatccatgcaacttgactatactacgtggaccgctctgctgtcccgatctcggcagctgacggagaaactgaccgtaaaatcccaacaggcgctgcaggagcgggatgttgcaatcgaagagaaacaagaagtgagcagagttctcgagcaagtaagtgcccagttagaagagtgcaaaggccagaccgaacagctggaactcgaaaactccagattggccacagatttacgagctcagctccagattttggccaatatggatagccaattgaaggaactccagtcccagcatacacactgcgcgcaagacctcgctatgaaagacgaacttttatgtcagctgacccagtccaatgaagaacaagccgctcaatggcagaaggaggagatggccttaaaacacatgcaggcagagctgcagcaacagcaggccgtacttgccaaggaggtgagagatttgaaggaaactcttgagttcgctgatcaggaaaaccaggttgcccaccttgaactagcctggtag

SEQ ID NO: 165338 - DNA, 3582 bp, Artificial Sequence
  derived and/or modified sequence
atgtggagggtgaagaagctgagcctgagcctgagccccagcccccagacaggcaagcccagcatgaggacccccctgcgggagctgaccctgcagcccggggccctgaccaacagcggcaagaggagccctgcctgcagcagcctgacccccagcctgtgcaagctgggcctgcaggagggcagcaacaacagcagccctgtggactttgtgaacaacaagaggacagacctgagcagcgagcacttcagccacagcagcaagtggctggagacctgccagcatgaaagtgatgagcagcccctggaccccatcccccagatcagcagcacccccaagaccagcgaggaggccgtggaccccctgggcaactacatggtgaagaccatcgtgctggtgcccagccccctgggccagcagcaggacatgatctttgaggcccggctggacaccatggccgagaccaacagcatcagcctgaatggccccctgaggacagatgacctggtgcgggaggaggtggccccctgcatgggagaccgcttcagcgaggtggccgctgtgtctgagaagcccatcttccaggagagccccagccacctgctggaggagagcccccccaacccctgcagcgagcagctgcactgcagcaaggagagcctgagcagcaggacagaagctgtgcgggaggacctggtgcccagcgagagcaatgccttcctgcccagctctgtgctgtggctgagccccagcacagccctggccgctgacttccgggtgaaccacgtggaccctgaggaggagatcgtggagcacggggccatggaggagcgggagatgaggttccccacccaccccaaggagagcgagacagaggaccaggccctggtgtcctctgtggaggacatcctgagcacctgcctgacccccaacctggtggagatggagagccaggaggcccctggccctgctgtggaggatgtgggccgcatcctgggcagtgacacagagagctggatgagccccctggcctggctggagaagggcgtgaacacctctgtgatgctggagaacctgcggcagagcctgagcctgcccagcatgctgagagatgctgccatcggcaccacccccttcagcacctgcagcgtgggcacctggttcaccccatctgccccccaggagaagagcaccaacaccagccagacaggcctggtgggcaccaagcacagcaccagcgagacagagcagctgctgtgtggccggcccccagacctgacagccctgagcagacatgacctggaggacaacctgctgagcagcctggtgatcctggaggtgctgagccggcagctgcgggactggaagagccagctggccgtgccccaccctgagacccaggacagcagcacccagacagacaccagccacagcggcatcaccaacaagctgcagcacctgaaggagagccatgagatgggccaggccctgcagcaggccagaaatgtgatgcagagctgggtgctgatcagcaaggagctgatcagcctgctgcacctgagcctgctgcacctggaggaggacaagaccaccgtgtcccaggagagcagaagagctgagaccctggtgtgctgctgctttgacctgctgaagaagctgcgggccaagctgcagagcctgaaggccgagcgggaggaggcccggcaccgggaggagatggccctgcggggcaaggatgctgctgagatcgtgctggaggccttctgtgcccacgccagccagaggatcagccagctggagcaggacctggcctccatgagggagttccggggcctgctgaaggatgcccagacccagctggtgggcctgcacgccaagcaggaggagctggtgcagcagacagtgtccctgaccagcaccctgcagcaggactggaggtccatgcagctggactacaccacctggacagccctgctgagccgcagccggcagctgacagagaagctgactgtgaagagccagcaggccctgcaggagagagatgtggccatcgaggagaagcaggaggtgtcccgggtgctggagcaggtgtctgcccagctggaggagtgcaagggccagacagagcagctggagctggagaacagccggctggccacagacctgcgggcccagctgcagatcctggccaacatggacagccagctgaaggagctgcagagccagcacacccactgtgcccaggacctggccatgaaggatgagctgctgtgccagctgacccagagcaatgaggagcaggccgcccagtggcagaaggaggagatggccctgaagcacatgcaggccgagctgcagcagcagcaggccgtgctggccaaggaggtgcgggacctgaaggagaccctggagtttgctgaccaggagaaccaggtggcccacctggagctgggccaggtggagtgccagctgaagaccaccctggaggtgctgcgggagaggagcctgcagtgtgagaacctgaaggacacagtggagaacctgacagccaagctggccagcaccatcgctgacaaccaggagcaggacctggagaagacccggcagtacagccagaagctgggcctgctgacagagcagctgcagagcctgaccctcttcctgcagaccaagctgaaggagaagacagagcaggagaccctgctgctgagcacagcctgcccccccacccaggagcaccccctgcccaatgacaggaccttcctgggcagcatcctgacagctgtggctgatgaggagcctgagagcacccctgtgcccctgctgggcagtgacaagagcgccttcaccagggtggcctccatggtgtccctgcagcctgctgagaccccaggcatggaggagagcctggccgagatgagcatcatgaccacagagctgcagagcctgtgcagcctgctgcaggagagcaaggaggaggccatccgcaccctgcagaggaagatctgtgagctgcaggcccggctgcaggcccaggaggagcagcaccaggaggtgcagaaggccaaggaggccgacatcgagaagctgaaccaggccctgtgcctgcgctacaagaatgagaaggagctgcaggaggtgatccagcagcagaatgagaagatcctggagcagattgacaagagcggggagctgatcagcctgcgggaggaggtgacccacctgaccaggagcctgcggcgggcagagacagagaccaaggtgctgcaggaggccctggccggccagctggacagcaactgccagcccatggccaccaactggatccaggagaaggtgtggctgagccaggaggtggacaagctgcgggtgatgttcctggagatgaagaatgagaaggagaagctgatgatcaagttccagagccacaggaacatcctggaggagaacctgcggcggagtgacaaggagctggagaagctggatgacatcgtgcagcacatctacaagaccctgctgagcatccctgaggtggtgcggggctgcaaggagctgcagggcctgctggagttcctgtcctag

SEQ ID NO: 165339 - DNA, 951 bp, Artificial Sequence
  derived and/or modified sequence
atgcagagctgggtgctgatcagcaaggagctgatcagcctgctgcacctgagcctgctgcacctggaggaggacaagaccaccgtgtcccaggagagccggcgggcagagaccctggtgtgctgctgctttgacctgctgaagaagctgcgggccaagctgcagagcctgaaggccgagcgggaggaggcccggcaccgggaggagatggccctgcggggcaaggatgctgctgagatcgtgctggaggccttctgtgcccacgccagccagaggatcagccagctggagcaggacctggcctccatgagggagttccggggcctgctgaaggatgcccagacccagctggtgggcctgcacgccaagcaggaggagctggtgcagcagacagtgtccctgaccagcaccctgcagcaggactggaggtccatgcagctggactacaccacctggacagccctgctgagccgcagccggcagctgacagagaagctgactgtgaagagccagcaggccctgcaggagagagatgtggccatcgaggagaagcaggaggtgtcccgggtgctggagcaggtgtctgcccagctggaggagtgcaagggccagacagagcagctggagctggagaacagccggctggccacagacctgcgggcccagctgcagatcctggccaacatggacagccagctgaaggagctgcagagccagcacacccactgtgcccaggacctggccatgaaggatgagctgctgtgccagctgacccagagcaatgaggagcaggccgcccagtggcagaaggaggagatggccctgaagcacatgcaggccgagctgcagcagcagcaggccgtgctggccaaggaggtgcgggacctgaaggagaccctggagtttgctgaccaggagaaccaggtggcccacctggagctggcctggtag

SEQ ID NO: 165340 - DNA, 3582 bp, Artificial Sequence
  derived and/or modified sequence
atgtggcgggtgaagaagctgagcctgagcctgagccccagcccccagacaggaaagccctccatgagaacaccactgcgtgagcttacattgcagcctggtgcactaactaattcaggcaagaggagtcctgcttgctcgtccctcacaccttccctgtgcaagctgggactgcaagagggcagcaataattcctctccagtggactttgtgaacaacaaaagaacagacctcagcagtgagcacttctcccatagctccaagtggctggagacctgccaacacgaatccgatgaacagcctctggaccccatcccacagatctcctcaacacccaaaacttctgaagaagccgtggatcccttaggaaactacatggtgaagacaatcgtgctagtacctagccctctgggtcagcagcaggacatgattttcgaggcacgtcttgatactatggccgagaccaattccatcagtcttaatggcccgctgagaaccgacgatctggttcgggaagaagtggccccttgcatgggagaccgcttttccgaagtggcagctgtttctgaaaagccaatttttcaggagagccccagccatctgctggaggagtcccccccaaatccatgcagcgagcagttgcattgcagtaaggagagcctgagctctagaaccgaggcggtgagagaggacctggttccgagcgaatcaaacgcctttttgccatcttcagttctttggctatctcccagcactgcccttgcagcagatttcagggtaaaccatgttgaccccgaggaggaaatcgtggaacatggagctatggaagagcgcgagatgagattccccacccacccaaaggaatccgaaaccgaggaccaagctctggttagctccgtggaggacatcctgtcgacctgtttgacgccaaatctggttgagatggagtcacaggaggcacctggtccggccgtcgaagacgtcggtcggatactggggtctgatacggagtcatggatgtcaccgctcgcctggttggagaagggtgtcaatacctccgttatgctggagaatttaaggcagtccctgagtctgccgagcatgttaagggatgctgctattggtaccaccccattctcaacatgttctgttggcacctggttcactccgtctgcccctcaggaaaaatcaacaaacacttctcaaacaggcttagttgggactaagcactctacctctgagaccgaacagttgctgtgcggcaggccccctgatctgacagcacttagcagacacgacctggaggataacctcttgagcagtctagtcattcttgaggttctgagtagacagctgagggattggaagtctcagcttgcggttcctcacccggagactcaggacagctccactcaaactgataccagccactccggaatcaccaacaagctacagcatcttaaagaaagccatgaaatggggcaagctctgcagcaagctaggaatgttatgcagagctgggtgctgatctctaaggaactgatctctttactgcatctgtccttgcttcacctggaagaagacaaaaccaccgttagccaagaaagtcggagggcggagaccctggtgtgctgctgctttgacctgctcaagaaactgcgggctaaattacaatctctcaaagccgagcgggaagaagccaggcacagagaggaaatggctctgcgcggcaaagatgctgccgaaatcgttctcgaagcgttctgcgcccatgcatcccaacggataagccaactcgagcaagacctggcctccatgcgggaattccggggcttgctgaaagatgcccagacccaattggtcggcttacacgccaagcaggaggagcttgttcagcagaccgtttcactcacaagcaccctgcagcaggattggcggagcatgcagttagattacacaacttggacagccctgcttagccggtcgaggcagttgacagaaaaactgacagtcaagagccagcaggcccttcaggagcgcgacgtagctatagaggaaaagcaggaggtgtctcgggtcttagaacaggtcagtgctcaactcgaagagtgcaaaggacagactgagcaactggaactggagaacagcagactcgcgactgaccttcgcgcccaactgcaaatcctggccaatatggactctcagctcaaagagctccagagccaacacactcactgcgcacaagatctggcaatgaaggacgagctgctatgccagcttacccaatcaaatgaggagcaggcagcccagtggcagaaggaagagatggccttgaagcacatgcaagcagagttgcagcaacagcaggccgttctggccaaggaagtccgggatttaaaagaaacactcgaatttgccgatcaagaaaatcaggtggctcatctggagttgggccaggtggagtgccagctcaaaactaccctggaggttctgcgtgaaagatccttacaatgcgaaaatcttaaggacacagtggaaaatttaacagctaagttagcatcaactatcgcagataaccaggaacaggacttggaaaagactaggcagtactctcaaaagctgggcctcctcaccgagcaattgcagagcctcacactgttcctccagacgaaactgaaggaaaaaacggaacaagaaactctactcctgagcacagcttgccccccaactcaggaacaccctctgcctaatgatcgcaccttcttaggctctatattgacagctgtcgctgacgaagagcccgaaagcacaccagtgccacttttgggttctgacaagtccgccttcactcgcgtggcctctatggttagtctgcagccggccgaaaccccgggaatggaagagtctctggccgagatgtcaatcatgaccacggaactgcagtctctgtgttcattacttcaagaatcaaaggaagaggctatccgaactcttcagcggaagatctgcgagctgcaggcgcggctgcaagcccaggaggaacagcatcaggaggttcagaaagccaaagaggcggacattgagaaactgaaccaggccctttgtctgcggtacaagaacgagaaggaacttcaagaggtcatacagcagcagaatgaaaagatcctagaacagattgataagtctggcgagctgatctcgttacgggaggaggtcacacatctgactaggtccctgaggcgggctgaaacggaaactaaggtacttcaagaagcccttgctggccaacttgatagtaattgccagcctatggccaccaattggattcaagagaaggtctggctaagccaagaagtcgataaactaagagtgatgttcctggaaatgaaaaatgaaaaagaaaaacttatgataaaattccagagtcacaggaacattctcgaggagaaccttcgtcggagcgacaaggagttggaaaagctcgacgatattgtccagcacatctataagacgcttttgagtataccagaggttgtaaggggatgtaaggaactccaagggttgctagaatttctttcttag

SEQ ID NO: 165341 - DNA, 951 bp, Artificial Sequence
  derived and/or modified sequence
atgcagagctgggtgctgatcagcaaggagctgatcagcctgctgcaccttagtttgctgcacctggaggaagataagaccaccgtgtcgcaggaaagtagacgggcagagacactggtgtgttgttgtttcgacctgctcaaaaagctccgggctaaactgcaaagtctcaaagcggaaagggaagaggcccggcaccgggaggagatggcgctcaggggtaaggatgctgccgagattgtgttagaagctttctgcgcacacgcgagccaaagaatcagccaactagagcaagatctggcatcaatgcgcgagttccgagggttgctcaaggatgcacaaacccagctggttgggctccatgctaagcaggaggaactagtccagcagaccgtgtcactgacgtcaaccctacaacaagactggcgctcaatgcaactggattacaccacatggactgccctgctcagccggagcaggcagctgactgagaagttaaccgtaaagtcccagcaggcgctacaggagcgcgatgtggctattgaggagaagcaagaggttagccgggtgctggagcaagtttctgcccagctggaagagtgcaaggggcagaccgaacagctggagttggaaaacagcaggctggctaccgacctcagggcccagctccagatcctcgccaatatggattcccaactgaaggaacttcagagtcagcatacccactgcgcccaggacttggcaatgaaggatgagctactgtgtcagcttacacagagcaatgaagagcaggcagcccagtggcaaaaagaggagatggccctcaagcatatgcaggctgaactgcaacagcagcaggctgtgttagccaaggaggttcgagatttgaaagagacactggagttcgccgatcaagagaaccaagtcgcacacttagagcttgcctggtag

SEQ ID NO: 165342 - DNA, 3582 bp, Artificial Sequence
  derived and/or modified sequence
atgtggagagtgaaaaagctctccctgtcactctcgccgtcgcctcagacaggcaagccgtccatgaggacccccctgcgcgaactgaccttacaaccaggtgcactcactaatagcggaaaacgctctcctgcctgtagctcactgacacctagtctgtgcaaactcggccttcaggaaggctcaaacaactcaagccctgtggactttgtcaacaataaacggaccgaccttagctcagagcacttctcccactctagcaaatggctggaaacctgtcagcacgagtcagacgagcaacctcttgacccaattcctcagatctcaagcacacccaagacttccgaagaagctgtggatccactgggaaactatatggtgaagactattgtgctggtgcctagcccccttgggcaacagcaggacatgatcttcgaggccaggctggatactatggctgaaactaacagtatatcactgaacggtccactcaggacagatgatctcgtacgggaggaggtcgcaccatgtatgggagacagattttctgaggtcgctgccgtatcagaaaagcccattttccaggagtctccatctcacctcctcgaggaatcgccacccaatccatgttcagagcagttacactgctccaaggagtctttaagttcacgaactgaagccgtgcgcgaggacctagtgccctccgagagtaatgcattcctgccatcatccgtcttgtggcttagtccgagcaccgccctggctgccgattttagggtgaatcatgtcgatcccgaagaagagatcgtcgaacacggcgctatggaagaacgcgaaatgcgctttcccacgcacccaaaggaaagtgagaccgaagatcaggcactggtaagctctgtggaagatattctgtctacatgcctgacaccaaacttggtagagatggagtctcaagaagctcctgggcctgccgttgaggatgtcggcagaattctaggttcagacaccgagagctggatgagcccccttgcctggctggagaaaggagtgaacacctcagtgatgctggagaatctgagacagagcttgagcttgccgagtatgctaagagacgcagctattggcactaccccgttcagcacttgcagcgttggaacctggtttacgcctagcgcgcctcaggagaagtccactaatacctcccagaccgggttggtgggaactaagcactcaacttctgagaccgagcagctgctgtgcggcaggcctcccgatctcacagcgttgagccgtcatgatctagaagacaatctcttgtcttccctggttatcctcgaagtactgtcccgccagcttagagattggaaatcccagctggccgtaccccatccggaaacccaggactctagcacacagacggacaccagccacagtggcatcaccaataaattacagcacttaaaagagagccacgaaatgggccaggcgcttcagcaggcacgcaacgtgatgcagagctgggtcttaatcagcaaagagctcatttccttgctgcacctgagtctgctgcacctcgaggaggataagaccaccgtgtctcaggagtcacgtcgcgcagagactctggtttgttgttgctttgatctcctaaagaaactgagagccaagctccagagtttgaaagctgaacgggaagaagccagacaccgcgaagaaatggctctgcgcggaaaggacgcagccgaaattgtcctggaggctttctgtgctcatgcctcccagcggatctctcagttggagcaggacttagcatcaatgcgggagttcaggggccttctcaaggacgcacagacccagttggtgggtctgcatgccaaacaggaggagctggtccagcaaaccgtatccttgaccagtactttacagcaggactggagatctatgcagttagattatactacgtggactgctctcttgtcccgctctcggcagctaacggagaagttgacagtaaagtctcagcaggcactccaggaacgagacgtggcgattgaagagaagcaagaggtgtcacgggtgcttgaacaggtgagcgcacagttagaggaatgcaaaggccaaacagaacaattagaacttgagaacagtcgcctggcaaccgatttgcgcgctcagctgcagatcctcgcgaatatggactctcaactcaaagagttgcaatctcagcacactcactgtgcacaggatcttgccatgaaggatgaactattgtgtcagctgacccagtcaaacgaggagcaagctgcccagtggcagaaggaagaaatggcactcaagcatatgcaggccgaactccaacagcagcaggccgttctcgccaaggaagtgagagatctcaaggagaccctcgaattcgctgaccaggagaaccaggtggcacacctcgagctcgggcaggtggaatgccagctgaagaccactctggaggtgctgagagaaaggagcctgcagtgcgaaaacctcaaggacactgtagaaaacttgaccgccaaactagcctccacaatcgcagacaaccaggagcaggatctggagaagacccgacagtactcccagaaactgggcctgctaaccgagcagttgcagtccctcaccctttttctgcaaaccaaactcaaggagaaaaccgaacaagaaacactcctcttgagcacggcctgtcctccaactcaggaacatccactccctaatgataggaccttcctcggttcaatccttacagctgtggccgacgaagaaccagagtctacccctgtgccacttttgggcagcgacaaaagtgctttcactcgcgtcgcctccatggtgagcttacaaccggctgaaacacccggaatggaggagtcactggccgagatgtcaatcatgaccactgaactgcaatcactttgttcgctactgcaggaatccaaggaggaggcaatccgaacactgcagcggaagatctgtgaactccaggcgcgactgcaagctcaagaagagcagcaccaagaggttcaaaaggctaaagaagctgacattgagaagctcaaccaggccttgtgtcttcggtataaaaatgagaaagagttgcaagaggtgatccagcaacagaacgaaaaaattctagaacagattgataagtccggcgagttaatcagcctaagagaagaggtgacccacttgacccgcagcctccgccgagccgaaacagagactaaagtgttgcaggaggcgttggctggccagctagactcaaactgccagcccatggcaaccaattggatccaggagaaggtgtggttaagccaggaggtggacaagctgcgcgtaatgtttcttgaaatgaaaaacgaaaaagaaaagcttatgataaaattccagagccaccgaaatattctcgaggagaacctacggcgtagcgacaaggaactggagaaactggacgatatcgtgcagcacatctataagactctgctttccattcccgaggtggtgcgcggatgtaaagaattgcagggtttgctagagttcctctcctag

SEQ ID NO: 165343 - DNA, 951 bp, Artificial Sequence
  derived and/or modified sequence
atgcaatcgtgggtgcttatctcgaaggagctgatctccctgctccacctgagtttgttgcatttggaggaggataagactacggtctcccaggagtcgcggagggcagagacattggtgtgctgctgtttcgatctgctgaagaaactcagagcaaagctgcagtcgctcaaagccgagcgtgaggaagccaggcacagggaagaaatggctctgcgaggcaaagatgccgcagagattgtcctggaagcgttctgcgctcacgcaagccaacgcatatcccagctggaacaggacttagcctccatgagagaattccggggattgctgaaagacgcccaaacacaactggttggtctgcatgcgaaacaggaggaattagtgcagcaaactgtttctctgacctccaccctacagcaggactggagaagtatgcagctggactacactacctggacagcactactgagcagatcgcggcagctcacagagaaacttacagtcaagagccagcaagctctgcaggagcgggacgtggccatcgaggaaaaacaggaggtctcacgcgtgctggagcaggtgagcgcgcagctggaagagtgtaaaggtcaaacagaacaactggagctggagaatagtcgtttggccactgacctgcgcgcacagctgcagatcctcgcgaatatggattcacagctcaaagaactgcagagtcagcatactcattgcgcccaggacctggcaatgaaagacgagctgctgtgtcagttgactcagagcaatgaggaacaggctgctcaatggcagaaggaagaaatggccctcaagcatatgcaagctgagctgcagcagcagcaggccgtgctggccaaggaagtgcgcgatctaaaggagacactagagttcgcagaccaggagaaccaggtcgctcacttagagctggcttggtag

SEQ ID NO: 165344 - DNA, 2526 bp, Artificial Sequence
  derived and/or modified sequence
acagacggcgggtgaacatggcgtcctcgacttggtctgagacgtgataggcctgccttctggttgaagatgtggcgagtgaaaaaactgagcctcagcctgtcgccttcgccccagacgggaaaaccatctatgagaactcctctccgtgaacttaccctgcagcccggtgccctcaccaactctggaaaaagatcccccgcttgctcctcgctgaccccatcactgtgcaagctggggctgcaggaaggcagcaacaactcatctccagtggattttgtaaataacaagaggacagacttatcttcagaacatttcagtcattcctcaaagtggctagaaacttgtcagcatgaatcagatgagcagcctctagatccaattccccaaattagctctactcctaaaacgtctgaggaagcagtagacccactgggcaattatatggttaaaaccatcgtccttgtaccatctccactggggcagcaacaagacatgatatttgaggcccgtttagataccatggcagagacaaacagcatatctttaaatggacctttgagaacagacgatctggtgagagaggaggtggcaccctgcatgggagacaggttttcagaagttgctgctgtatctgagaaacctatctttcaggaatctccgtcccatctcttagaggagtctccaccaaatccctgttctgaacaactacattgctccaaggaaagcctgagcagtagaactgaggctgtgcgtgaggacttagtaccttctgaaagtaacgccttcttgccttcctctgttctctggctttccccttcaactgccttggcagcagatttccgtgtcaatcatgtggacccagaggaggaaattgtagagcatggagctatggaggaaagagaaatgaggtttcccacacatcctaaggagtctgaaacagaagatcaagcacttgtctcaagtgtggaagatattctgtccacatgcctgacaccaaatctagtagaaatggaatcccaagaagctccaggcccagcagtagaagatgttggtaggattcttggctctgatacagagtcttggatgtccccactggcctggctggaaaaaggtgtaaatacctccgtcatgctggaaaatctccgccaaagcttatcccttccctcgatgcttcgggatgctgcaattggcactacccctttctctacttgctcggtggggacttggtttactccttcagcaccacaggaaaagagtacaaacacatcccagacaggcctggttggcaccaagcacagtacttctgagacagagcagctcctgtgtggccggcctccagatctgactgccttgtctcgacatgacttggaagataacctgctgagctctcttgtcattctggaggttctctcccgccagcttcgggactggaagagccagctggctgtccctcacccagaaacccaggacagtagcacacagactgacacatctcacagtgggataactaataaacttcagcatcttaaggagagccatgagatgggacaggccctacagcaggccagaaatgtcatgcaatcatgggtgcttatctctaaagagctgatatccttgcttcacctatccctgttgcatttagaagaagataagactactgtgagtcaggagtctcggcgtgcagaaacattggtctgttgctgttttgatttgctgaagaaattgagggcaaagctccagagcctcaaagcagaaagggaggaggcaaggcacagagaggaaatggctctcagaggcaaggatgcggcagagatagtgttggaggctttctgtgcacacgccagccagcgcatcagccagctggaacaggacctagcatccatgcgggaattcagaggccttctgaaggatgcccagacccaactggtagggcttcatgccaagcaagaagagctggttcagcagacagtgagtcttacttctaccttgcaacaagactggaggtccatgcaactggattatacaacatggacagctttgctgagtcggtcccgacaactcacagagaaactcacagtcaagagccagcaagccctgcaggaacgtgatgtggcaattgaggaaaagcaggaggtttctagggtgctggaacaagtctctgcccagttagaggagtgcaaaggccaaacagaacaactggagttggaaaacagtcgtctagcaacagatctccgggctcagttgcagattctggccaacatggacagccagctaaaagagctacagagtcagcatacccattgtgcccaggacctggctatgaaggatgagttactctgccagcttacccagagcaatgaggagcaggctgctcaatggcaaaaggaagagatggcactaaaacacatgcaggcagaactgcagcagcaacaagctgtcctggccaaagaggtgcgggacctgaaagagaccttggagtttgcagaccaggagaatcaggttgctcacctggagctggcctgg

SEQ ID NO: 165345 - DNA, 4024 bp, Artificial Sequence
  derived and/or modified sequence
caggagggatggactcctggactctccagctacctgcgtggtcctccccggtgtgaggacagaagaccggtcctgggccgggcccgcatccagccctaccgccggtgtctgaggtgagggctccgtcagcggaaaacgctcgacaacggaggggcaggcagggccgggggcgtggtcaacgcgggccccgccccccgggctctacccccgagcgtacgcgcgcgcctgaagcagccaaccaggaagcgcagagcaggttcaaacacagacggcgggtgaacatggcgtcctcgacttggtctgagacgtgataggcctgccttctggttgaagatgtggcgagtgaaaaaactgagcctcagcctgtcgccttcgccccagacgggaaaaccatctatgagaactcctctccgtgaacttaccctgcagcccggtgccctcaccaactctggaaaaagatcccccgcttgctcctcgctgaccccatcactgtgcaagctggggctgcaggaaggcagcaacaactcatctccagtggattttgtaaataacaagaggacagacttatcttcagaacatttcagtcattcctcaaagtggctagaaacttgtcagcatgaatcagatgagcagcctctagatccaattccccaaattagctctactcctaaaacgtctgaggaagcagtagacccactgggcaattatatggttaaaaccatcgtccttgtaccatctccactggggcagcaacaagacatgatatttgaggcccgtttagataccatggcagagacaaacagcatatctttaaatggacctttgagaacagacgatctggtgagagaggaggtggcaccctgcatgggagacaggttttcagaagttgctgctgtatctgagaaacctatctttcaggaatctccgtcccatctcttagaggagtctccaccaaatccctgttctgaacaactacattgctccaaggaaagcctgagcagtagaactgaggctgtgcgtgaggacttagtaccttctgaaagtaacgccttcttgccttcctctgttctctggctttccccttcaactgccttggcagcagatttccgtgtcaatcatgtggacccagaggaggaaattgtagagcatggagctatggaggaaagagaaatgaggtttcccacacatcctaaggagtctgaaacagaagatcaagcacttgtctcaagtgtggaagatattctgtccacatgcctgacaccaaatctagtagaaatggaatcccaagaagctccaggcccagcagtagaagatgttggtaggattcttggctctgatacagagtcttggatgtccccactggcctggctggaaaaaggtgtaaatacctccgtcatgctggaaaatctccgccaaagcttatcccttccctcgatgcttcgggatgctgcaattggcactacccctttctctacttgctcggtggggacttggtttactccttcagcaccacaggaaaagagtacaaacacatcccagacaggcctggttggcaccaagcacagtacttctgagacagagcagctcctgtgtggccggcctccagatctgactgccttgtctcgacatgacttggaagataacctgctgagctctcttgtcattctggaggttctctcccgccagcttcgggactggaagagccagctggctgtccctcacccagaaacccaggacagtagcacacagactgacacatctcacagtgggataactaataaacttcagcatcttaaggagagccatgagatgggacaggccctacagcaggccagaaatgtcatgcaatcatgggtgcttatctctaaagagctgatatccttgcttcacctatccctgttgcatttagaagaagataagactactgtgagtcaggagtctcggcgtgcagaaacattggtctgttgctgttttgatttgctgaagaaattgagggcaaagctccagagcctcaaagcagaaagggaggaggcaaggcacagagaggaaatggctctcagaggcaaggatgcggcagagatagtgttggaggctttctgtgcacacgccagccagcgcatcagccagctggaacaggacctagcatccatgcgggaattcagaggccttctgaaggatgcccagacccaactggtagggcttcatgccaagcaagaagagctggttcagcagacagtgagtcttacttctaccttgcaacaagactggaggtccatgcaactggattatacaacatggacagctttgctgagtcggtcccgacaactcacagagaaactcacagtcaagagccagcaagccctgcaggaacgtgatgtggcaattgaggaaaagcaggaggtttctagggtgctggaacaagtctctgcccagttagaggagtgcaaaggccaaacagaacaactggagttggaaaacagtcgtctagcaacagatctccgggctcagttgcagattctggccaacatggacagccagctaaaagagctacagagtcagcatacccattgtgcccaggacctggctatgaaggatgagttactctgccagcttacccagagcaatgaggagcaggctgctcaatggcaaaaggaagagatggcactaaaacacatgcaggcagaactgcagcagcaacaagctgtcctggccaaagaggtgcgggacctgaaagagaccttggagtttgcagaccaggagaatcaggttgctcacctggagctgggtcaggttgagtgtcaattgaaaaccacactggaagtgctccgggagcgcagcttgcagtgtgagaacctcaaggacactgtagagaacctaacggctaaactggccagcaccatagcagataaccaggagcaagatctggagaaaacacggcagtactctcaaaagctagggctgctgactgagcaactacagagcctgactctctttctacagacaaaactaaaggagaagactgaacaagagacccttctgctgagtacagcctgtcctcccacccaggaacaccctctgcctaatgacaggaccttcctgggaagcatcttgacagcagtggcagatgaagagccagaatcaactcctgtgcccttgcttggaagtgacaagagtgctttcacccgagtagcatcaatggtttcccttcagcccgcagagaccccaggcatggaggagagcctggcagaaatgagtattatgactactgagcttcagagtctttgttccctgctacaagagtctaaagaagaagccatcaggactctgcagcgaaaaatttgtgagctgcaagctaggctgcaggcccaggaagaacagcatcaggaagtccagaaggcaaaagaagcagacatagagaagctgaaccaggccttgtgcttgcgctacaagaatgaaaaggagctccaggaagtgatacagcagcagaatgagaagatcctagaacagatagacaagagtggcgagctcataagccttagagaggaggtgacccaccttacccgctcacttcggcgtgcggagacagagaccaaagtgctccaggaggccctggcaggccagctggactccaactgccagcctatggccaccaattggatccaggagaaagtgtggctctctcaggaggtggacaaactgagagtgatgttcctggagatgaaaaatgagaaggaaaaactcatgatcaagttccagagccatagaaatatcctagaggagaaccttcggcgctctgacaaggagttagaaaaactagatgacattgttcagcatatttataagaccctgctctctattccagaggtggtgaggggatgcaaagaactacagggattgctggaatttctgagctaagaaactgaaagccagaatctgcttcacctctttttacctgcaatacccccttaccccaataccaagaccaactggcatagagccaactgagataaatgctatttaaata

SEQ ID NO: 165346 - DNA, 3582 bp, Artificial Sequence
  derived and/or modified sequence
atgtggagagtgaagaagctgagcctgagcctgagccccagcccccagaccggcaagcccagcatgagaacccccctgagagagctgaccctgcagcccggcgccctgaccaacagcggcaagagaagccccgcctgcagcagcctgacccccagcctgtgcaagctgggcctgcaggagggcagcaacaacagcagccccgtggacttcgtgaacaacaagagaaccgacctgagcagcgagcacttcagccacagcagcaagtggctggagacctgccagcacgagagcgacgagcagcccctggaccccatcccccagatcagcagcacccccaagaccagcgaggaggccgtggaccccctgggcaactacatggtgaagaccatcgtgctggtgcccagccccctgggccagcagcaggacatgatcttcgaggccagactggacaccatggccgagaccaacagcatcagcctgaacggccccctgagaaccgacgacctggtgagagaggaggtggccccctgcatgggcgacagattcagcgaggtggccgccgtgagcgagaagcccatcttccaggagagccccagccacctgctggaggagagcccccccaacccctgcagcgagcagctgcactgcagcaaggagagcctgagcagcagaaccgaggccgtgagagaggacctggtgcccagcgagagcaacgccttcctgcccagcagcgtgctgtggctgagccccagcaccgccctggccgccgacttcagagtgaaccacgtggaccccgaggaggagatcgtggagcacggcgccatggaggagagagagatgagattccccacccaccccaaggagagcgagaccgaggaccaggccctggtgagcagcgtggaggacatcctgagcacctgcctgacccccaacctggtggagatggagagccaggaggcccccggccccgccgtggaggacgtgggcagaatcctgggcagcgacaccgagagctggatgagccccctggcctggctggagaagggcgtgaacaccagcgtgatgctggagaacctgagacagagcctgagcctgcccagcatgctgagagacgccgccatcggcaccacccccttcagcacctgcagcgtgggcacctggttcacccccagcgccccccaggagaagagcaccaacaccagccagaccggcctggtgggcaccaagcacagcaccagcgagaccgagcagctgctgtgcggcagaccccccgacctgaccgccctgagcagacacgacctggaggacaacctgctgagcagcctggtgatcctggaggtgctgagcagacagctgagagactggaagagccagctggccgtgccccaccccgagacccaggacagcagcacccagaccgacaccagccacagcggcatcaccaacaagctgcagcacctgaaggagagccacgagatgggccaggccctgcagcaggccagaaacgtgatgcagagctgggtgctgatcagcaaggagctgatcagcctgctgcacctgagcctgctgcacctggaggaggacaagaccaccgtgagccaggagagcagaagagccgagaccctggtgtgctgctgcttcgacctgctgaagaagctgagagccaagctgcagagcctgaaggccgagagagaggaggccagacacagagaggagatggccctgagaggcaaggacgccgccgagatcgtgctggaggccttctgcgcccacgccagccagagaatcagccagctggagcaggacctggccagcatgagagagttcagaggcctgctgaaggacgcccagacccagctggtgggcctgcacgccaagcaggaggagctggtgcagcagaccgtgagcctgaccagcaccctgcagcaggactggagaagcatgcagctggactacaccacctggaccgccctgctgagcagaagcagacagctgaccgagaagctgaccgtgaagagccagcaggccctgcaggagagagacgtggccatcgaggagaagcaggaggtgagcagagtgctggagcaggtgagcgcccagctggaggagtgcaagggccagaccgagcagctggagctggagaacagcagactggccaccgacctgagagcccagctgcagatcctggccaacatggacagccagctgaaggagctgcagagccagcacacccactgcgcccaggacctggccatgaaggacgagctgctgtgccagctgacccagagcaacgaggagcaggccgcccagtggcagaaggaggagatggccctgaagcacatgcaggccgagctgcagcagcagcaggccgtgctggccaaggaggtgagagacctgaaggagaccctggagttcgccgaccaggagaaccaggtggcccacctggagctgggccaggtggagtgccagctgaagaccaccctggaggtgctgagagagagaagcctgcagtgcgagaacctgaaggacaccgtggagaacctgaccgccaagctggccagcaccatcgccgacaaccaggagcaggacctggagaagaccagacagtacagccagaagctgggcctgctgaccgagcagctgcagagcctgaccctgttcctgcagaccaagctgaaggagaagaccgagcaggagaccctgctgctgagcaccgcctgcccccccacccaggagcaccccctgcccaacgacagaaccttcctgggcagcatcctgaccgccgtggccgacgaggagcccgagagcacccccgtgcccctgctgggcagcgacaagagcgccttcaccagagtggccagcatggtgagcctgcagcccgccgagacccccggcatggaggagagcctggccgagatgagcatcatgaccaccgagctgcagagcctgtgcagcctgctgcaggagagcaaggaggaggccatcagaaccctgcagagaaagatctgcgagctgcaggccagactgcaggcccaggaggagcagcaccaggaggtgcagaaggccaaggaggccgacatcgagaagctgaaccaggccctgtgcctgagatacaagaacgagaaggagctgcaggaggtgatccagcagcagaacgagaagatcctggagcagatcgacaagagcggcgagctgatcagcctgagagaggaggtgacccacctgaccagaagcctgagaagagccgagaccgagaccaaggtgctgcaggaggccctggccggccagctggacagcaactgccagcccatggccaccaactggatccaggagaaggtgtggctgagccaggaggtggacaagctgagagtgatgttcctggagatgaagaacgagaaggagaagctgatgatcaagttccagagccacagaaacatcctggaggagaacctgagaagaagcgacaaggagctggagaagctggacgacatcgtgcagcacatctacaagaccctgctgagcatccccgaggtggtgagaggctgcaaggagctgcagggcctgctggagttcctgagctag

SEQ ID NO: 165347 - protein, 468 aa, Artificial Sequence
  derived and/or modified sequence
MGTATPDGREDQERLWVSVEDAQMHTVTIWLTVRPDMTVASLKDMVFLDYGFPPVLQQWVIGQRLARDQETLHSHGVRQNGDSAYLYLLSARNTSLNPQELQRERQLRMLEDLGFKDLTLQPRGPLEPGPPKPGVPQEPGRGQPDAVPEPPPVGWQCPGCTFINKPTRPGCEMCCRARPEAYQVPASYQPDEEERARLAGEEEALRQYQQRKQQQQEGNYLQHVQLDQRSLVLNTEPAECPVCYSVLAPGEAVVLRECLHTFCRECLQGTIRNSQEAEVSCPFIDNTYSCSGKLLEREIKALLTPEDYQRFLDLGISIAENRSAFSYHCKTPDCKGWCFFEDDVNEFTCPVCFHVNCLLCKAIHEQMNCKEYQEDLALRAQNDVAARQTTEMLKVMLQQGEAMRCPQCQIVVQKKDGCDWIRCTVCHTEICWVTKGPRWGPGGPGDTSGGCRCRVNGIPCHPSCQNCH

SEQ ID NO: 165348 - DNA, 1407 bp, Artificial Sequence
  derived and/or modified sequence
atggggactgctacgcccgatggcagagaggatcaggagaggctctgggtctccgtcgaagatgcccaaatgcacaccgtgactatatggctgacagtacgccctgacatgactgtagcatcgctcaaggacatggtgtttcttgattacggttttccccctgtgttgcaacagtgggtcattggtcaaaggttggcacgcgaccaggaaacactgcactcacacggcgtaaggcagaatggggactcggcctacctgtatctgctgagtgccaggaacacatcccttaacccccaggaactgcagcgagagaggcagctccgcatgctggaggacttaggatttaaggatcttacattgcaaccgcggggtcctcttgagcccggtccgcctaagcccggggttcctcaggagccaggaagggggcagccagacgctgtccctgagccacctccagtgggatggcaatgcccgggctgcacattcattaacaaacctacaaggccagggtgtgagatgtgctgcagggctcggccagaggcatatcaggtgcccgcctcgtatcaacctgacgaagaagaacgagcccgcctcgccggagaggaagaggcacttagacaataccagcagcggaaacagcaacagcaggagggcaattaccttcagcatgttcaactggaccagcggagcttagttttaaataccgagcctgccgagtgccctgtttgttattctgtcctcgcgccaggggaggctgtcgtgcttcgtgaatgcctgcatacgttttgccgtgaatgccttcagggcacaattcgcaacagccaggaagccgaggtatcgtgcccgtttatagacaatacttactcatgctcaggaaagttgctcgagagagagatcaaagccttactgacccccgaagattaccaacgtttcctcgacttaggaatctctatagctgaaaatcggagcgctttttcctatcattgcaagacacccgactgcaagggatggtgcttcttcgaagacgatgttaatgaatttacttgtccagtttgttttcacgtgaactgtcttttatgtaaagctatccatgagcaaatgaattgcaaggaataccaggaggatctcgctttgcgcgcacagaatgacgtagcggccagacaaacaaccgagatgctgaaggtgatgctccagcagggtgaggccatgcgctgccctcagtgccagatagtcgtgcagaagaaggacggctgcgactggatccgctgcactgtctgccacaccgagatctgctgggtgactaaggggcctagatggggacctggcggcccaggcgatactagtggggggtgccggtgcagagttaatggcatcccttgtcacccatcctgtcagaactgccactag

SEQ ID NO: 165349 - DNA, 1407 bp, Artificial Sequence
  derived and/or modified sequence
atgggcacagccaccccagatggccgggaggaccaggagcggctgtgggtgtctgtggaggatgcccagatgcacacagtgaccatctggctgactgtgcggccagacatgacagtggccagcctgaaggacatggtgttcctggactatggcttcccccctgtgctgcagcagtgggtgattggccagaggctggcccgggaccaggagaccctgcacagccatggagtgcggcagaatggagacagcgcctacctgtacctgctgagcgccaggaacaccagcctgaacccccaggagctgcagcgggagcggcagctgaggatgctggaggacctgggcttcaaggacctgaccctgcagccccggggccccctggagcccggcccccccaagccaggagtgccccaggagcccggccggggccagccagatgctgtgcctgagcccccacctgtgggctggcagtgccccggctgcaccttcatcaacaagcccaccaggcctggctgtgagatgtgctgccgggcccggcctgaggcctaccaggtgcctgccagctaccagccagatgaggaggagcgggcccggctggccggggaggaggaggccctgcggcagtaccagcagaggaagcagcagcagcaggagggcaactacctgcagcacgtgcagctggaccagaggagcctggtgctgaacacagagccagcagaatgtcctgtgtgctacagcgtgctggcccctggagaggccgtggtgctgagagaatgtctgcacaccttctgcagagaatgtctgcagggcaccatccggaacagccaggaggccgaggtgtcctgccccttcatcgacaacacctacagctgcagcggcaagctgctggagcgggagatcaaggccctgctgaccccagaggactaccagcgcttcctggacctgggcatcagcattgctgagaacagaagtgccttctcctaccactgcaagaccccagactgcaagggctggtgcttctttgaagatgatgtgaatgagttcacctgccctgtgtgcttccacgtgaactgcctgctgtgcaaggccatccacgagcagatgaactgcaaggagtaccaggaggacctggccctgcgggcccagaatgatgtggccgcccggcagaccacagagatgctgaaggtgatgctgcagcagggcgaggccatgcgctgcccccagtgccagatcgtggtgcagaagaaggatggctgtgactggatccgctgcaccgtgtgccacacagagatctgctgggtgaccaagggcccccgctggggccctgggggccctggggacaccagcggcggctgccgctgccgggtgaatggcatcccctgccaccccagctgccagaactgccactag

SEQ ID NO: 165350 - DNA, 1407 bp, Artificial Sequence
  derived and/or modified sequence
atgggcaccgccacccccgacggccgggaggaccaggagcggctgtgggtgagcgtcgaagatgcgcagatgcataccgttactatatggctgaccgtacgcccagacatgaccgttgccagcctgaaggatatggtcttcctggattatggtttccccccggtgttgcagcagtgggtcatcggtcaacggcttgccagagatcaggaaacactgcactctcacggcgttcggcaaaacggcgattccgcctatctctacctcctttctgctcgaaacacatcactgaacccccaggagttgcagagggaacgtcagctgcgcatgctcgaggatctggggttcaaggacttgacactgcagccccgcgggcccctggagcctggaccgcccaagccaggcgtcccccaagagccaggacggggccagcccgacgcagtccctgagccgccacctgtcggatggcagtgccccggttgcaccttcattaacaaacccacaagaccaggttgtgaaatgtgctgtcgagctcgacctgaagcgtaccaggtccctgctagctaccagccggatgaagaggagcgagcacggctcgccggcgaagaagaggcactgaggcagtaccagcaaaggaaacagcagcaacaggaaggcaattaccttcagcatgtccagctagaccaacgctccctggtgctgaacacggaacccgcggagtgtcctgtgtgctattccgttcttgccccaggggaagccgttgtcttgcgcgaatgtctccacactttctgccgtgagtgcctccaagggactattcggaatagccaggaagcagaagtatcatgcccatttatcgacaacacctatagctgcagtggaaagctgctcgaaagagagatcaaagccctgttgacccctgaagactatcagcgctttttggatctcggtatctccatcgcagaaaacaggagcgctttttcataccactgtaaaacaccagactgcaagggctggtgtttttttgaggatgatgtaaatgaattcacatgccctgtgtgttttcacgtgaactgtctgctgtgtaaggctatacatgaacagatgaactgtaaggaatatcaagaggacctggccttacgcgctcagaacgatgtggctgcccgacagacaaccgaaatgcttaaggtgatgcttcagcagggagaggcaatgagatgcccgcagtgtcagattgtcgtgcagaaaaaggatggatgcgactggattagatgcacagtgtgtcacactgaaatttgttgggttaccaaaggaccacggtgggggcctggcggcccaggcgacacctctggcggatgtagatgtagggtgaacggaattccttgccacccatcctgtcagaactgtcactag

SEQ ID NO: 165351 - DNA, 1407 bp, Artificial Sequence
  derived and/or modified sequence
atggggacagccactcctgacggcagagaggatcaagagcgtctgtgggtttcagtggaggatgctcagatgcatacagtgacaatctggctcaccgttcgccctgacatgacagtggcctccctgaaggacatggtgtttctggactatggatttcccccagtccttcagcagtgggttattggtcagcgacttgctcgcgaccaggagacccttcattcccatggagtgcgacagaatggcgactctgcttatctgtatcttctgtctgctcgtaatacaagcttgaatccacaggagctgcagcgggagcggcagctgcgtatgctggaagatttaggctttaaggacctgactctccaacccaggggccctcttgagccagggcctcctaagcccggtgttcctcaggaaccaggcaggggccagcctgacgctgtgcctgagcccccacctgtggggtggcagtgccctggctgtaccttcattaataagcccacaagacccggttgcgaaatgtgttgtcgcgctcgaccggaagcgtatcaagtccccgcatcttaccaaccagatgaggaggaacgagccagattggccggagaagaggaagcgctaagacagtaccaacagagaaagcagcagcaacaggagggaaactatctccaacacgtccagctcgaccaacgttctctcgtactaaatactgagccagcagagtgtccagtgtgctactccgtgctggcgcctggcgaagcggtggtcctgagagagtgtcttcacaccttttgtagggagtgtctgcaagggacaattcgcaatagccaggaagcggaggtctcttgcccgtttattgacaacacctactcatgcagtggaaagctcctagagagggagatcaaagctctgctcacccccgaagattaccagcgctttctggatttgggtatttcgattgccgaaaacagatctgcgtttagctaccactgtaagacacctgattgtaaaggctggtgttttttcgaagatgacgtgaatgagtttacatgcccggtgtgtttccatgtgaactgtctgctctgtaaggcaattcacgaacagatgaattgtaaggagtaccaggaagatctagcgctccgcgcacagaacgatgtggcagccagacaaacaaccgagatgctcaaagtgatgctgcagcagggagaggcgatgcggtgccctcaatgccagattgtggtccagaaaaaagatgggtgtgactggatccgttgcacagtgtgccacaccgagatctgctgggtgactaaggggccaagatggggcccaggcggtcctggtgacacatctggcggttgtcggtgtcgggtgaatggcattccgtgtcatccaagctgccagaattgccactag

SEQ ID NO: 165352 - DNA, 2511 bp, Artificial Sequence
  derived and/or modified sequence
gcgccgggaccgctgggaccccgcactcggcgtccgccgccgccgggtagccgggcagtggaggtcccggatgaggcgacaatttttccggccccccctcccagtcccgccccacttccggggccgccactttcactttctcttccgccgaagccgctccccttgcgaagaactggggcctcccgggaggagagagggctttgccttgaaacccgggacgccaggggcgctcccgcaagtgggggtcctccgggacttggaacgccccggctgggtggtgtccgggcgtcctttccccgcttcttcccacctcggctggtcccgtttcctcctgcgcccagtgcggacctgtctcggcgcccgctgccctctcaccgccccacgcaggatcccggcctggtcaccgggcagtgtgatgcttcccgactgccgcggggacagcgaggcacacacagggcttgggccgcgccggaggccacacggcctggctgagttgctcctggtctcccgcctctcccaggcgacccggaggtagcatttcccaggaggcacggtcccccccagggggatgggcacagccacgccagatggacgagaagaccaagaaaggctgtgggtgagcgtggaggatgctcagatgcacaccgtcaccatctggctcacagtgcgccctgatatgacagtggcgtctctcaaggacatggtttttctggactatggcttcccaccagtcttgcagcagtgggtgattgggcagcggctggcacgagaccaggagaccctgcactcccatggggtgcggcagaatggggacagtgcctacctctatctgctgtcagcccgcaacacctccctcaaccctcaggagctgcagcgggagcggcagctgcggatgctggaagatctgggcttcaaggacctcacgctgcagccgcggggccctctggagccaggccccccaaagcccggggtcccccaggaacccggacgggggcagccagatgcagtgcctgagcccccaccggtgggctggcagtgccccgggtgcaccttcatcaacaagcccacgcggcctggctgtgagatgtgctgccgggcgcgccccgaggcctaccaggtccccgcctcataccagcccgacgaggaggagcgagcgcgcctggcgggcgaggaggaggcgctgcgtcagtaccagcagcggaagcagcagcagcaggaggggaactacctgcagcacgtccagctggaccagaggagcctggtgctgaacacggagcccgccgagtgccccgtgtgctactcggtgctggcgcccggcgaggccgtggtgctgcgtgagtgtctgcacaccttctgcagggagtgcctgcagggcaccatccgcaacagccaggaggcggaggtctcctgccccttcattgacaacacctactcgtgctcgggcaagctgctggagagggagatcaaggcgctcctgacccctgaggattaccagcgatttctagacctgggcatctccattgctgaaaaccgcagtgccttcagctaccattgcaagaccccagattgcaagggatggtgcttctttgaggatgatgtcaatgagttcacctgccctgtgtgtttccacgtcaactgcctgctctgcaaggccatccatgagcagatgaactgcaaggagtatcaggaggacctggccctgcgggctcagaacgatgtggctgcccggcagacgacagagatgctgaaggtgatgctgcagcagggcgaggccatgcgctgcccccagtgccagatcgtggtacagaagaaggacggctgcgactggatccgctgcaccgtctgccacaccgagatctgctgggtcaccaagggcccacgctggggccctgggggcccaggagacaccagcgggggctgccgctgcagggtaaatgggattccttgccacccaagctgtcagaactgccactgagctaaagatggtggggccacatgctgacccagccccacatccacattctgttagaatgtagctcagggagcttcgtggacggccttgcttgctgtagcgttgtaggggccctgcctgcactgcggttgtccacggtcacatctgccccagtgcctttgtccttcccttggggcttgccggccagacttctctcccctgcggctcccacctctgcctgaccccagccttaaacatagcccctggccagaggccttgctgggtggagcctctgtgtgactccatactcctcccaccacaacactcatctgtcaaacaccaagcactctcagcctccccgccttcagctgtcagctttctggggctaacttctctgcctttgtggttggaggcctgaggcctcttggaactcttgctaacctgttcagagccaggaaggagactgcacagttttgaaagcacagcccgtcaggtccggctctgcgtctccctctctgcagcctgtgtaagctattataattaaaatggttttccgggaa

SEQ ID NO: 165353 - DNA, 1407 bp, Artificial Sequence
  derived and/or modified sequence
atgggcaccgccacccccgacggcagagaggaccaggagagactgtgggtgagcgtggaggacgcccagatgcacaccgtgaccatctggctgaccgtgagacccgacatgaccgtggccagcctgaaggacatggtgttcctggactacggcttcccccccgtgctgcagcagtgggtgatcggccagagactggccagagaccaggagaccctgcacagccacggcgtgagacagaacggcgacagcgcctacctgtacctgctgagcgccagaaacaccagcctgaacccccaggagctgcagagagagagacagctgagaatgctggaggacctgggcttcaaggacctgaccctgcagcccagaggccccctggagcccggcccccccaagcccggcgtgccccaggagcccggcagaggccagcccgacgccgtgcccgagcccccccccgtgggctggcagtgccccggctgcaccttcatcaacaagcccaccagacccggctgcgagatgtgctgcagagccagacccgaggcctaccaggtgcccgccagctaccagcccgacgaggaggagagagccagactggccggcgaggaggaggccctgagacagtaccagcagagaaagcagcagcagcaggagggcaactacctgcagcacgtgcagctggaccagagaagcctggtgctgaacaccgagcccgccgagtgccccgtgtgctacagcgtgctggcccccggcgaggccgtggtgctgagagagtgcctgcacaccttctgcagagagtgcctgcagggcaccatcagaaacagccaggaggccgaggtgagctgccccttcatcgacaacacctacagctgcagcggcaagctgctggagagagagatcaaggccctgctgacccccgaggactaccagagattcctggacctgggcatcagcatcgccgagaacagaagcgccttcagctaccactgcaagacccccgactgcaagggctggtgcttcttcgaggacgacgtgaacgagttcacctgccccgtgtgcttccacgtgaactgcctgctgtgcaaggccatccacgagcagatgaactgcaaggagtaccaggaggacctggccctgagagcccagaacgacgtggccgccagacagaccaccgagatgctgaaggtgatgctgcagcagggcgaggccatgagatgcccccagtgccagatcgtggtgcagaagaaggacggctgcgactggatcagatgcaccgtgtgccacaccgagatctgctgggtgaccaagggccccagatggggccccggcggccccggcgacaccagcggcggctgcagatgcagagtgaacggcatcccctgccaccccagctgccagaactgccactag

SEQ ID NO: 165354 - protein, 437 aa, Artificial Sequence
  derived and/or modified sequence
MRFVVALVLLNVAAAGAVPLLATESVKQEEAGVRPSAGNVSTHPSLSQRPGGSTKSHPEPQTPKDSPSKSSAEAQTPEDTPNKSGAEAKTQKDSSNKSGAEAKTQKGSTSKSGSEAQTTKDSTSKSHPELQTPKDSTGKSGAEAQTPEDSPNRSGAEAKTQKDSPSKSGSEAQTTKDVPNKSGADGQTPKDGSSKSGAEDQTPKDVPNKSGAEKQTPKDGSNKSGAEEQGPIDGPSKSGAEEQTSKDSPNKVVPEQPSRKDHSKPISNPSDNKELPKADTNQLADKGKLSPHAFKTESGEETDLISPPQEEVKSSEPTEDVEPKEAEDDDTGPEEGSPPKEEKEKMSGSASSENREGTLSDSTGSEKDDLYPNGSGNGSAESSHFFAYLVTAAILVAVLYIAHHNKRKIIAFVLEGKRSKVTRRPKASDYQRLDQKS

SEQ ID NO: 165355 - DNA, 1314 bp, Artificial Sequence
  derived and/or modified sequence
atgagattcgtggtggccctggtgctgctgaacgtggccgccgccggcgccgtgcccctgctggccaccgagagcgtgaagcaggaggaggccggcgtgagacccagcgccggcaacgtgagcacccaccccagcctgagccagagacccggcggcagcaccaagagccaccccgagccccagacccccaaggacagccccagcaagagcagcgccgaggcccagacccccgaggacacccccaacaagagcggcgccgaggccaagacccagaaggacagcagcaacaagagcggcgccgaggccaagacccagaagggcagcaccagcaagagcggcagcgaggcccagaccaccaaggacagcaccagcaagagccaccccgagctgcagacccccaaggacagcaccggcaagagcggcgccgaggcccagacccccgaggacagccccaacagaagcggcgccgaggccaagacccagaaggacagccccagcaagagcggcagcgaggcccagaccaccaaggacgtgcccaacaagagcggcgccgacggccagacccccaaggacggcagcagcaagagcggcgccgaggaccagacccccaaggacgtgcccaacaagagcggcgccgagaagcagacccccaaggacggcagcaacaagagcggcgccgaggagcagggccccatcgacggccccagcaagagcggcgccgaggagcagaccagcaaggacagccccaacaaggtggtgcccgagcagcccagcagaaaggaccacagcaagcccatcagcaaccccagcgacaacaaggagctgcccaaggccgacaccaaccagctggccgacaagggcaagctgagcccccacgccttcaagaccgagagcggcgaggagaccgacctgatcagccccccccaggaggaggtgaagagcagcgagcccaccgaggacgtggagcccaaggaggccgaggacgacgacaccggccccgaggagggcagcccccccaaggaggagaaggagaagatgagcggcagcgccagcagcgagaacagagagggcaccctgagcgacagcaccggcagcgagaaggacgacctgtaccccaacggcagcggcaacggcagcgccgagagcagccacttcttcgcctacctggtgaccgccgccatcctggtggccgtgctgtacatcgcccaccacaacaagagaaagatcatcgccttcgtgctggagggcaagagaagcaaggtgaccagaagacccaaggccagcgactaccagagactggaccagaagagctag

SEQ ID NO: 165356 - DNA, 1314 bp, Artificial Sequence
  derived and/or modified sequence
atgagatttgtggtggccttggtcctcctaaacgttgcagcggccggtgcagttcccctcttggccacagagagcgtaaaacaggaggaggctggagtccggccttctgctggcaatgtgtcaacacaccccagcttgtcccagaggccaggcgggagcactaaatcccacccagaaccccaaacccctaaagattcgccctcgaaatcatccgcagaagcccagacacctgaagatacaccgaacaaatccggcgccgaagccaaaacacaaaaggattcatcaaataagtctggcgccgaagctaagactcagaaaggatctaccagtaagtctggctctgaggcccagaccaccaaggacagtactagtaaatcccaccctgagctacagactcccaaggacagcaccggtaagagtggggccgaagcccaaacaccagaggactcccctaaccggtcaggggctgaggccaagacgcaaaaggacagtccctcaaagtcaggtagtgaagcccagaccactaaggatgttccgaacaagagcggtgccgacgggcaaacacctaaggacggctcaagcaagtcaggtgctgaagaccagacccctaaggacgtgcctaataagagcggagccgagaagcagactcccaaggatggctctaacaagtccggcgccgaggagcagggccccattgacggtccaagcaagtccggcgccgaagagcagactagcaaggactctcccaataaggtagtgccagaacaaccctcacgaaaagatcattcgaagcccatcagcaacccatcagataataaggaactgcccaaagctgacacaaaccagctggctgataaggggaagctgtccccgcatgctttcaagaccgaaagcggcgaggaaaccgatcttatttcccccccacaggaggaggtgaaatctagtgagccaactgaagacgtcgagccaaaagaagcagaagatgacgatacaggacctgaagaaggttcgcctccgaaggaggagaaagagaagatgagcgggtcggcttcctctgagaatagagaaggaaccttgagcgattccacaggcagtgaaaaggacgacctttaccctaatggcagcggcaatggctccgctgaatcctctcacttttttgcctatctggtcaccgcagccattcttgtggccgtgctctacatcgcacaccacaacaagcggaagatcatagcttttgtactggaaggcaaacgaagcaaagtgaccagacggccaaaagccagcgactaccagcgattggatcagaaaagctag

SEQ ID NO: 165357 - DNA, 1314 bp, Artificial Sequence
  derived and/or modified sequence
atgagatttgtggtggccctggtgctgctgaatgtggccgctgctggagctgtgcccctgctggccacagaatctgtgaagcaggaggaggccggcgtgcggcccagcgctggaaatgtgtccacccaccccagcctgagccagaggcctgggggcagcaccaagagccaccctgagccccagacccccaaggacagccccagcaagagcagcgctgaggcccagaccccagaggacacccccaacaagagcggggctgaggccaagacccagaaggacagcagcaacaagagcggggctgaggccaagacccagaagggcagcaccagcaagagcggcagcgaggcccagaccaccaaggacagcaccagcaagagccaccctgagctgcagacccccaaggacagcacaggcaagagcggggctgaggcccagaccccagaggacagccccaacagaagtggagctgaggccaagacccagaaggacagccccagcaagagcggcagcgaggcccagaccaccaaggatgtgcccaacaagagcggggctgatggccagacccccaaggatggcagcagcaagagcggggctgaggaccagacccccaaggatgtgcccaacaagagcggggctgagaagcagacccccaaggatggcagcaacaagagcggggctgaggagcagggccccattgatggccccagcaagagcggggctgaggagcagaccagcaaggacagccccaacaaggtggtgcctgagcagcccagcaggaaggaccacagcaagcccatcagcaaccccagcgacaacaaggagctgcccaaggctgacaccaaccagctggccgacaagggcaagctgagcccccacgccttcaagacagagagcggggaggagacagacctgatcagccccccccaggaggaggtgaagagcagcgagcccacagaagatgtggagcccaaggaggctgaagatgatgacaccggccctgaggagggcagcccccccaaggaggagaaggagaagatgagcggcagcgccagcagtgaaaatcgggagggcaccctgagtgacagcactggaagtgagaaggatgacctgtacccaaatggaagtggaaatggatctgctgagagcagccacttctttgcctacctggtgacagctgccatcctggtggccgtgctgtacatcgcccaccacaacaagaggaagatcatcgcctttgtgctggagggcaagaggagcaaggtgacccggcggcccaaggccagtgactaccagaggctggaccagaagagctag

SEQ ID NO: 165358 - DNA, 1314 bp, Artificial Sequence
  derived and/or modified sequence
atgcggttcgtggtggccctggtgctgctgaacgtggccgccgccggagctgtgcccttgctcgccacggaatcagttaaacaagaggaagctggcgtgcgaccttccgcgggcaatgtgtcaacgcaccctagcttatcccaacgcccaggaggtagcaccaaatcccacccagagccgcagactccaaaagactctccttctaagagcagtgcagaagctcaaacacccgaggacacccccaataaaagcggcgcagaagcgaagacccagaaagattccagtaataagtccggggccgaggcgaagactcagaagggctctacatctaagagcggctccgaggcccagaccactaaggactccacgtctaagtctcaccccgaattgcagacccccaaagatagtacaggtaagagcggtgccgaggcacagacaccagaggattccccaaaccggtccggagcagaagcaaagacgcagaaagacagccctagcaaaagcgggtctgaggcccagacaacaaaggatgtgccaaacaaatctggggcagatggtcagacgcccaaggatggctcgtctaaaagcggggccgaggatcagacccccaaggacgtgcccaataagtccggagccgagaagcagactcccaaggatgggagcaataagtcgggcgcggaggagcaagggcctattgatggtccatctaaatctggggctgaggagcagacctccaaggacagtccaaacaaggtggtccccgagcagcccagccggaaggatcatagtaaacccattagcaacccgagcgataataaggagttgccgaaggccgataccaaccagctggccgacaagggaaaactcagtccccacgcttttaagacggagtcgggcgaggagacagacctgattagccctccccaggaggaagttaagagctccgagccaacagaagatgtggagcccaaggaggcagaggacgacgacactgggcccgaagaaggatcaccacccaaagaagagaaggaaaagatgtctggaagtgcttcctccgaaaatagggaagggacccttagcgactcgaccggctcagagaaagacgatctctaccccaacggaagcgggaatgggagcgcagagtcaagccacttttttgcctatctcgtgactgctgccatcctcgttgctgtgttgtatatcgctcaccataacaaacgcaaaatcattgcctttgtgcttgagggcaaaaggtctaaagtgactcgtagaccaaaggcgtccgattaccagagactggaccagaagagctag

SEQ ID NO: 165359 - DNA, 1314 bp, Artificial Sequence
  derived and/or modified sequence
atgagattcgttgtagctctggtgttgctcaacgtggctgccgcaggcgctgtcccgttactggctactgagtccgtgaagcaagaagaggcgggagtgagacccagcgcagggaatgtctcgacgcatccttcactgtcccaacgacccggaggatcgaccaagagtcacccagagcctcagacacctaaggactctccttctaagtcctcagccgaggctcagaccccagaggacactcctaacaagtctggggctgaagccaagacacagaaagatagcagtaacaagagtggtgcagaagccaagacgcagaaggggtctactagtaagtccgggtcagaagctcagacaacgaaagatagcacaagcaagtctcacccagagcttcagacacctaaggactcaacaggtaagtcaggggctgaggcccagaccccggaagatagccctaaccggtcgggagcagaggccaagactcagaaggactcaccatctaaatcgggcagcgaagcccagactactaaggacgtcccgaataagtccggggcagatggccagactcccaaggatggctcatcgaagtccggagctgaagaccaaactccgaaggacgttccgaataaaagcggcgctgaaaagcagacccccaaggatgggagtaataagagcggagccgaggagcaagggcctatcgacggacccagtaagagcggggcagaagaacaaaccagcaaagattccccaaataaagttgtaccagagcagcctagtcgaaaggatcacagtaagcccatcagcaatccaagcgacaacaaagaactcccaaaagctgacaccaaccagctagcagacaaaggcaaactgagtccgcacgctttcaagacggagagtggagaagaaaccgatctgatctccccgcctcaggaagaggtaaagtcaagcgaaccaacagaagatgtggagccaaaggaagcagaggacgacgatactggcccagaagagggctcccctccgaaagaggagaaagaaaagatgagtggatccgcctcttcagaaaatagggaggggacacttagcgattccaccggtagtgaaaaggatgacctgtatcccaatggcagcggaaatggaagcgctgagagtagccactttttcgcctacctcgtcactgctgcaatcttagttgcagtcctatacattgctcaccacaataagagaaagattattgcttttgtgcttgaaggtaagcgatctaaagtaacaaggagacccaaggcatctgactatcagcgcttggaccagaaaagctag
